United States Patent Application Publication US 2007/0161031 A1 - sequence listing, part 16

SEQ ID NO: 19597 - DNA, 2300 bp, Homo sapien
taaaatcatttttatctggctcatttacttacattaactgctttcaagaatccttcccctctattctcaaatgaatttacacaacttctagttaagttttataaaaactgaaaaatgtaatctctatatatcccatcatcgtggagttttcataaacacatagttaagaggcttttaatctaataactttttttgttttgtttagttttttttgagacagtctcgctctgtcgcccaggctagagtgcaacggcgcaatctcggctcactgcaacctccgccttccgggtttaagcgattctcctgcctcagcctcctgagtagctgggattacaggcacgcgccaccacgcctggctaatttttgtatttttagtagagacggggtttcaccatgttggccaggctggtctcaaactcctgacctcgtgatccaaccgcctcggcctcccaacggctgggattacagaagtgagccactgcacccggtgtttaaaaacattaaaacatgtttttaaaagtcaaaattacactcattttctgtaaaattacaacagcaattatctcaagaaacttaagcatcaggaacagggaatgtaattgcctggttctaatgcttgtatatgcctataatgcattcgatctgtaagacctacacttttgcagttgtcaatattcatgtaatgagattaattctcaacttacctcatttcatataataacaaatacaagcagtcatcagaaattgatgggtcatccttatttgtgaaaaataggcctcattcttggttcaaagtttgtaacctcaaatgggctaatgcccacaatttagaagtgattagattggaaagcacaacgctgcaaatgctgccttccccaaagccaggtctattcattaatatacctgtgcctactgacaagaaggaaggctggtaaagcacattttcaaagctgttttaaatggatcaattttggtaaagagtaattcaagacggattgtaaatctgatcagttttacaaccttggaaggtggggacttgacgcacgacgttaatatgcacacgcttcaataatctatccacaggtagttttgaccctgatctcaggttgaaagtcctcaactatggagctttcgagtttcagtacagtaggcgctttcactccccagtagaaatctggggtgatggccaaaaaaagtgtgttgtctcccccaaaccacaccatgccaagttcagccaacgcagactaatgcatccttaggtatttgtcaagaagaggtataggcggtcccttttctcagaatctaacaggtaagaatggcctcttgtggcttcccaaacacggcggtaaggaccagtctgccagtccctaataagaaattgctaattttaaaaaccattccgaacgcgggcgcttccgggcccctcttcaactggcttcggaagaaggggggagaacacggtgaagggttacagcaaaggaggctgaaaaacagtcccaaagcaagatttgccaggacactggctcgacccggaagggcggggggacctctctcggccgccggggtctgtggggtcggcgagtgtggacgacccgtctggcagtcgtacactgccacagcccgaagagcggcgcacgcggagcagttgccgggttcgcgccgcgagtcagctcccggacacacgcccagggttgaaggtgccctctagacccctcccgctgccccacagaggcctgggcccatgctacctcttaggacgctggagccgccgccgccgcttcccgccgcgcaggctggaccacagctcctcggatgccacggcggtgtcactcagcagagcagcccgacaaagcgtgggtccgcgtgcaggaacccgccgggctcagccggacgctagccccctgccgcccccggccccgccagccgcgcccactagcaacgtgctcgcgacctccagtgcccgctcagtgaagcttctgcatgccgcgcgcggcacgtcgggactcgtagttccggcgcggaggacgtgcgtcgcggcactctcgcctgaccgtctccacgtgactctcgcacctccggaagtgacgtaagcagacacgcgtggcgcgggccgccgtttccgcaaacagaatcgcgtttggctgtgctggtgagtgtgacggctggaactccggcccttcctttctttgtgtttgtccctcggccgccgtggaggggtggaactggcactcccacccctgacatgggctcacttcgcattagccctgtgcttcactacccaacgcgtgggtctattgcct

SEQ ID NO: 19598 - DNA, 2300 bp, Homo sapien
aaagatttttaaaaaatggatgctgaggccgtcacggtggctcacacctgtaatcccagcactttgggaggtggaggtgggcagatcacttgaggtcaggagttctagaccagcctggccaacatagtgaaaccccgtctctaccaaaaacacaaaaatcagccgggcatggtgatgtgcgcctgtaatcccagctactcgggaggctgaggcatgagaatcgcttgaacccgggaggtggaggttgcagtgagctgagatcaagccactgcactccggcctgggcgacagagcaaggctccgtcacacacacacacacacacacacacaaaaaaaaaaaaaaaaaaaaaaaaaaaaaaagatgctgatgaggatgcaggatgcagaaaagggggaacacttgtacactgttagggagaacgtaaattagcacagccactaatttacatactgggaaaagtatgatggaggttcttcaaaaaacaaaaaatagaactagtgctattgagatgagtttcttctatattctggttgttaatcccctgtccgatgaacagttttgcaaatctgggtacagatccaaaagaagggaaatcagtatatctaagaaatatctgcagtctcaagtttattcacaatagtcaagatatggaatcaacctaagcgttcatcaacagatgaataaagataatgtagcatatatacacaatggaatattagtcattaaaaagaatgaaatcctgtcatttgcaacaacatggatgaaaccggatgtcattatgttaactgaaataagccaggcacatgaagacaatatcatgttgttactcatgtgggagctaaaaatgtggacctgatggaggtaaagagtggattggtggttaccacagactgggaagggtagcaggaagaggagcgggatgaagaagagaaattggttaatgggtacaaaaaaccccagaagaaataaaatctagtgcctgatagtacagtggggtggacacagttaacaataacttattgtgtagttcaaaatagctaaaagaaaaattggaatgttcccaacataaagataaatgtttgagatgacaaatatcccaattgccctgatttagtcgttacacattgtatgcatgtatcaaagtatcacctgcacctgcaaatatgtgcaacttctatgtatcaatttaacaaattgggggaaaaaaaacccaaaccaaactcaaagtggaataatgaaaacactccatagggaagagagctgtccctcagaatcttcaagaaaccttcgaaaggtggtcgactgacatggagatggacacgcgataaataaccacacgaacatttcgacccggctttccagtcacacctccgaagcaagctatgtctctgcgtcatttcagctcctcagggtacgagcgagcaggccgccagggccgccgggataaagcccaagcgggataagctctaagtcccgacccgcccgcttgaccctctaccacggggcccgagaggacgcacagaggcgagaagggacttctccagccaagttcaccccctccgtcattagcgcggcctgttactcaacctctggttcaggtttccgaagcgccgctgaagacaaacctgcggaccccacgcccctccccagcacggccctggggcgcgagctggagcagctcttcgagctgcttctcccacccgggctcgcccagtctggaggaggaacagcgcccgcccaccccaaggagttcccattttccttgggactgaggacacaaggcaatagacccacgcgttgggtagtgaagcacagggctaatgcgaagtgagcccatgtcaggggtgggagtgccagttccacccctccacggcggccgagggacaaacacaaagaaaggaagggccggagttccagccgtcacactcaccagcacagccaaacgcgattctgtttgcggaaacggcggcccgcgccacgcgtgtctgcttacgtcacttccggaggtgcgagagtcacgtggagacggtcaggcgagagtgccgcgacgcacgtcctccgcgccggaactacgagtcccgacgtgccgcgcgcggcatgcagaagcttcactgagcgggcactggaggtcgcgagcacgttgctagtgggcgcggctggcggggccgggggcggcagggggctagcgtccggctgagcccggcgggttcctgcacgcggacccacgctttgtcgggctgctctgctgagtgacaccgccgtggcatccgaggagctgtggtccagcctgcgcggcggg

SEQ ID NO: 19599 - DNA, 2300 bp, Homo sapien
ccacccacccaagcaaccaatcaacgaaccaagcaaccacccacctacccaaccaactaccccccacccacccaagcaagcgagcaagcgagcaagcaaccaagtaaccatctactcactcaaccaagcaaccacccacctacccaaccaaccaatcaaccaaccaagcaaccacccacctacccaaccaaccaatcaaccaaccaaggaaccacccacctacccaatcaacgaaccccccacccaaccagccaagcaaccaagtaaccatccactcacctaaccaatcaaccaatcaaccaatcaggcaaccacccacctacccaactaactaacccgtaaccacccaaccaaccaagcaagcaaccacctgctcacccaaccaaccaatcaccaaacaagcaaccacccacccacccactcaaccaaccaactacccaaccaagcaaccactcacccaaccaaccattcaaccgaccgaccgaccgaccgaccgacccaccgacccgaccgaccaaccaaccaaccaagcaaccatccaaccattcaagagtgtgttcggggggattttcgctcggggctgacgcggttctctggccgctgtgccgtgctgggccactaggtggcagcggaggccgcccggagcgacagccggcggtgcggaggcgggcccggcgcgggcaggcaggaggcttaaagccccgcagagccgcagccgcctagctgggggagaggcccgtccggggctggctctgagcgccgcacggccgtcggatcccggggacgccgggggcccgggctgagcgccgcggcccgcgaggaggagcaccggtaaatagccacaactttctatctccttgagatcctgagaataaatgcaaaatcgcgcttccgctgcatgtggaagtgagcggggcggcagctagcttgccccgtgagtttttaacacagctcgatatgatgtttagtataattgcataatttaccgatatatctgagctggaactcagctgtaacaaatgattgtagttcaataaatgcttagattaccaattttttccttttttatttttatagatttagggggtacaggtgctgttttgttatatggatgtattgcatagtggtggagactgggcttttagtgtagccatcacccctatagtgtacattgtacctattaagtaatttgttgtccctcaccccctccctccctcccaaagtgattacaaatattaatgatgacagtgatgacagaaattctctccagatgtgatctgagtttggagggcaaagggatttttgaaaatgaatcataagagagaaattttgcaacaaaggagtgtggtacatttaaattgctgtttttttttttaaatactgtgctcacgcggacctaataaactatcaagcagacctcatggaattccacataatgcagaagcgagggaaaaataggtattgagggaaaagcagcactgttttcctcaattttaacacgtatgtgcagcctacacttacaaacttaagacagtagcttttaacatgtgactttgctcagggtaacagaccattctggttatagccttacttacagctgtggaggctgaatcctgatgggtctaagaagtgtcaggacaagtgttagggatgcacctgtctgtctgtcttaagggaatacgggtctgggcagtcttaaatcggagctcccttgaggagaatgtcgtgcagtagccttaggaatgtgaacattgggagactggctgggattttgtaggttatgagttggggacacttatgatagtgaacttgagcccaggagagaagccataaaaagtgaaactgtcctgggcacttggaggtgagtgtctctctagtaagatgcatgtgaaaggctgggagctgaaagcaaggagagcagaagaggctggtgaagattctaatctgcgtgtccaggggcactcttccaggtctcaggaacgcaggtcagaatgtgcaagccagctgccgggcacgtggctcacccctgtagtaccagcactttgggaggctgagagagaagatcgcttgtggccaggagtttgagaccagactgggcaacatagggagaccctgtctcttaaaaaaaaaaaaaaaaaaggactgagtgagccgagcccagtcctctgatgcactgtgtcattcatcccctttcttaggctgtgttggttctaggctagctgctgtctttctttggtaggctgctaacctctttggattgtgaatttaaaacatgttttacagtaaatttgctgccaaga

SEQ ID NO: 19600 - DNA, 2300 bp, Homo sapien
tcttcttcctgtccccttctgtttccccattgcatctcctttccccttgctctgcctcccaagcctcccccaccctctcactctttctctctctctgcctctttagcttttccatgagagggacaagcactggggaggaagttgtatttgtgaaagtgaccgagttgtatacgattgtgtgagaagagaagaaagggtgcatacagaagccctttgaatgctccctaaaattccccttttccatcgtatctcttgggatgagagagagactgggctggtgacggaatggtggcgcagttgtaacatggtcatcagagttcatctaccagcatctccacttacaagtttgctttccaatgatcaccagctgaatgggtttccctacagcaaagatatttcttttaaaataccactatttcaagagtgtttggacagggttataacaaaaaccataggtattggcatatggttttagatttccctgagcactgttacaaacctagtctgaattctcacaacagcccgctttacaccaggcaatggagtcctagaggcctggcactcagaactctgaccgcgtgtcttctggttctaaactctgtcatttctactctgctccttccaagagatttttgcccccttttctctaaaaattggagagagatgagcccccaaaatggaagaactaaaatagcaatagctactctctttgcagggcttagccaaacccctaggcaaccttccccctgctggaagtctctccctgtccctcccaatcagagtggcccaggtcccacccaggggactggccgaggctcgcctcctccagacagtgttcccattgtctgcagcctgcctgatgtcccactccccagggctggccaccggttttcccaatcagctaatcagatccacagatctctgacaaagggcctctgcttctgcaagtacaagggctaaggacgagttgtctctacttttccagataatacagtagctttctggaggcaatgccttgcttttctctgttatctcaactacatgactgaagagggaaagaggcctgtggaacgccgggtttcagctgcagggcatgttgcggaggcacacacctactcagaaacagtcgaagtctgggatgatcctgggtccatgagttcctggggacaacacgctttgcctcagtgacaggccaggaaaagccactttataaaattgtgtttacccgcctggcaaattcaactcaggtctctctctttggtcttttccagaccacccacgtgtgaacactttttagcttggggcggaagctcacatttcagaaacagccactggtttggccccagccccaaaaacccaggaccatctggaaacttggcccaattccacacttcaacattcctgttgctgtgactgacaccaacagtagcccttccctgcaggccccggcaggcagaaaacacacagcattgcaccctaaaatggaagaattttgctttgaatgatggctcttatctatggcggtttctgtgaagtttttggacggagaagcattggcagaacacagggtttttttcttgtctggacccatgcgtcatatgtgcacttgagcacacagttccctcactctcattgtttagtcttgtgaaatagggataatggggctattcccttcttcttaatgaaactaatgagccaaatatttgcaagatatatcaagaagtttgctagaagttttaaaacaaattcttccaaaaccattttctcaaaaacctgatttatttaattccttagttctttttggaaataaatgcaactctaaagtggcatttaaaaagagcaagatgacaattccataatctgctagaaacattgtcataaacattggaagtaaccttgactagctgagctcatggaaattatgtcttcatctgcctgtgtctttccatttctctaacttcacattaccagaaatgcacagttcatgtgggatgacatttattcaaggtaatgataacaatctagctgtatctccggtgatgcatgtgttccggcccttcccggcccaaggtccacttgcttgcttttctctccgagctcattccttctcattcattttgcccagaaagttcctgcttcagagctgaaggtaagtacattttccactaattcctcagcttgctaagtgcttttggaccatgaatagagcagctaggaacaaatctgagaagaggtactattcagaattcctccaaatagctcatctttttaattatgggctttcatccttcctaagggag

SEQ ID NO: 19601 - DNA, 2300 bp, Homo sapien
tttgtacattaaagtaaaaatggacaaaaaggatctgggaggtgagattgaccatgcattgtgtgaacagattatggatgtgagtacactggacaacatgccccaccttgtagcaaaattctgtctggaaaacaaggaatggaactatgtagagagagctggcacactcagagaaagcaagatcatcaccaattagatgtcagtgctatttacagagatattgaaacctatggactccaggaggatagagaaacttcaggaacatttgggtaatgggtggctgctattacttaacacctatgtgacaattatcccgttttagcaaatggaaagtacagcttaggatgcttgtttgcctctagcatgtttatagtatcaagacatttgaatcttttttcaggaaaatcagaagagaaagtcttgttccaaagtaaagaattagaaaaactcggagtagcttcatcacatataaaaagctgccttgactgcgaaacccaagcagtcctgcaccatagtcagttcccctgatcaataacaaaacaaggggaaagtctggttttcttgctgaagagatttcactttaccatcatattctttgtagcttagcaacaagaaaatgtgatttgttcatattttattgttcatggctaagtgcatatgatacaggttgagaaaaaaattaaaacccaagcacagagatcaggaccacataaggttcaaaattccttaaatttcattctagttaaaaatgagttctggcatatccatcccttatcaaagaaaagataaaagttgtcttaaatgaataatatatggagtaaaaattaaaggagacaaatatacttataactgcttaattctgagaaatgataatcttatatccaaggaattgaaacggtgaaatcaccataattactttaatttctttattttaaatgtgattgcagccttgtcactgtctccttatttgaaatttcttaactgctacagcacatacttaagtattgacatcattaatttgaaatttgcaaaactaaaactgggacaaggaggactttggaaaatagtttgatttttttaggaatattagatacattctatatgtaagatatgtttttggaatttttttttaaactcatgtctgactgaaaaaaacatttattttttaaaaattacctacattcctagaactcacttttcaaataaaagttttaatttttacgaacatgaaagaagcaaaacttacagaattaaaacttattccatctgtgatgaatataagtatgaaaatgaattaataaagttttggtctaaaatgactaggtaatatatgtagcttaagaactatatagcaagtaaatgaaagtcattttattcagagaatttgatgggaacctaatattttttgagtatttcctataagataaatgaaactagactaacttgtatgagtcaccaaattaaaggataaatatgcgaagaaaacaaattctttattgcattataatgaaaagaatcttatgaactgtaggactctttgatctggatgtttagtctgaggctaatgaaagaactcattcatctgattttttccatggcctgtctaggatttccggacacacactgagtctagaactgtgggctaaatgggcatttcttgagtaaaagaggtagacatcaaactgtacactgtgatttatttaacttttatggagttgaaaaaataatgtatgttaacagaaatcaaaacaggggctgcatatggtggggtgagtggatattggttaacaagttacaaggaggtattttctgcatcaatagacatgatccatatattgataaggctgttgtatactacagggaatatgaagtttaaaactctgtaacgtgcacattttactatattttaattttatatttatacaaaattttttaaaggaaaaaaataatcattaaacagtaatggagataggcctattttatttgtaaatcttctctgacggtaaaactgaccaattcaggctgccagttgatggctgggtttcaggtggaatgttgggatgttctttggtgtttgttgttccagtaggatccacggttaccgggcagagccgtgatggctgcggtgcaatggagggactgcaatcctctgtagagctgaggcctgggctgaccccttgggaagctggacgaggtgactgtggagatgctcggtccacgactcaccttccatagcctccaggggtagacaccggtgtgtccaccgctcactggctcatgggttggtcccttatttttat

SEQ ID NO: 19602 - DNA, 2300 bp, Homo sapien
aaaaagacaaactttatctacaacattagctcttaagattgtggttacttttggaggggaggaaaagagaaagtggtttgtgtggcagaaacaaggctagttctatcctatgcctacacaaatgtatttgtttgtaataatttactgagcattatgttaatgctttggacatatatttctgtatgcatgtcattcaataaaatttaaatattacatatttaatcttaacagaataatagcaatgtttggtattgttttgtttgaaagtgaggcatttagtgtcagacatcatgagatgggtattaatattccaaggtatttattcacatcctgactcttgggggtccccctcgatctttcatttttacctcaattgagtaagtagcatggttgtagttttggggaatgcaattttttacagcaaagtccttcctccacgatagtactcaccacggccaggacacttagcacagggccctgtacgtagtgtgcactcagtgtgtgtggaactggtgtgaatcagaaacaaaacaagtagcagaggtcagttctgcaaaggatagaaagtaagtaatcaagactgaaaggccgcaactcagcagcaaacacttctatgttaatttgagaaataatttcaactggctctccaaaagatgttggtttaaagcagtaacatgggagttgagctgtgtgctataatcacccgagagctttaaatcacactgttgcctaggtctcactccagagattgacttaattaccccattgcaacttgggtttgaagactttaaacactcctctacaaggttattgaaatatgcagccaagggtgagaagcattgattcagggtgaggaatacattggctgtatgtgatttttatgtgtgctttagggatttgccccatagctgctcctgaatgtggggtcttagaaaacatctttacccttcaaagcatattctgctgattggctaaattgcagcaggaaaaaatatcagcagctctgtctttatgtcacttgccttcaaagcaaaagatttttcaggcacagtaatttgatttagtctgtgttaaaaatcataaatagcctagaaatacaaaaaaaaagaggtgttcaggccttcacctccctgagatcggagcatcagagccctcatggctgctggtttgaagtaaaatgtgctgcaaacataaaatacacagcgagtttaaaagatttagatccaaaatatttataattatttgttgaccacacatgaaaaataatattttgggtataatggcttaaagagtattacaaacaatttcacttgtttctttttattattcctattatttctgagatggagtcttgctctgtcacccaggctgcagtgcagtggcacaaactcagctcactgcaacctccacctcctgggttcaagcgattctcctgcctcagcctcccaagcagctgggattacaggcgcccgccaccatgcccggctaatttttgtatttttagtagacagggcttcattatgttggccagagtggtctcgaacttctgacctctggcctctcagagtgctgggattacaggcgtgagccaccatgtcaggactctttttattactatttttgatctggctaataagacatttaaaattcacaatagctaacgttttattttttagaggattgcttctctcttaaaatcttaggtgtcccactccaaagaccggcggccagaaaggttatgaaatctgaaatattaaataattgtcattatattgcttccatttgtgaacaacgtgtgtgtgtgttttataaacgaacataaccttcataacgttatacaccacaatgctaaaaaaatgacccctgggcagagccaggcgcagcacagacagaaagccctgcctgaaagtgactggagccaagagcctgtcactctcggctcattccgtgcagtgtatggtagcatcttctgacacgcaaggcctgaggtcgcggtgcctgcactactatccaatcagggctctggggtgggaactgtccaatcaggcgcgcagccagggaggaaggggcggcttccggaatctggcgcggcctttgtctcacttcagccagagcgcggggttagggcttcattgccttgtgtcctctgctccgggagacttcggtgattctgccactcactccgtcgctctgtgacctgctggcattgaatgatttatagctaagactccaggacacccctgaagccgagaaatggtgagtgtggggggcagggcgtaccgagactggggagggggctc

SEQ ID NO: 19603 - DNA, 2300 bp, Homo sapien
cagcccctgatacggtccccaaccaaccctgccccctgccaccagcagtgtagcccccccccccccatagcgcacccaacacacccaaactgccccctctccccgcaccgtgggcattgcagcaccccatagcgccctcaacccgaaacccccccacccgcacccccgagcagtgcagccctggatagcacccttaacccacctcactgctgccggcaatacagtctgggatagtgcccccaactagcaggcctagcggttttctctcatccaatcagaacatgaagtccaggaacctggcttgcataacctcagtatataaaacatgctaagggggaattgcgccattgcaggctgttgtgcctcagcgttcccaacccctccgttcgcaccttaaagaaggcgaaagcggagtcccccgccacacgctggacgctggaggctggatcctgtggcaccagggcttggctctgcatagtgtgtggcggcgatggagacaggcggctggcagcgagagctgcttcttgcctggatacaggaagggaaagaggaggcacctaccacaggctggaggctagagtctgtgggactgcggctggcctcgctggctcgcctcgctgcggtgggtggcagcagcggacactgcagccggccagagcgtagaaaggcgattgggtaggtgcgctatccggggctatactgcccgaggccgggggccggtaggggtgttattccgggcgtcactactttaggtgtgctatgccgggctgcgctgcccgcagcagcggtgggggcgggttgggggcactatcctgggctgtattgccagcagcagtagggctggttgggggccctattgtgtgctacactgcccgccacaggggacgggttagggccgctactgtggttacactgccggcggcgccggggtggggggattggtcggggtgctgactggggtggggggtggtttgggggctgcaccgcccgcggcgggggacttgttgggggcgctatctggggctgcaatgccccccgcaggggataggttaggggcctccggtggtacactgcaggtggggggggcgggaaagggggagtacagggaggtgattggacggggtggtttcgggcgctatcgcgggccggactgctcatgatagaggggggcgttgggtgctctattgggggctacactgccagcggcaaggggcagtttgggggcgataccccaccggtggcaggtggggaggtgtggtgggttgtggacatcattagggggctgtactgtggtcagtgggagcgagttaggggagctatcagctgctgcactgcctgtggcgggggtcaggtttggtgcgctatcgggaccatattctcggtagtggcatacgggttaggggagctgtcgggggctaagctgtccacgggggactgcgggttgggtgcgctatccagggcatcataccccgcggctgggggatggttgggggtgctatccgctatctgggacggcactgcccatcgtggggagcgggttgggggccttaaggatccttggctgcactattcacacggcggggatcaggttgcagtgctttctggggcgtcactgcccgcggcgggggggttggttgggggtccaatccgtggctgcatggcccacggcagggggcaggttgggggagttatctggtgctgcaacgtctgaggcggggacgggttgggggcgctattgggtttctacactgcagctgtgaggggagggtgttaggggcgctatcccgggtccaacagctggcggcgggttaggggcgctatcagggggtgccctgcaggtggcggcagaggtttcagcaacaccagtggcctacaaagaaggagccttcctcctctccccagactccagactctagagggcgacctcctcctgctcctgctcctggagcgcagcgagcgcacagcgtttccgcaggaatcctgagaatggcaaggcccccatacccgcggtggttcccaggcccgccccctctcgcagctgcagccccacctgccagcgcgtgccacctccgagcgacttccgggacccgggcggccaccgcggtgcaggcgcgcgcccaacggctttgcgaggctcactcggtctgagaggtcggaggctgcgagtgtcgctgctgaaggctgtggtggactgggctggatcgcggattttggattagataatagatttgggatcgcggattgggggttggatcgcggatttggggttggatcggggatttggggttggataggggatt

SEQ ID NO: 19604 - DNA, 2300 bp, Homo sapien
aaggaataatcctcgggaagagaggaatatgaatcttacagtattaaaaataatttctcactttctattttttatcattattgtgtgtattgttatcttctttgaacttttagcctcttcagaagtaaaaagggaatgtttttatctgtttccagattttattatctatatattttatatgtacatatgtttttcttatatattcattcaatttatgcaaacaatgatagattatttcattttaattgtattctttaaaaataaaaataacataaataattactattgcaaaaatattgctttataggagttatttaaaaatattgaactccccaactgtatttatccattctttcattccatttattcatcaaacataacctgagtacctgttatgtagcagacatattctactatctctcaggacccttctatccttaaaaacttcatgtttacctgccctgcctgcacaagttgagagatttaaaataggaatattgggacttaatctccttgaaactttgtctcccacctttcaaacaaaagcatttctgaagttagaaaatagtagaagataacctttaactgcccattcaaaagtttatcagtcttaaatactaatattaatcattggaaagtcttatttgcatatattctgtaagtataaatattgaataaaatgagccatatgtattcatttgaatcatgagtttcctttggcttcagtttgtttgaaaatcaaggaattaatttgtttaaaaaatgcattattgttatttcagtgctctatccccatagtacctttaagaactaaaatgtatttacatgccagttgtatgcctagaactgccctagacctgctgagtataccatattctacttaatgtaaggtctcatggattgtgtgatgccccgctattttatatatcaataagataatttttaaaatgctaccaattatagttataataatatgtgtcattccaatgtcagaagtattaaaatgtgacctactctttaagccatcctgcaaagtaggtataattgtatcttttacctaattaaaatgtttttgttaagtagtagtaatagtaacaattataatatctggctgggtgcagtggctcacacctgtaatcccagaattttgggaggctgaggtgagaggattgcttgatgccaggagtttgagaccatcctgggcaacaaagtgagattcttactctacaaaaatttttaaataaatagctgggcatgctggtgcacatctgtagtgccagctactcaggaggctggggatggaagatcgcttgagcctaggagttccaggctgcattgagctatagttacatcattgcactccagcctgggcaaaagagtgagacttagtctcaaaaaataaaaatcttacaattattgagttattgtaggaactattctaaatacatagcttctcatttaagcatcatgatggtgtcctatgagatagctactattgtcctctttcttaatgaggaagttgagacacagaaaggctaagcaatagttggtaagtgacagggtttaaagaaggactcaagccctagttgaactgaatccaaagactgagctgtttctattcaaataggctgctgttttcattaaggcagtgagcaataagagctagtaaatattgtactttcttcaaaaaaattaagtgtttgttttgaaggcagaggaaaaacatgctattcagtttttaattacatgaatgattgtatgttttgagatgttgcactacagtttcctaaaaagtcctgttactctcgtagaactgctctacatttggcctgtgccagtggccatgtgaaagtggtcactctcctggttaacagaaaatgccagattgatatctatgacaaagaaaatagaacgcctttgatacaggtatattagagccaactcttttagcatgacatggatttgatttgcatatatagaattaaaataaattgatctcatttaaatataactagttggtgaaacctgtggaatgtgtattttgaattcttggaatttacattctgtttcttggtctaacacggacaggctgtccattgccaggaagaggcttgtgccgttattctgctggaacatggtgccaatccaaaccttaaggatatctacggcaacactgctctccattatgctgtgtatagtgagagcacctcactggcagaaaaactgcttttccatggtgaaaatattgaagcactggacaaggtatagatcaatcaactttctttccaaaatatttgttt

SEQ ID NO: 19605 - DNA, 2300 bp, Homo sapien
agggctgtgggggcatcaggtggactgggctccaggaacaccctcagtgcactgggcaggtcttggcccagggtccctggaccctggctgggtgatgtggtcatttgctgggggactattgtcaggcactggccacccaacctgggtagcactgtccatctcaggactgcacttcctcagatcctgcagagggcacagcctccagcccaggaggggcagccccatggtgcagcctgagctctccatgggtctggagcatcccctgccagccctgcactcccttttctcccaggtcccgcttttccagggacagccagtggggaggccccatcctcccttccctatgtgtctcctgggctgaaacttgcagtgcaccgggacagggataaggcttccctaaggcctatttagggaagggactggcttccagcctggcacaggtcctcagctctgccacggttgccttagactgagatggatcagtcagtgccctgaaggtaaaggtagcagactgtccctgctgttgggaggctggtctagggatggaggacttaagaggtcttcccagtctgtcaggcctgggcagtgctgtcctgtctgaggactcagaaaatccagtcctgggatgggacagtgctgcccagggtgggtggccagggtctgacagtagtcccccagggagtgaccacatcacccagccggggtccaggaagcctggcctgagacctgcccattacactgagggtgcacctggaacccactccacctgatgcccccacagccctcacagggcctgacctcccagcatgcacctgcctctccctgcaaccaagctgtccacgttgcctgttccctcacttcctccatcctgtccagcaggatgggatgggcaggaggacagcctgtgtgcacatttcatggcaggtaggagtgacacaccatccctgggaggcgacttggttcctcccaaacccggccccagaactctgtccctggggtggttttaccaaacccgaaacccagaaatgtggttgtggctcaggggtcagcacccactagtgcccggacactactgggaggctgggacctgaccaaagcccgtggtgtctgtggcctgaggacagggtgtcttggggccataaggacaggccacaagttgccattgggtcataggggctcagccccagtgtttgtccttccctggctccttcccatcagtgccttggagcccaagaccaagcatccaaggttccctccaggaatcctggtggctcagcttactttgtcatgtttcatctgagagcaaaaatgtcagatcggatgcacagaaaaatggctcaacatgcttaatgactagaagaaatctaggagcagcaagaaggtaatgtggagaggggaggacctccatgggacctccatgaccggtgtctgcagagccaggggtacaggcacccagtgctgtggtctggcaccacctctcagagggtgggtagcacactgtccttacctcggggacagcaggtctggtcaccagcttttgtacctgtctctgcaagcattgcattgctggaagagaatctcatgccagagcttggaccatgccttgctcaggggttaggggttgtctcttggtgacctaatgaaaaaatagctccagatcatagttcccacagagcccaaggctggaaacctccagaatcctccggcccccgatcctccccagggacccctgtggcctatctcaccagagcattcttccatctgtagatttcttggctgctccacaagggagtcccacttcaggtgtggtgctgggcatgatcactcctgctggatgtttagaaggtggaaaccaaggacctagggaaataccagttacagcctttccaccctcatccagagcaggacaaagaggccaggcggtgtcaggagcccaggtctccagctggagggaacatcaaccctgcagtgggagcaggggcccattgcacatcctaggcagagatggtaacgtaggcaccacaggtaggcagggattggtacccctccctggcgtcagaaagaagccaaacaaggagctttctgcagaatgaaacctcctttcctttcagaagcactgctgacagtttggtggttgccattgggacagtgagccttttgttctttctgaggttgggctggtttctcctcttggccctgccctacagaccgtaaaggaaatcagcaagaagtccccagcaaacatccacagatggccctggacatcagccacattctgagaaacatgtcacgttctggga

SEQ ID NO: 19606 - DNA, 2300 bp, Homo sapien
ggggcctgtgcatgccaggcaaggccaagctggctcaaagagcaagcagccacctctgcaagcatgctcctgatgcagctggaccagcctttaacttcagccactcagagaagcatggatggccatgttccaacagcctgaatggctgccacctgatggctgatggagcagagtcctgaggaaaagcagatggcactgctttgtaatgcccttctttgtctcttttgatcttttccatttaaagtttgttttatcagagactaggattgcaacccctgcttttttttttttttttttttttgcttttcatttgcttggtaaatattcctccgtccctttattttgagcctgtgtgtgtctttgcatgtgagatgggtctcctgaatacagcacaccaatgggtcttgagtctttttccaacgtgccagtctgtgtctttttactggggcatttagcccagttacatttaaggttaatattgttacatgtgaaatttatcctgtcatgatgttgttagctgtttatttttcccattagttaatgcagtttctttatagtgtcgatggtcattacaatttggtatgtttttgcagtggctcatactgtttgtccctttccatgtttagtgcttccttcaggagctcttgtaaggcaagaatgtggatttatttcttgtaaggcaaatatgtggatttatatctgggtgctgtattctatggcctctacccgaagagtcattacttttaaaaatgcaattcaaattagcataaaacatttacagcctagggaaaggcttatggcattagaatccttatttataggattattttgtgtttttttgagatatggtctctgtctgtcatccaggcagaagtggagtggcttggtcataattcactgcagccctgaactctgagtccaagccatccttgtgccttagtctcccaactagttggatctacaagcataagtcaccatgcctggctaatttaaaaaaaaaattttttttgtcgagattatgttatcactatgttgctctggctggtttcaaattcctggcctcaagtaatctttctgccacagcctcctatagtgctgggattacaggcatgagccaccatgcctagcatagagtattacattattttcaaagtcttattctaagagccatttattgactttggcctaaataactcaatattatatctctgaaactttttttgacaaattttggggcatgatgatgagagaaaagggtttgaaactttctaataagagttaacgtagagccatttaaggaggaacagacacaaattatcagaaaaataaaagaaagatcaagtgcaaaagttctgtggcgaagatgatgatagtaaagaatatatgtgacttatggtggcttttactttgttcttgaatttctgagtaatttaagggttaacatttaaagaatctacattatagataacattttattgcaagtaaatgtatttcaaaatttgttattggttttgtatgagattattctcagcctacttcattttcaagctatattattttattaatgtagtttgatgatcttacagcagagctggaagctgtatcttcaaaatatgtctgtttgactcaaaacaatcaaggtattcaacaggagttattatgtatgaaaaaatacaacaggaatgtaaaaaacttgaggctaaaaagatgttggaagaagtaatattaaatcttaaaaaacgtatggaaagtacacattggtgaagacacattggtgaagtacaaaaatataaattggatctagaagaaagggcaatgcaggcaatggaaaaattagtacaaatccctttacaggttagtttgcaaaatcaggtaagtttatttataatgtgctttcatttatttcactgcaaattatattttggagattgtatatatatatatatatatatatatatatcatgtttcctctgcctctcttatagtaatttgccttgtggagttctggcaaagaggtggcatctgtttttacttttatatgtttaaatttccatcattataacaaaatcgatttttcacagtaatgattctcagtgtggagtcatttgattattaagacccattgacatgagattacatcctctgcctataaaaatcctggaagaaaacctaggaaatattcatctggacattgcacttggcaatgaatttatgggtaagtcctcaaaagcaattgccagaaaaatgaaaattgacaagtatgatttaattaaactaaagagcttcttctacacagcatg

SEQ ID NO: 19607 - DNA, 2300 bp, Homo sapien
ataaaaattcaagctatcacatcaagaaagtagaaaatagtagcaaaataaaatcaaaacaaatataagaaagaatataatagggataagagcagaaataaatgaaacagccaaaagaaaacaacaaagaaaagcaaagaaataaagctggttctttgaaaatatctataaaattgacaaaccttaactaataatgataaagaaaaaagggatgtcataaattaccaatttcatgaatgaaatgggctatccttacagaccttgaagacatgaaaatgataataaaggaacgtcatgaacaactccattcacatacatttgacaacttggggaaaatgggccaatttcatgaaaagcagaaaccaccacaaaactcacccaatctaaaataggtaatttaatagccctaaaatgtaaggacatttaatttctaattttaaagactcctgaaggagaaatctccaggacaaaatggttttactaaagaattttatgtactgcttaaagaattgacaccaatacacacaatcttttctgaaaatagagaatctttcccaattcattttatgaagctaacattactctgatatcaaaatagtacaaaaaagtaaactatagcccggtaattctcttgaacatggatacaccaattcttaacaacattagcagcagaactcagcgatgtacacaaagaattacacatcatgtcccagtgacgtttactccagtgactgcacacctagacattcatcccactgaaataaaaactttttttttgcacttgtaattggcttcccctctgcttttgttggcaagagcaggtcggtgtcccaggcttagaatccatttttctctctttctctccgtctctctctctctctctctttttttgacagagccttgctttgtcgcccaggttgcagtgatgcgatctcggctcactgcaagctcggcctcccgggttcacgccattctcctgcctcccgagtagctgggactacaggcgcccaccaccatgcccgctagtattttgtatttttagtagagatgaggtttcaccgtgttagccaggatggtctttatctcctgaccttatgatccgcccgcctcagcctcccaaagtgctgggattacaggcgtgagccacagtgcccggccagaatgcatttttcctcccacaccaaagcacctgcagtatgggtgaagcagcctggagcctggctacataagcctgcacagcaggagggtcccagcaggagggtcgaggtgccactgcctgggtccagctcacaggctgccagggaggctccgatctggctccctggtgctggcagtgtcctgttcccaggatctgcacgtgggggtgccttcctgcatctccccatcagtggtaggtgctcctcccagctccctcttgcaggcctggagacagcggcctgcacctcaaccctactgcatgccagtgaagcgaagcaccccgggccagaagccccacagctgttggccctggtttggacaccaggcagggggcaccacagcaggagctagcagcccagccccgattctgtggccccgagtgccccgttgctgatgaccctgtgttctgggtgcggaccaaggaggagcaggtgtggaaggcgcctcaggcaggccctgggctccgtgggcgtcttgtgctcggagattttgaggccatttgcatccagctccgccaaccagagctctaagctgcagcggcggccacccgcaacagcaccaccactagtgtcttgggggctttcttcagaggaggctgtcagcatcttcgagttccaggcgctctagccccagtcctgcttcaagaggctttttcccaccacaggcttctcctcagtggcccgaaagctgggccaactcccatgaactttgccagtaacgcaaggctgtcactgacatttgtggcgccaagacttgcgcacccggattgcacacatcggccacttcctgcaccacgtgcaatgacgcgcgcacgcctcacgcgcacgccgcgtaacgtctgaggcgcgcacgcctcacgcgcgccccgcacgcgcgccccgcacgcgcataacggcttggcttacctgtaacgggtacgcttcgctttgcgttcctcgcttggccttgcgttcctagcttggcttggcgttagtcgctttgcctggtgtttcttgcttggattggcgtttcctccctcgcattcctttgctgggcttgactttttctctgctgggtttggcattcccttgactgggctgggtgtttccttgggagggggggct

SEQ ID NO: 19608 - DNA, 2300 bp, Homo sapien
tggtgaggttgaggcgggtggatcacaaggtcaggaagtcgagaccatcctggctaacacggtgaaattccgtctctactaaaaatacaaaaaattagctgggcgtggtggcaggcacatgtagtcccagctactcgggaggctgaggcaggagaatgaatggcgtgaacccaggaagtgcagcttgcagtgagccaagatcaagccactgcactccagcctgggcgacagagcgagactccgtcaattcactagggataaaagtcagaagaacagaaattgtgagttcctttgtgaagatccaaggaccttcaaggacctctgaatagccaagaataatcattcctgtttttcatcttcaatggataaaagagcccattatacctttctagcctattctggaataagtaacaatgaaattttatttagtgtaaactaacaaagaaaacagagtaagttaatgaaatgtagtctctacaacttgttagactgtttattttttatttgttttttatttttagttggactttgtttttgagacggaatctcgctctgtcacccagtctggagggcaagggcttgatctcggctcactgcaacctctgcttctcaggttctagtgatgctccctgcctcagtctccctagtagctgggattacaggcgcacaccaccacgcccagctatttttagtaaagacagggtttcgccatgttggccaggctggtctccaactcctgacctcaggtgatctgcccgcttcaacctcccaaagtgctgggattacaggcttgagtcacggcaccaggcaacatgctaatttttgtatgtgtggtagagacggggtttcactccatgttggccaggcaggtctccacctcgatctcaggtgatccaccggactcggcctcccaaaatactgggattacaggccagagtcaccgcgaccggcctgcgtccatgttacttaaagtacaaagtaacctacaaagtaacccgccaggcgcggtggctcacgcctgaaatcccagcattttcagaggccgaggcaggcgaatcacctgaggtcgggagttgccgagaccagcctgaccaacatggagaaaccccgtctctactaaaaaaaaaaaaaaaaaaaaaaaaaaaaaaaattagccagcatggtggcacatacctgtaatcccggctactcaagaggctgaggcaggagaatcgcttgaacctgggaggcggaggttgttgcagtgagccgagatcgcaccattgcactgtagcctgggcgtcaagagccaaactccgtctcaagaaaaaaagattacatcctggcacggtggttcatgcctgtagtggcagcagcggtggcaaccccagaacctgtccgtgccaccagcagcggggaaccccagggtcggacgccgccactgcgcctaaatcaggcggtgggacctcagctgtgtgagggcgggaacctgccgcaaagcctcatcctggcaactatacatggcccagaggtcgcgagcctgcgctgccagcgcgggccaaggaagagcagagcccagggtggaagggcggtgcactcggcgaccctcagcggtctgggcccagccctgcagcctccaccgtggactcaggtgcagctcccacctgaacatggcacgcggcagcgggggctccaacccggaccctgtccgtgccagcagcagggcggatacttgggccagaagcttccagggcgcctaagtgagggggtcggtccccagctgcaggagggcgggaatcgacgctcagcgcggccctggaggctgcacggtgcccagtaccagggtccagctcctggatcgcgggtcgaggaggggccaggggcggctatgtcaagcaggccgtgttgcagggagccccacacgttccgctccagggaggcccgccagcccggcagcgcctcagcggccggtgccacctgcacgcggtgcccggtggagcgcggccagggcgcgtgtctcctcagcctgctgagctgcgcgtgagctgctgctgtaacgctctaacgttagagcagctaacggctctgctcagaatttctcccgacagaggccggagtgttcaagagcttggcgatacagaaatttctgctggtgttggggcgggtgcgggaactgaagacgggcgagtgcgagccgggggcgggtgctggggaagggtaagcgggaagcgagggcgaggggtaggggctggggaagggcgagcgggaggcgcgggctctctctagcagggggctgcagccatgaagaggctcttagctgc

SEQ ID NO: 19609 - DNA, 2300 bp, Homo sapien
acacacacacacgctctacccttggggtgatgcactatgctttttttattattatttattgatcattcttgggtgtttcttggagagggggatgtggcagggtcataggataatagtggagagaaggtcagcagataaacacgtgaacaaaggtctctggttttcctaggcagaggtccctgcagccttccatagtgtttgtgtccctgggtacttgagattagggagtggtgatgactcttaatgagcatgctgccttcaagcatctgtttaacaaagcccatcttgcaccgcccttaatccatttaaccctgagttgacacagcacatgtttcagagagcacggggttgggggtaaggttatagattaacagcatcccaaggcagaagaatttctcttagtacagaagaaaatggagtctcctatgtctacttctttctacacagacacagtaacaatctgatctctcttccttttccccacatttccctcttttctttttgacaaaactgccatcatcatcatggtccgttcccgatggtggctgtctcttcgaagctgttgggtacacctgcagaaaggctgtcacttcacacttggaagattgcacaacggccaggcagaggtgctccttacttcccagatggggcggctgggcagaggcgctcctcacttcccagatggggcaaccaggcaagaggtgctcctcatttcccagatggggcggctgggaagaggcactcctcacctaccagatgaagggcagccaggcagaggcactcctcacatcccagacgatgggcggccgggcagaggcactcctcacctcccagacggggcggctgggcagaggtgctcctcacctaccaaggggggcagccaggcagaggggctcctcacctcccagacaatgggcagccaggcagaggtgctcctcatttcccagacggggtggccaggcagaggcactcctcacctcccagacgtcgcggccaggcagaggtgctccccacttcccagacggggcggctgggcagaggcgctcctcacctcccagatgaggcggcctggcagaggcgctcctcacctcccagatgatgggcagctgggcaaaggcgctcctcacctcccagactgggcggccaggcagaggtgctcctcgcctcccacatggggtggccgggcagaggcgctcctcacctcctagatggggtggccgggcagaggcgctcctcacctcccagacggggagaccaggaagaggtgctcctcacttcccagatgggacggccaggcagaggcgctcctcacttcccagatggtgtgtcatccgtgaagaggcgcttctcacctcccagatgattggcagccagagaaaggtgctcctcacttcccagatggggcggccgagaaatgccactccccattcccagatggggtggaggtcaggcagaggcgctcctcacctcccagatggggcagccgggcagaggcgctcctcacctcccagatggggaggctgggcagaggcgctcttcacttcccagagggggtggccgggcagaggcgctcctcaactgccagaccgggcggccggccagaggaactcctcacctcccagacaatgggcggctggggagaggtgctcctcacctcccagatgatgggcagccaggcagaggcgctcctcacttcccagatggggcggccgggcagaggcgctcttcacttcccagatggcgcggccaggcagaggcgctcctcagttcccagattgtgtgtcgtccattcagaggcactcctcacctaccagatgatgggcagctggagggaggcactcctcacctcccagatggggcgactgggaagaggcgctccccacttcccagacagggtgggagctgggcagaggcgctcctcacaacccagacagggtggccgggcagaggcactcctcacctcccagacaatgggcagccaggcagaggcactcctcacttcccagatggggcggctgggcagaggtgctcctcacttcccagatggggcagctgggcagaggcgctcctcacttcccagatggggcaaccaggcaagaggtgctcctcatttcccagatggggcggctgggaagaggcactcctcacctaccagacgaagggcagccaggcagaggcactcctcacatcccaaacgatgggtggccgggcagaggcactcctcacctcccaaacggggcggctgggcagaggtgctcctcacctcccagggggggcagccaggcagaggggctcctcac

SEQ ID NO: 19610 - DNA, 2300 bp, Homo sapien
gggtgtgggcggagggaacagctgaccacagcaatgacgaagagatgacaagaagctacctgggccactggttccttggctccctggtcctggaggaggctgggctagacttgggaggaggggaggaggtgtctcctgcagccaccaggaccatggccgccctccctcacttgccgtgggcctccctccctctgctcttccctcgctcgccacctgggggtactgggtcacttacttccacactcattcttcaatgtccacgagcaaacctggaaatgagggtggctatactcaggacaggatcagggtccatgatgttgggtgtttacagcgcctcccaaaaacgtcgtgatacaggaccaggaacctccagcgagggcccttcccagtcacacggcagcagtgcatgtgcacgtggggcccaggatgcttcagatctgaaggaacacctgggaagggccccatcagcggcagggggccggggggggggttcgtccaggatttcgtgcatgtgtcactgcagttatgtcattaaagatttgttttgcttgggcattttcatggagtgtattgtttttatctgagttacaaacacattcgggtagatacacacatgcccagcctgtgatatttttgacaagaagtaagacctattaaaaagcatatttttactgattcaatcccttaggccaagagcagagacatggagttatgcagaggtgggggtgacagggcaggagggtgtttcaggggaagcgtgaagcagtctcctcccttttttctgggccacctcctgggtgagctggagtagctggccaggctcggattgctcctccaggcagcggaaggggcccctgcccaaaaggtgggagatgccagatggcctggggcacagcaggcttggctaagtcggcccccagagcacagaaaggctctctgagagctcggatcccacctgctttttcagagtgagtatttcctttctagaggccaggaacggagatgcatcagcctcagctgagtaagcagggttcgaataggacaccactggggccattgggcttcttccatggcactgacttcttaggcagctccccaccttctcaggagaaaccatctcccctcaatgtcagggtaagcagtgcccgtcttttcagggggaggcaagtattcttcatgtacagaggaatagatttgagcatgctgggaaaaccagggtcacacagcacggaaatccctctgtcgaaggaggagaacaggaggcccaggtgggactgaggggccactcacacccaggaaccacctccagctcccagcctggggtgcctgatggtgccacctttggttagaggctgctgtggtcacgaatgtcccttctccaagggttttgggtctgaggacccagtgagcctctcccctctgcagtgtactcacaggaagctgaattccctggggttctggggtcaggaacacccacctagagccacagaagacccaggttgagccactcctgaacatccctggttttgtttttaccaaaacccaggaagaggcttcgatttcaagcatgaagttagggacaggaagaaaactaatatccttggctacctactccacagcagccttctgaaacttctttaaccctctaccaatggcagcacccattttgcagaggtggaaactaagatttagaccagggctgtccaatagcactcgctgtggagctgggtcaacacagcggccaccagccacagggcactattgagcagtgtggcaagtgcaccagcgaagtgggattttaaattgtatttccttttatttgaattaagggtaaatgcaaatagcttcctgtggctagtgactgctacattggacagtgcagatctagggaataaatgactgtccaggatcacacagctactaaggagccggactggagtcaagccctacctctttaactttcctgaggctccgctccttgccccaccatgtgactgccatgtgagcagtgaccacagaaagtgagggagcaagtgatcagggagggcccttcccattggagctgtttcctcctgagtcagcccgaggattcgggctcgcacttcaggccactcctgcaccccgggactttcactctgagaaatcctttaccgtggaagcaggtaacatttttgtgagacacttttgtgatgtttgtgattgaagtctgtgtgaagttctagcctgggtggagggagggtgcccagggccagggatgggagagaggctgtaaaagatgaagcaatcattgaaaatctgag

SEQ ID NO: 19611 - DNA, 2300 bp, Homo sapien
cattgtggaacatctatagaatgaaatgatctgaacccagaaaaataaagagagtagacgtttgtgcaccgatgtggtgtttatcccaagattagggctgggttaggatgttagagatcccagaagctaaaaagattaaggtacccttttaaattatatataatttaaaaaaacataggtacttcattaatttttaaaaatgggtttaaaagtacatttaaaatatttttattaaagtagattatctctgaaaagatatgcaataaatggatatattggaattctaaggctgctgtaacaaattactacacatgtggtggtttcaaataagaaaaatttattctcttgccattctggaagcaggacttctgaaatctagggtccgcaggttgtactcttgccatggctctagaggagaaaccttcctttccttttccagcttctgttggctcctggcactccttagcttgtgtcagcacaactgcaatctgtgcttccatcattatgtggctttcttccctaggactctcagtgtcttaaatcgctctctttcttaaacctttctcttaaaataccagtcattggatgcagggccctccctaaacccagcataatctcatcatgagatccttaggttaattacatctataaagtctgatttccaaataaggaaacattcacaggtaccaggggttaggattgaacacatgtatttgggggacacattcaacccactatcatggataacagtggtttccactgggaaggtggcagttcgggagtggaagaaagatgaatttttcactgtgtattcttttgaacaactcatgttttaaaagacattttccttatttgcaaactacgcacccaacaaaggtctaatattcagaatgtataagaaacttaaataatactataagcaaaaaacaaccccattaaaaagtgggcaaaacacatgaacagacccttctcaaaagaaagaaatacaagtggccaagaaacatatgaaaaaatactcaacatcactaaccagagaaatgcaaataaaaagcacaatgagataccatctcacaccagtcagcaaagctattactaaaaagtcaaaaagcaacagatgcaggcaaggctgcagagaaaagggaacacttatgcactgttgatgggaatgtaaattagttcagccactctgcaaagcaatctggagatttctcaaaggacttagaacagatttacaacttcacccagctatcccattactgggatttgtccatcaaaaagacacatgcattcatatatttattgcagcactattcacaatagcaaagctgtggaatcaacctaggtgcccatcattggtaaactggataaagaaaatatggtacatatacaccatggactactacacagccataaatatggaaatcatgccctttccatggatacagctggaggccattatcctaagtgaattaatgcaggatcagaaaatcaaataccacatgttttcaggtataaatgggagctaaacactggctacacgtggatataaagaagggaccaatagacactgggaactacttgatgggggaggaagagaaggaggcaggggtggaaaaactgcctattgggtactatgctcagtaccttggtgacaggatcaatcataccccaaacctcagcgtcacacaatataccaaggtaacaaaccagcacatgtgtcccctaaatctaaaataaaagttcaaattattaaaacaatttaaaataatacatacatttttttcctgtaaaaatgtttttaatcaaacacaaacctgtctcagcctcccaagcagctgggattacaggggcgcaccaccactcccggctaatatttgtatttttagtagagatggggtttcgccatagcgggtctcgaactcctgacctcaggtgatctgcccgcctcagcctcccgaaatgctgggattactggtgtgagccaccatgcctggccttattttaccttttatattatatttttactgtaccttttctatgtttagatacacaagtaaagcaaaaagccgcggcggcggggagcaaaaagccgcaaaaggcgcggcggcggcggcggcggcggcggcggcggcggcaaaaagccgcggcggcgggggcaaaaagccagggctgggaaaatttgatatccatacgtcaaagaatgacactagacctctaactttcaccatgtatgaaaatcaactcaaaatatgtgaaatatttaaatgtaaaacctgaaactattaaactacaagaaaact

SEQ ID NO: 19612 - DNA, 2300 bp, Homo sapien
actgctttctatctacaaagtttgtgaggataaagagcagtgatatttatactgctgtttaaagtttaagttgcagataccttttcaaatagacaatttggtggtaagtaccatattattaagaagaatccatataatgacttttataaatacatttcagtgaatttacagcatgggataatatgtgaccactaaaggtagaaatatgtagagaagtaggtgacatttgaaaatgtattttggtgtatcaagtgagggtaaagttcactttgattatacatacacacagactacagtcttgcgttatctgaagttgtgtatgaaatatgataacatttgttatttgagggcatttgttttaatataaaatgtttttcctttttattatctttgatttccacattgagcatgtacaatgctattagaaaaagtttattattaatgaaataatttttgggaagagcagggatataattttgcaccaataaaaataatttctcactttccatattttaattattattttttgtggattagtatattctgtgaacttttaacatcttcaaaagacagtctttttacctgtgcttgttgatttacatatacatcttattaggcacatatttttattatatatagatttcttacatatatgtcaataattatagattaattagtgtagttttattattaagaaaataaaatagaaaatataagtgctttatttatagcagtttttttaaggtattgaacttttcaactgtatttatccttttaatcaatttatcacatgtaagctgaatgcctattatgtagaagatacattaactctcaagatcctttcatccttaaaaatttcgcatttacctgctcagccttagcaaagtgagagatttaaagttggagtactaggaatgaatctcaattgaagcttttcctctcatctttaaaacaaaaacacttctgaagtaagaaactagtaaaagataactaccaaccacgattttggaaatttataacagctttaaatagtaatattaatcattggaaatacctaatttacatgcattctataaatttaaatatgaatttacatacattctgtaaatctaaacatggaataaaatgagccatacctacttgaatcccaagttttctttggcttgaagttttaaaaatattaaagaagtactttgttttaacagtttgtttttatttcaactctccttttgtatagcactcttaaaagctaaaatttctttaagtgttaatcctatgactacaactgccatcatcctgttgtatataccatattccacttcatggaaggcacggtgaatggtgtgatgcctccttatttatgtaccaataaaagatcgtttaaatttctgcaaaatatacttgtaacaaagaatgacttataagtggcatttcaatgtcagagatgttaaaatatgagaaatagagtatcttagaattattaaaatagttttatctctaacctttaaaacataccacaaagtaggcataattgtaccatttaacttaaaatgttttctttgttaagtagtagaaataattacaatatctatcaattactgagctgttacatgtgctaggaattcttcgaaatacattgcacagattctcatgaggcatcacagtgatgtcctgtgagataactgctgtattcatcttcactttattgatgagaaaattgaggcacagaaaggttaagtgatagctagaaggtgaaagactttaaagtaatattcaagcccaagttgaactgaatccaaaggccaagctctttctattcaaataggccactctttcattaatgtagtgagtaataacagtgaatgaatgttgtagtttcttcaggagaatattaaatatttgttttgaaggcagagaaagagcatggtatttaatgttgacaattacataaatcattctatgttttgagacagtggactaaactttccttaaaaggcttctcactctcgtaggactgctctacactgggcctgtgccaatggccatgcagaagtagtaacacttctggcagatagaaagtaccagcttgacgtccttgatggtgaaaacaggacaactctgatgaaggtaaatggtagccagttctttcagcaggagatggatgtggtttaaatacgtagaataaaaatgaatttatctcattgaaatataactagtttgtgaaacctgtggaatatttatttatatttcctataatttataatttacttcttgctttaatactgacaggctctgcaatg

SEQ ID NO: 19613 - DNA, 2300 bp, Homo sapien
aaaaatggagcagaagatgagaagtcctcagaattaatacaggctcagttttaaaattatttacctgtcagtaaggaaggcacaaataaggttttttgcttcttttgatatgtcattatcatcaggaaaggtaagtgaatttttatggttcataattttactgtaagttccaaccaaagaatctgcataaaaaggtgtatcacctgaaaaattgataaagaaaacaaaagcaaaatgaaatacatttttaaaaagtcagtttcaaaggaagagtcaaagttacccgtttaaaaagattattaggtatgtattaaactaaaaacatacacctaatatataaaagaacacatcacaaagttgctctaagcctctaaatgcttttaaaaacacatacgaagcaggtttggatcatgtttattacccacaaataaaatcaagattgcttaatataataaatatattagaaagagccaagtggcaagttttgagatgaacaactgtaatagagagacataaaatcttccttactcacctacaagcatttcgtataaaaataccccaaccgaccaccagtcacattctcttccataataaccatcaccaccttgggattttaatacttcaggggaaatataatcaggtgttccaaccgctgtatcacatcgtaccatgccttcctaaaaagcgcggcaggtcaaattttgaattaggatataaagtctcaattatttaaaatgactttcttattaatattacctatgggactccaaatctttgagctataaaatatcatatattaaaactgaatggaaacctgacaaaaattaacacagcttaatcatatatatacatactatatacacaccatatacatatataccatataatgtatgtatgtgtatacatgtgaatgcatatacacacacattatatgtgtattcacatatatacacacaccagtgattattttgtaataatgctcactagaaaaacatactgccacatttattattccccaagttgtgccaatatcatgaaaccatttaactgctgagaacaagtacacaggccagtgcaaatacactggggagttcataggatagggcattttacaacatattggtataaacactgacttcattattttctactaaaatagctatttaactatgtttgaaactacaaaagaaacatacaaaagctgactgtacaaatacaaactggggaagcatatgtatgggaaaagggcataatagtgtaaagcacactgaatgtctatttgatgtgaattttaactgccctcccccaacaaacctgagagacttgttagctgttacctatattcgctggtattaatgaaacagcattataactaaatgttcatacagaagttctcatgcagtgtttccttcactgtgtatatgaagtgaaggaataacatatacacagctccttcagctccttcagctgtgtatatgttatttattatataaataacatatttatttatgttatttattatatgtatatacatatacataatgtatatgtatatacatatacataatatgtatatacatatacagctgtgtatatgttatttattatataaacagtgaggataggtatcttttaagactcactcctaaaataagcagtaaaatcttttatatgttaactgaagtaaaacactaaaaaatacacacattactggaatccaatttttatgaaagtctaattttaacactggcataagtatttagtgacatttaagctaattccattcctagttaccagtagtgtatattagagttgttatgaaggatttagtaaatctggcaatccatatttaccctaaatagagaggaaaaaataaatcactaacaagttactaatacaacattgaaaccatggtatctagttcaacaaataaggtcatattaattctggacaagtccagctatggttagtaaattcttacaccattttctaaagaattcttaaaccattttctaaagaagcatctaccttgaattagcaaaaactaaattaaaatctagttaattaaccttattcatcttcatacaagtaccaaaatctgctaacttcaaatgtccagatttatccagcagcatgttatcaggcttcacatctctgcaggagggaaaaaatagtacagtattttctgaaacagattagacactgtaaaaattatatgaggcagttattttaggtcaagcatcctcaatctaggtaaggccatctttgatctgtatgtgttctctatccacatctataaa

SEQ ID NO: 19614 - DNA, 2300 bp, Homo sapien
tttatatctaaatatttcttgtatttaataaattgaaaatagaaatagacattttttcaaacagtgtaagattttcctaacctctgactcacatcgtaaggctggtggactgttcagatgctgtacgatgctttttactccgatgctttttggttcatctgtagcattttccatcatggggtaaaagatccacattttctatttctagtgatccttaatttggcttctgagcaaaaataaagtttgatgaggaataaattaaggtagatttcctgctgaaaccagtgaagaacataactttatcagcgggggtgagtgacaagtctttcacctttcctcacaccacagtcaacgaagtaacggaactaggagaaatgcccattattctcatgtcctacattagttctgataaaaatcacaattaagtttcactgaatgttttgacattgaaacggcagcattacacgtccaggagagaactacagtaggggtgttatgagaactaacacgaacgacttaaaaatattgatttttttctacgagattattttcctttaaaaaaattaaattgagcttgacttctattgactgtatcttccggagtcagtattttatggctcccctgacacacacgcctggcgtgggagggctgagcgctgcagcgcttcggaactttcccagtgaatcgtaaatgggttcaacgccggggctcgcggagggctgtccatggagtaccactgaaaaccaaacgccactggtgctcaatgctggtacctgccgacgaaaaggcttcttgcctaaaaaagaacctattgccccaccctaacagcaacaaggagaacaagcactctctcctcgtcagaagtctctggactggctgcaacccagaggaaacagagctggggcatctgccgggacagcgatcagaagcagccagagctccgcctccgtccggacctccaaggccgctccagagccctgcatggctcctcagagccggccaaggcgagaaccttgccggcagctgcttacccgcactcggctcctcccagcggtccgccttctccaccgcctgcccgcaaggccccgcccacctcaccgccccgccccaccccaccctgcggaggcgacagagtgcgcgcgcgcgcgcggggtcccggctggttccccttccgagcgtccgcgccccgcatgcgcagtctgccccggcggtctccgtttgtttgaacaggaaggcggacatattagtccctctcagcccccctcgccccaccccccaggcattcgccgccgcgactcgccctttccccggctgggaccgcagcccctcccagaagctcccccatcagcagccgccgggacccaactatcgtcttcctcttcgcccgctctccagcctttcctctgctaagtctccatcgggcatcgacctcgccctgccccaccggacaccgtagcagcagccccagcagcgacgggacaaaatgggagagtgaggctgtcctgcgtggaccagctcgtggccgagactgatcggtgcgtcgggccgggccgagtagagccggggacgcggggctagaccgtctacagcgcctctgagcggagcgggcccggcccgtggcccgagcggcggccgcagctggcacagctcctcacccgccctttgctttcgcctttcctcttctccctcccttgttgcccggagggagtctccaccctgcttctctttctctacccgctcctgcccatctcgggacggggacccctccatggcgacggcggccggggcccgctagactgaagcacctcgccggagcgacgaggctggtggcgacggcgctgtcggctgtcgtgaggggctgccgggtgggatgcgactttgggcgtccgagcggctgtgggtcgctgttgcccccggcccggggtctggagagcggaggtcccctcagtgaggggaagacgggggaaccgggcgcacctggtgaccctgaggttccggctcctccgccccgcggctgcgaacccaccgcggaggaagttggttgaaattgctttccgctgctggtgctggtaagagggcattgtcacagcagcagcaacatgtcgactggggacagttttgagactcgatttgaaaaaatggacaacctgctgcgggatcccaaatcggaagtgaattcggattgtttgctggtgagtagcgctgttctcttttgcttgtctggggttttgcatgtctttccttcctcttgcattagtctggttcgctgcaaaagtctcaggtgtgcataatcgtcttg

SEQ ID NO: 19615 - DNA, 2300 bp, Homo sapien
cgactaaaaatacaaaattagctgggcatggtggagcatgcctgtaatcccagctattcgggaggcaggagaatcacttgaatccagaaggtggaggttgcggtgagccgcgatcgcgacattgcacaccagcctgagcaacaagagtgaaactccatctcaaaacaaaataaaacaaacaaaacaccaaaaattagctgggcgtggtggcgtgtgcctgtaatcccagctactccggaggctgaggcgggagaatcgcttgaacccgggaggcagaggttgcagtgagccgagatcgtgccactgcactccagactggtagacaagagtgaaactccgcctcggagaaaaaaaaaaaagttaatttagagtccatctatcttatggcagaagataactagatttagagtccatctatcttatggcagaagataactagtgatgtgtcacaataatcagaagagccttgtaggtaagtaagctatatatggaccccacctatatttctagtagatatttctagaaatatatggaccccacatatatttctagtagttctgccaggttggttatcacttccacttatatttatcagtgtcactcatgtattgtcttaactacttgtattttttcgtatgtgtctaaatggaaagcaacataatgttcacggttctctgagaaacaacaaaattcctaatacctaaaaatggtaataataataaaaaaaagacaagcagggtttaggaaatttattttagggcaactgcctgatttattttaagccctatgcttaaaaataagtctaattcacatgacttaaaatgctggagccaagaaaagtcgctgcaaaggcatttaatgaaatacctggtttgtctagttgtctttgttatgatttttgtataaaccaagaacgtcctatcttgatatatatagtggattttatatctaaatatttcttgtatttaataaattgaaaatagaaatagacattttttcaaacagtgtaagattttcctaacctctgactcacatcgtaaggctggtggactgttcagatgctgtacgatgctttttactccgatgctttttggttcatctgtagcattttccatcatggggtaaaagatccacattttctatttctagtgatccttaatttggcttctgagcaaaaataaagtttgatgaggaataaattaaggtagatttcctgctgaaaccagtgaagaacataactttatcagcgggggtgagtgacaagtctttcacctttcctcacaccacagtcaacgaagtaacggaactaggagaaatgcccattattctcatgtcctacattagttctgataaaaatcacaattaagtttcactgaatgttttgacattgaaacggcagcattacacgtccaggagagaactacagtaggggtgttatgagaactaacacgaacgacttaaaaatattgatttttttctacgagattattttcctttaaaaaaattaaattgagcttgacttctattgactgtatcttccggagtcagtattttatggctcccctgacacacacgcctggcgtgggagggctgagcgctgcagcgcttcggaactttcccagtgaatcgtaaatgggttcaacgccggggctcgcggagggctgtccatggagtaccactgaaaaccaaacgccactggtgctcaatgctggtacctgccgacgaaaaggcttcttgcctaaaaaagaacctattgccccaccctaacagcaacaaggagaacaagcactctctcctcgtcagaagtctctggactggctgcaacccagaggaaacagagctggggcatctgccgggacagcgatcagaagcagccagagctccgcctccgtccggacctccaaggccgctccagagccctgcatggctcctcagagccggccaaggcgagaaccttgccggcagctgcttacccgcactcggctcctcccagcggtccgccttctccaccgcctgcccgcaaggccccgcccacctcaccgccccgccccaccccaccctgcggaggcgacagagtgcgcgcgcgcgcgcggggtcccggctggttccccttccgagcgtccgcgccccgcatgcgcagtctgccccggcggtctccgtttgtttgaacaggaaggcggacatattagtccctctcagcccccctcgccccaccccccaggcattcgccgccgcgactcgccctttccccggctgggaccgcagcccctcccagaagctcccccatcagcagccgccgg

SEQ ID NO: 19616 - DNA, 2300 bp, Homo sapien
tattagactatggtccttgagtgactgccagatttgctttcacatttctagggtctagtgtacctggcactcaacaaatggtccttgcactaagagagaaaactgcactggtggttttactttaaagcggctccttgttcagtgtccttatctttaaattggaaggtgttttgcttctgcccaacccccacacactctacagaccttgtgatgggttgagtttttcaaaagattctcacctgctttaacttctatgagcttagtttatattcaccaggtgaacttaaaatttcagtttctacagcactgtcttttccacgtgtatggccagttctcatgatgagtttactaagtgactttggattcttttagctattgctaatcatctgcacctttctgttgtagttattttaaagcccgcccgcgcgcgcgcgcgcacacacacacacacacacacacacacacacactcttgagtcagggtctctgtcacccaggctaaaagcgctgggactacagacatgagccaccgcgtggggccaaaaacatacggattttatttactaaacctgtattgtgtgcatgacccagaattgtgggagtacagcaatgactgagaaagccgtgtttcccaccttcgtggcacataacaatgtttctatgggtttttaaaggcccaacaacagggattcaattataaaataaaaatatttcggtacaaaacatgatttaaaaaaagacaactatgtcttccgagtggaggagggaaaggacaatcaaacctcgaacaaatcgtttatcttgctagtcacagcttagctatgccttgttattttccggtgattccaaacttccagtccattccctctgcatggatcaaaagtgacaggaaagaaaaaaatgtatttcggatatggcaaaaaagaaaaatgcaagacaagcaaacaaaagtactgggacatcgtatgagaactagtttaattgacaatgtctttaaatggtacctatcacttgacaatgattccaacccacccgggcctgggcgccgcggctgcctccccactcccacgcacacggggagctcccccgggctgtactgcactaaaggcactcaaaatacatcagcctttccttacctcgattcttccaccacatccagcatggagctgctgcttccagagatgtagtcgcctatctgtggcaacaattagttttaaaaatggagccgcatctctaataacaaaagcctccagctgtgaaaagtggagctaaatctctctaccgggccgcagcatctctcaagaaccttttccccgcagcacccgtcaaggcccagggccagctggacgcggctgccctggggtggagccgtccccgtggtcccgggaggctaccgacgagccggggcccggggccggagggcgtgctcctccgggaggtgcaaaagtcggcttgggcccggagctcccgggtttgtttggttttgtccgcgccctgcccccaccctacccccttcatgcaaaaggccaagggtttccgagccaccactgcccaggccgagttcacgcttggggctcttcagccgccgtccagtgaacagagaaagcaattgcgcagaggcgagagcaggctgaatgaacgcgggctccaggggaaataatttttcctcctggcttcgcgcgtcagcacactggggtgcagccctccctcacagaagaccccccccccgcacgaccccctgtacacccccgcggggctgcgcgttcgtctgtgcggcggggtttgggaatggaggcgtgaggaccgcgcatcgagggctccacaggctgggcggggggcgtcgttggaggggggtaggggagaaatgcgcgcccaccaccctcacagagggcgagggacccccaaaagccactcgcggacgccgaggcagcgggaaggcgcgaggcggggcggggggagggggcgcgggggtccccgctgcggaggccagggcgggcgggaggggcagcacctgaggaatccgcctccggctgcggcggccgccgcctcgctccgccccggggaactgagcgcgcggaccgcgcgcctgccagagagacgccagccgccggcggcgctagcacctcggagtcgggcggccggagcagcggagcgcagcgcggcgcagggaacggcactgggggtggggagaccagcccggccgagccgagggccaccccctggtcctctgccctcgcgccccgctagggccaggtgagcggccgcggggactccggggcgcgggcaggaggtgagaggtcg

SEQ ID NO: 19617 - DNA, 2300 bp, Homo sapien
aattaaacttcatttcctgcacagtattctcaaaattaggcttagaagcaacacattaaaatgttttccaaaatgcctatgactaaaatgagaactgaaacttaaaatcggttatataccagtaggttggcttcttttttcattagtcattaacaatttctataatgccaagcttaataggtcaagaaatatgccatgtgcaaggaccagctccgagggcatacagtggaattaatggtttctcttggtacctcctcttttaaagagatcaggaatacagaaaaacagaagcctgattttttttacaaagattgaggcagaaagaaaaataatttccaacagggaatgattagtagggactctatacttgtgaccactccaagaaaaagaggttattttctagttggagtatgtatgatgggctgagaaggactgcaggaaagcatatgggtgtgtgtgtctctcctccctgtgattctttaaattccagctgtaattctcttctatataggtcctgatcaggtacctctcagggaagaatttgagcaaattatgctgaaagctatgcaagaatttactctgagagaaagagccctgcagataggtgctcagtgtgtccctgtgtcaccaggacaactcccctggcttgctagattaattgccagcgtatctcaagacttggttcatgtggttgtgacccagaactctttggcggagggcatttcagagaccttaaggactctcagtgaaatgagacactatcaaaggctgccagattatgtggtggtaatttgtgcatcgaaaatcagaggaaatgaattttgtgtggtagtgttaggtgagtaatttttttgttttttgtttgtttaatcaattcattcgaccatttttccatttaaaaatgtgtgttatgtgtttcaggcatccacataatcaacctctgattaattgctggagcttgggctcatcctcctaattttaactttccctttccttctcagatcaggttttgtgtagccctcagtttggctggtgcccctgtcagctggttgtgggagcattatttcaaagctctccctagtaacagatacccctgtctcatgtaactgctgtcctttaaagattttggaaatgttactactctagcatgtgataaagccagtgccacaggtggcctaagccagttaatcgaatttgccagaaaattagctcatatattccccttctcactgaacagtctatttaatattgtaacatagtctctaaagaaaagattcagaaagttggtacactacaaaattggggggtgggaggggatttttgtttgtttgttttgcactgtgcagattttctatcaggcaccctcttgggtagccatttggactacattttgcttctctcttctctgtactgaatggctctcacctcttccagcaaagaagctaagaaaaccccctcactttgacaaaacctgtctgcccatttttctgtgctacatgtatttccagaaagcttcatcagtgtgatacattaatattttttcatttttatttgtaaaaaacatgtttatatttttaaagcaaattcattataaccatgcaagcacaatttttataaggtttttcatactcttccctagtctgtttttcccccatgttctcagcccctgggcatctgcccaattggccagccctggggcagccatggtgttgctcacagcccctggcggggacagggaccttccttagtcattaaacacaaacgtgcatattttcagttacataaggtacatcattttgttcccctgatcatctgtattataaacatttctgtttctgtctagagtcagaattgatatttcaaatgctatataattgtccataccttttgatgtgtcataattttcttaacccaagtccctatagtgacatcctttgattgtttccaattgttgccattataagtaatgttccagcaacatttgttctgttgatgagtcttctcttctctcctccatcctgcaggtcagcaccagtcccgagctctggcagagagcatgctcaccacaagtgagtttttgaaagaaattagttatgagcttatcacaggaaaggtcagtttcctggcatcacatttcaaaaccacatcattaggtgagtggttgtaagatttggcaacactggcagcccctagttgtatgattttctgagtttaaatcttagcctgtcaagatgagtgtggagctcaagcttgccagctgatctttcatttgaaatggtttatcctaagtattttgtcac

SEQ ID NO: 19618 - DNA, 2300 bp, Homo sapien
gaccaacaccgagaaagcccatctctactaaaaatacaaaattagctgggcgtggtgattcgttcctataatcccagctgctcgggaggctaaaacaggagaatcccttgaactcggaaggtggaggtttcggtgagctgagatcatgccattgcactccagcctggacaacaagagcgatactccatctcaaaaaaaaaaaaaataataacatggaacttaatgtataaaatgattttgaatatctatattgcagaatacattattattttaaagttacattttaaattacaggaagataaattggaaaacaggagatattttgattgattaaaaatctaacttgaatgagtgaatataaaaaaattaaggcacccaaagtactaggaacatttatgtagttacagtcaacataatcagtaggatttttttttttttaagatagggtctcatgctgtcacccaggctagagtgcaatggtgtgatcacagctcacttgcagcctcaacctcccagcctcaagtgatcctctcacctcagcctgctgaatagctgggactaacagacatgcgtcaccacacacagctaattgttaattttttttttttttttgtaagacggagtcacccaggctggagtgcagtggcacaatcttggctcactgcaacctctgcttcccaggttcaagtgattctcctgcctcagcctccctagtagctgggtttacaggcacgcaccaccgtgcctggctatttgttgtatttttagtagagatggggtttcaccatgttggctaggctggtcttgaactcctgacctcgtgatccagagtgctgggattacaagcgtgagccacctcaggtggccccccagacttttaagacattaaaaaatggaatggattgggtgcggtggctcatgcctgtaatcctagcactttgggaggccgaggcaggtggatcacctgatgtcaggagtttgagaccagcctggccaacatggcaaaacccggtctctattaaaagatataaaaattagctgggcatgttggtgggtgcctgtaatcccgtctactcaggaggctgaggcaggagaatcgcttgaacccaggagtgggaggttgcagtgagccaagatggcgccactgcactccagcctcggtgacagagcaagactctgtctcaaattaaatataaaaataaaaaagagtctacctgggtgcagtggctcacacctgtaatcctagcactttaggaggccgaggcaggaggatcgcttgagctcagttctagaccagcctgggcaacatggtaaaattctctctctgcaaaaaatataaaaattagccaggtggcgaggcgtggtggctcatgcctgtaatcctagcactttaggaggccaaggcaggtggatcacctgaggtcaggagttcaagaccaacctggtcaacatggtgaaaccccatctttactaaaaatacaaagaattagtccagtgcaatggcacgctcttgtaatcccagctacttgggaggctgaggcaggagaattgcttgaacctgggaggcagaggttgcaggagccaagatcatgccactgcactccagcctgggtgacagagcgggaccttgtctcaaaacaaaaacaaacaaaaattagccagacatggtggcacatccctgtagtcccagcctgggtgacacagtgagaccgtgagaccctgtatcaaaaaaactttttcctctacacactagtagtataattattgcaaatacgaaatatatattagttctcattcatagagtatttcctatttggggctttaggactaagtttgtaatattaaagctatttgtcagtttttaaaaaattgttatatgccgtggatcaggttactaaaatggaaacatttcctagtaaaattacatgcagatttcagattaacgtgttatttttagtaattaacattgaatgttattcatgtagattaaacaattcttactttatgctcacactatagccttagaggctgatattctgaaataattcttttgggaggaaaaaaacttttgtgtgttttttgtaaataggatgcaggacaaaaaagatttggagcagtttcttgtaatgtttgtggaatgctgtatacagcttcaaatccagaagatgaaacacagcatctgcttttccacaaccagtttataagtgctgttaaatatgtggtaagtggaatttgtgaattctaaaatgcaaaaatcagataattaggtcggtctcttaatgagatgagttgccaaattt

SEQ ID NO: 19619 - DNA, 2300 bp, Homo sapien
ctatgcttatgtaagacaagttattgattattcataggaatatacttgggatacttcgttctgttagccttaagtgtactgattagatacttcaaaaggaggagttagattttccttaaatcaaggttatttctgtgtagtattagcattgacatatttcatggattgtacaaaactttatttttgttttttaatttttcagaaacggcagcacaaaaggaaatctatattaatagaatattttgttgaacaaaggaggttagataagaactgcaaaccaacagactcagcaaacaaggaaagaaacgtgttagccataagacatgtttcaagtgaatcgaagtccaataactgtagacttcagaagaaaaaagttttcaaaaattttatcaaaacaggtcactgataaataactcctccagtaatagagctaggcctgaaaccaaaattaattaaaaaattaacaaaacagattgaacctgaattaaatttcttttgataaaaaaacttattaaaaataatcaaaattttcctcaaatttttattaccttgtccaaagtaaagcaagtgtcttttagcattcatgccagcttttctcatgttctaggaatgacagaaaccttacttgaagcaaactagtatttttgttgaaaatgtatatcagcatcagttaaagttgatttttcagacctgctcctcagtaataatactagctagtcagcattcacgcctaccaggacacaaaaatcctcttcaaaactactcagaaaagaaagtcattactcaggaatgatgtccattcaggagaaatcaaaagagaattcctccaaagttactaaaaaaagtgacgataagaattcagaaacagaaattcaggattctcaaaagaatctagcaaaaaaatcaggtccaaaggagactataaaatcacaggctaaatcttccagtgaaagtaaaataaatcagccagaattggaaacacgcatgagtacaaggtcatcaaaggcagcatctaatgataaagctactaaatccattaataaaaatacggtgactgtgaggggatattcacaagaatctacaaaaaagaaattatctcagaaaaaattagtacatgaaaaccctaaagcaaatgaacagcttaaccggagatcacaaaggctacaacaattaacagaggtttcaagaaggtcgttacgcagtagagaaattcagggtcaagttcaagcagttaaacagagtttgccaccaactaaaaaagagcagtgtagcagtactcagagtaaatctaataaaacaagtcaaaaacatgtgaagagaaaagtactggaagtaaagtctgactctaaagaagatgaaaatctagtaattaatgaagtaataaattctcccaaagggaaaaaacgcaaggtagaacatcagacagcttgtgcttgtagttctcaatgcacgcaaggatctgaaaagtgtcctcagaagactactagaagagacgaaacgaaacctgtgcctgtaacttctgaggtgaaaagatcaaaaatggctacttcagtggtcccgaaaaagaatgagatgaagaagtcggttcatacacaagtgaatactaacacaacactcccaaaaagtccacagccatcagtgcctgaacaaagtgataatgagctggagcaagcaggaaagagcaaacgaggtagtattctccagctctgtgaagaaattgctggtgaaattgagtcagataatgtagaggtaaaaaaggaatcttcacaaatggaaagtgtaaaggaagaaaagcccacagaaataaaattggaagagaccagtgttgaaagacaaatacttcatcagaaggaaacaaatcaggatgtgcaatgtaatcgttttttcccaagtagaaaaacaaagcctgtgaaatgtatactaaatggaataaacagctcagccaagaagaactccaactggactaaaattaaactctcaaaatttaactctgtgcagcacaataagttggactctcaagtttcccctaaattaggcttattacgaaccagtttttcaccaccagctttagaaatgcatcatccagtgactcaaagtacgtttttagggacaaagctacatgatagaaatataacttgccagcaggaaaaaatgaaagaaattaattctgaagaagtgaaaattaatgatattacagtagaaattaataaaaccacagaaagggctcctgaaaattgtcatttggccaatgagataaaaccttctgacccaccattggataatcagatgaaacattcttt

SEQ ID NO: 19620 - DNA, 2300 bp, Homo sapien
gcaacctccgcctcccaggttcaagtgattctcctgcctcagcctcctgagcagctgggattacaggcatgcaccaccatgcccagctaatttttttgtatttttagtagagatagggtttcaccatgttggccaggctagtcttgagctcctggccacaagtgattcgcctgcctcgacctcccaaagtgttgggattacaggcctgagccattgtgcccggccctatctgcttttttgagtcccattttcttttttttttttgagacaagagtctcgctctgtcgcctaggctggagtgcagtggcacaatctcagctcactgcaacctccacctcctgagttcaagcgattctcctgcttcagcctcccgagtagctgggattacaggcgcctgccaccacgcctggttaatttttgtgtttttagtagagacggggtttcatcatcttggccaggctggtcttgaactcctgacttcgtgatccacctgctttggcctcccaaagtgctgggattacaggtgtgagccaccgcacccggccttttgagtcctattttcatccgcatctctatggagtctgatactgccaattcctgagtctcgggtataaatagatcttctcagctttccacatttctacctgaagattcagattttcttgagcctactaagtcaattatttgtccttctctgtagcatctgtacttctaaatttttatcttctactgtcttgttctttatcctttgggtttatggcattgtcttggttttttatttacttacttatttttagatatgggtctcactcttttgtccaggttggagtgtactggcatgattatagcttactgcaaccttcaactcctaggctcaaacaatcctcctgtctcagtctcccaagtaacctggactgtgggtgcatgccacaatgcctggctaatttttaatttttgtagagacagaatcttgctatattctccaggctggtcacaaactcttggctttaaccttctgcctcagcctctggagtttctagaattacaggtgtgagccaccacaactgggtcttgttttgttttagtccctctattgctttttttttccagtagggtttgaatcggaatagaggtaaatgtgtttgcttaaatcttccttctttaactgtatttcagtctttttctatgtatatagttatctatgtgctttgttttttccccaaaataggattttactttattggtttaaccaattttatgcttatattatgaattgtttttcatattttaaaactttttttcacaacatgaatgaatgcctactagtccattggctgcatatagttgagtgcaaattagaaatactaaaatactgtacgtgtaatatgagctttgaggaaataatgactaatggtaggacaggatgaaattatggagcgttatatttgatgagagccgaatggatgattacatctttcctttgtccttttgaacattaaaaaaaaccctttttctttcaggtgctgtgtgatgtgttaagagcatattagaaggaatggttttgtctaattttcttcatgagttatggtggctgagacatcgagtctatattttggggcaaaaactgtaagtaaacctcaaggaatacactgattttcaactattctatgcttatgtaagacaagttattgattattcataggaatatacttgggatacttcgttctgttagccttaagtgtactgattagatacttcaaaaggaggagttagattttccttaaatcaaggttatttctgtgtagtattagcattgacatatttcatggattgtacaaaactttatttttgttttttaatttttcagaaacggcagcacaaaaggaaatctatattaatagaatattttgttgaacaaaggaggttagataagaactgcaaaccaacagactcagcaaacaaggaaagaaacgtgttagccataagacatgtttcaagtgaatcgaagtccaataactgtagacttcagaagaaaaaagttttcaaaaattttatcaaaacaggtcactgataaataactcctccagtaatagagctaggcctgaaaccaaaattaattaaaaaattaacaaaacagattgaacctgaattaaatttcttttgataaaaaaacttattaaaaataatcaaaattttcctcaaatttttattaccttgtccaaagtaaagcaagtgtcttttagcattcatgccagcttttctcatgttctaggaatgacagaaaccttacttgaagcaaa

SEQ ID NO: 19621 - DNA, 2300 bp, Homo sapien
ccagaatttgaattactatagacaaagtagtttatccaaccaaaagaagtcccaccagttgtctggcaatcagaagacgaagatgaagggaaacataggtcaggtctcctgataaataaccagcttttaaccagaccagtagtttactcctgttcccccgccccaccccccgcccccaatttgagctgtttggcatatgtcattaaagtgtgtatcagggactggagctgaaggtggaagcagcggacaggtctttgccaagtaacacaactatggtaatgtgaagaatggcctcacccatcaatacctcccaaacagctgggattacaaacgtgagccactgcgcccagcctcgtttttgtttttaagccataacatctccctgcgcaaactgacaggcagctcactattcgtggaagatgaattgtcagaaaaacatcaggtttgacaaacttagagcacattttggttgtacttggcttcaaagaaggagggcaggaaggggaaaacccatttatgatcacctcttcccattctgaaatgcagaagtaccgaactagcctcacagttccgcaaataagcaaagggtagcacagaacatatgttcaaaagcagtctagtagccggagcagtggcttaggcctgtagtcccagcgctttgggaagccaaggagagaagagaggatcacttgaggccaggagttcgagatcagcctgggctggtctcagtgagaccttatccctacaaaatataaaaaaattagcctggcggccgggcgcggtggcttacgcctgtaatcccagcactttgggaggccgaggcaggtgggatcacaaggtcagaagttcgagaccagcctggccaagatggtgaaaccccgtctctactaaaaataaaaaattagccgggcatggtggcaggcacctgtagtcccagctactcaggaggctgaggcaggagaattccttgaacctgggaggcggaggttgcagtgagccgagatcgtgccattgcactctagcctgggtgacaagagtgagactccatctcaaaaaaaaaaaaaaaaattagcctggcatggtgtcgtgggcttcatacatgcagttctcagggaggctgaggcaggtgggatcgcttgagcccaagtcgaggctgcagtgagccgttactgtgccactgcacaccagccagggctacacagcaagatccttcctgtcacaaaagaaagaagtgtgggaaccatgaatcctagtgatagaatcttggattctatctctagaggcgtccaagagcgagccaaagctttgtctgaacactcagtctgactaagtctagcagaatattttacaatttctgatgattcttgcactctgatacacaggaagaaagtgtgcaaggagagggcgaagccctgcattttttggaggtgctggagggcagtgtagggactgcaccctccttttttttttatttgagacagggtctcactcgtccagactagagtgcagtggcccagtctcagctcaccacaacctccgcctcccaggctcaagggattctcccgcctcagcctctcgagtagctgggattacagtcgcacgccactaccacccggctaatttttgtatttctagtagagacggggtttcaccatgttggccatgttggccaggctggtctcgaactcctaacctcaaatgatccacccgcctctgcttcccaaagtgctgggattacaggcgtgaaccaccgcgcccggccccaccctccttctttacattggctcatatggaagaccaaaggcacttggattatacatcgcagacagaagcagccaaaacctacatggcaaccagttgcgacaaatttccaaggtaaaccacaaccgctgggggcctgggtggttttcagctcaaagcgatgaccccaggaacgacaagcggccgccgctagggggcgccgccacttccctgccaggcgaccacccgcggaggcgcgcgcgctaggcctcccaccgcgcctgcgctgaggatggacactagctcgcctttcctcgacgcccagccgtccgggccggggtgaaaaactgcgtgacacgcagtgagcgtggcggccatcttcgtcttctgggcacgtcagctgagccggttagggctgaagaggagcgttgcgcaagcgcacccaagacggtcacaggtaactcccatctgacgagcgaggcgtcgccgtcgtcgccggaagtttggtgtttgcgccgcgggggaggcggcggccgcagcagaagcagctgagtgtctcc

SEQ ID NO: 19622 - DNA, 2300 bp, Homo sapien
tctaggctagagatacaaatcaaagtcatggttttggaggagattaccaggttaaaagaaaaagtatacataaaaagactacagccacaagccgggaaacactgtgacatgtattggctccatagggaaggaggaaccagctaaggagatttagaaagagtagttagaggctgggcatggaggctctgggcctgtaaacccagtactttgggaggccacggcagtggaatctcttgagcccaggagttggatactagcctgggcaacatagtaagacctcttctctacgaaataaaaaataaaatattagctgggcatggtggcacgcacttgtggtcccagctactgagaaggctgaggcaggaggatagcttgagcccagacggtcaaggctgcagtgagccctgattgtgccattgcactcctgcctgggcaacagagcgagaaaccctgtctataaacaaaacaaaacaaagcaagagtagttagtaggataaggaaaaaggccaggtgagcttggcatcctgaaacccgaaagagggaaggggagtgtttgtgttaaattttgatgaagctcacatactaaagagacaataatgccgggcgcggtggctcacgcctataatcccagcactttgggaggccgaggcgggcggatcacgaggtcaggagatcgaaaccatcctggctaaccccgtctctactaaaaatacaaaaaaattagccgggcgtggtggctggcgcctgtagtcccagctacttgggaggccgaggcaggagaatagcgtgaacccggaaggcggagcttgcagtgagccgagatcgcgccactgcactacagcctgggcgacagagggagactctgtctcaaaatacatacatacgtacgtacatacatacatacataaaaagacgataattagcgggccatggtgatgcgcgcctgtaatctcagttactggagaggctgaggcacgagaatggcttgaaaccgggaggcaagggttgcagtgagctgagatcgcgctactgcactccggcctgggcgacagagtgagactccatctcaaaaaaataaaaaatatatatattttgatgagatgttgagaaagatgaagactgaaaagtttgtcttatagattggaacttaaagtgaaaataatctgctacattgtggattttatttttattattattattttttgagacggagtctcgctctgttgccaggctggagtgcagtggcacgatctcagctcactgcaacctccacctcctgggttcaagcgattctcctgcctcagcctcccgaatagctgggactacaggcgcgcatcaccacgccccgctaatttttgtatttttagtagaggcggggtttcaccatgttggccagaatggtctcgatctcttgacctcgctatctgcccgcctcggcctcccaaagtgctggaattacaggcttgagccacagcgcctggcccattgtgtgatttgcttcaggtacagtaagcaatgctaggttcctggtgttggaacagaatcagcataagactttgggcttctctaagaccttctttccgttcagtgaggaatttgtattaggtgctgcactcacagtgccctgctgttcagaaacgtgatggtgacagtactttttttttttttttttttttttgggagacggagtttcgttcttgttgcccaggcaggagtgtagtggtgcgatctccgctcactgcagcctccgcctcccgggttcaagcgattcccctgcctcagccttccgagtagctgggattacatgcgcccgccaccacgcccagctaattttttgtctttttagtagagacgggggtttcaccctgttggccaggctggtcttgaactcctgacctcaggtgatacccccgcttcggcctcccaaaatgcgacagtcctattaattggatttaatctcttcgaatctccctctcttgtaggacatttttctccaagaccagccctcgataccctcagccgtcgcaaggcaacctccagccgccaggggccgcagtcgcgctcctcgcggccggaagagagtgcggcccagcgcagcctcggcgtttccgccatgcgcctgcagtgctccgcgcgctcttgacgtccggagcccctggagtaggcgcttccggccattcatactgcagtcggtcagtgttcggttgaaggattctgtgtgctgtcggacccagagggtgacggcgccgctaggatgaagctcgtgaggtgagggagtgaccaagcagctctgggggctg

SEQ ID NO: 19623 - DNA, 2300 bp, Homo sapien
ttattggctgtctctttgagaggactataagctagctgtatggacactttttaaataaatgtctgattatgtttatcatattttattaaatgcggttgattgaatgaacgaaggaaggaaagaattaattcaggtgaattttaatatttttcttaactacgggtctctgtgactgcggattttgtgagcctgaaggtttgtctgaagcccatgaagtcgattgcatcactcaccggctgccatgttgaccttctgattcctgacgcactcccagccatccctggagctgcgttctgaagctgaacttgtagcatgactttcatcactccagttacagaaataatcacttattgctctctccagctgcagtggccttcaaaattatttttccccaggtggtattttgttttgttttgttttgttgctgggcaaatggaactactgtggagtgctctcctagaaactgaaattttgttaaccccctactccagctgttattttaagcatacggatattgtcatttgtgctgcttgcaattactttggggcttatttggaactttcctatttaggcttatttctactaattgtttttggggtttttttttttggttgttctagtgatggtgagcttaaggaaatccaaaatttttattatcgggaattttactaagcttttagattcctgaagccattgtccaaaactagttttttaaatcagcaaatactgaagatagaaaatgatattttttcataattttataattggtttatctgtcatttcagtttttagaacatcttgaacatgaatcacttgaaaatgaatagcatttttctatagccagtggctgtgaaaaagaaaaaaaattttaatttttttaaaaagataatgaacagcatttacaaatgatagactctaaaaaacaggcctttaaccacagctttttagattctgataaacataaaactaagaagaaaagaatacatttcttccattagcatggaaggtctgacttgacctactaaaggaagaaatctcaatcaatggagaaaacccacgcagactctctgaattgtgcttaatggacggagtttagcgtcactttcctttcccccataatgtgaaccttaaaggactgggtgagagctgaacttttcccttaatcatataaacgcatggcttttctaaaggccggagcttacatacacaggttcagattctctattcaatgctcctgggaaatgtctattcgtgccgcattgaagcctcagtgcctgaaggcagaacttgaccattagcctttacagctggttgaacattaatgtcttgtgaactgttagacggaagcaccccttctagttgcctagcactgtgacacgatcccaagtgggcttaccacttggggatgtgttttatatcttgacacattttttcttatggagatgcaacacgcaaaaacagtccatggacgatccttatgcccagtgccccatggactggggtaatccctgtgatagagcctatgatgcccctggggccaagtgccagcaactcatggatcatctcgtttcatcagtgtcaccccctcccctctctctcccaactctgattattgtgtaccaaatctcagacatcacttataaatagttggtatctctaaaaggtgggccaggtgtggtgacttacgcctgtaatcccagcactttgagaggctgaggcaggcagacaacctgaggtcaggagtccgagaccagcctggctaacatggtgaaaccccccatctctattaaaaatgcagaaattagccgggcatgatggtgcatgcttgtaatcccaacacgctgggaggccaaggcgggcagatcatctgaagtcaggagttcaagaccagcctggccaacatggtgaaacccccatctctactaaaaatacaaaaattagctggacatggtgacgcatgcctgtaatctcagctactcaagaggctgaggcaggagaatcacttgaacccagaaggtggaggttgccatgagctgagatcgcaccagtgcactccagcctgggcaatagagcgagactccgtctcacacacacaaaaaaaggccaggcgcggtggctcacacctataatcccagcactttgggaggccaaggcaggcagatcacctgagttcgggagttcgagaccagcctgaccaatgtggagaaaccccgtctctactaaaaatgcaaaattagctgggcatggtggtgcatgcctgtaatcccagctactcaggaggctgaggcaggagaacttct

SEQ ID NO: 19624 - DNA, 2300 bp, Homo sapien
tgtcacccagactggagtgcagtggcgtgatctcagctcactgcaagctccacctcccgggttcacgccattctcctgcctcagcctcctgagtagctgggactacagcgcccaccaccacacctggctaattttttgtatttttagtagagacagggtttcgctgttttagccaggatctccatctcctgagctcatgatccacctgccttggcctcccaaagtgctgggattacaggtgtgagccactgcgcctggctgcttgtttgttttttaataaataatgattttacttgggaggccaagatgggaggattacttaaactcaggaatttgagaccagcctgggcagcatagcaagatcctgtctctacaaaaaaataaaaaatttgccaggcatggtggtgcatgcctatagtcccagctactcaggaggctgaagcaggaggagcacttgaacaaggaagtcgaggctacagtgagctgtgatcataccattgcactccagcctagaaacagagcaggaccatgtctcaaaaaaattttttttggccagacgtggtggctcatacctgtaatcccagcactttgtgaggctgaggcaggcggatcacttgaggtcaggggttcaagatcagcctggtccacatggtgaaaccccatctctactaaaaatgcaaaaattagccgggcatggtggtgggtgtctgtaatcccagctactcaggggagtgaggcaggaaaatcatttgaacctgggaggcagaggttgcagtgagccgagatcacatcactgcactccagcctgggcaacagagcaaaactccatctcaaaaataataatatttttaaagttactttgggccaggcacaggctcacacctataatcccaacacgttggggggccaaagcaggtgaatcactgtaacccaggagttcaagaccaacctggacaacatagcaagacccccctgtctctacaaaacatttttttaaaaatctgtttgtggtggcctatacctgtggttccagctacttgggagtttaaggtcagaggattgcttgagcctgggaggtcgaggctgcagtgagctgtgatcatgccactgcaatctagcctgagtgacagtgcaagactctgtctttccaaaacaaacaaaaaaaaaggttattttgtctttgagggtacaggttgttttttgtttaatagaaagcacagttctctgctttttttcctaaactgctctggttaagttggagacacgtttgagtatggtactttgtttaattgaaggtatttgtattggtcttgccccatctgcatcaagccttccttgcatgttcatggtctttttgttagtgccaactctaactgtgctgactttaaatggcatgtatgtgcgctgcaagacaggaaaatgataaattattaatactacagtatgtgcaaacaaaggttattttctcatatgtatgactccttgctcctgtttacatttctgcattttacaaatcattaacctcacattgtaatttttgtgctttacttgtcactacttccagacgccaaggacttattgttgtgctaacactgaagacttggagacagttattcaccatgtacacagcctgtacccttctgctcctttcctggcagcaggggtttcaatgggagggtaaggttttccctttctaaaataatctctgagagggaagctattttattggctgtctctttgagaggactataagctagctgtatggacactttttaaataaatgtctgattatgtttatcatattttattaaatgcggttgattgaatgaacgaaggaaggaaagaattaattcaggtgaattttaatatttttcttaactacgggtctctgtgactgcggattttgtgagcctgaaggtttgtctgaagcccatgaagtcgattgcatcactcaccggctgccatgttgaccttctgattcctgacgcactcccagccatccctggagctgcgttctgaagctgaacttgtagcatgactttcatcactccagttacagaaataatcacttattgctctctccagctgcagtggccttcaaaattatttttccccaggtggtattttgttttgttttgttttgttgctgggcaaatggaactactgtggagtgctctcctagaaactgaaattttgttaaccccctactccagctgttattttaagcatacggatattgtcatttgtgctgcttgcaattactttggggcttatttggaactttcctatttaggcttatt

SEQ ID NO: 19625 - DNA, 2300 bp, Homo sapien
gatctaatctctgaccactgctctagctctttggactcaataatgcagtctccttgtatagtatacttcaagattttcttctgaaataatttaaattatttctcacatagtattcatgaacttacagaattttcccaaacaaacagtgcaagttccaggcaacaaaataaactccagaaggatagatgactaagggaaattaataacaggcaccatttaaatctggttcctgataaatcctggaccgtatctttaacacatcaagagctattatcatcaagatcccatttgcctgtcaataggaagtcattttacaccaataaatcgcccaaaacccaaattaagtggcatccttctcaccccacccccccccccagtatctgctacttatcaatgaatgaatgcagatcatcaaaagatctgggtctttctgacagatgtatgacaaactgcgagacagtaatccccaaacacttctctcatcctaaaaataaaccatttacatcaggttggcggttagggcggggaccaggaggcaaatacctgcagctggggtattttcctgcagctgggggtggagccggggacgtaccttccattttcattccctctttctgttctatatacttcctaaagcagattctattaaccaagaactgggaataagcaagcaagcaaacaaacaacctgtgattttgcagaaatgactgaaaacggaaattcacttacttcctgtactgcaccgggggcttcgaagtgatgaaaggtctaagcagggtctgtcctcgaccctcccagcaccagaccgtcgggtagtacgtttctgtaaccacgggacagtggtcttgaaggaagcggctgaaactctcacccccggtcactaactggggtttctgaagggaaaagcagtatcagagaagggcccagagcaaagtttctgccaaccgtaaaccagaaaccggcaaagacttgtcgctcgcgcgcgcgcttcctccgattacaactctttctggagggctgacgcaaaaaattcacagtcacagaggactgaaacgggggtttcgccaatgccccgaggggaaggcgagaatcgcgataagggagtttgtttgtttttaactccgcctcccgggttcaggggattctcctgcctcagcctcccgagtagctgggattgcaggcgtccgccaccacgcccggctaattttttgtaattgtaacggggtttcaccattttggtcaggctggtctcgaactcttgacctcaggtgatccacccgcctcgggctcccaaagtgctgagattacaggcgtgagccaccgtgccctgcccggagtcattttcaaaagcgccacggcgttcccgagtgcgccgccggcttcgcgatcggtgaccgggcagcgccgcagcgcagaagtcagccgggttcaggctgcgctccgaggaccacccggccgggacccccagggggcgggcgaacgggcggggcctgttggctttcccgcgcgcgctgggggctgccgctcgggagcagctcgccgcctatccccggggctgccgaccgcccctggccgcgcagcctcgcgccgcgcctgctaccctagctcctggcccagcagcccgcggccctgcgccacccccggctcaccttggcaatgctgctcaggtagtagaaggcataagcgacgctgaagcccaggataagggataagcccacccccgagccgaagaaccccacccggacttggtgttccaggtagagggagagctcccgggacaacatccgcaggtccatggccaggcgctgcatggcccccgagcgcggcgcgcgggtcctgcggcgggaggagagccggctggcgagcgggcgagagcgggcgagagcggacgcggcgccgctgcctactcccgaccacagtgtctcctgcctggcggagcgcggcttccgacaacgggcggggcggagcggcccagggaggcgtagcccgagactccaacgccgcccgctccgccccggcttcctggagccgcccccactgccagccactcaggaaccttccagaagcgcggttccaagaccggccaccgggagggcgggcggactgggttctcccagctaggtcgcagtgggcgatggggatccccaagggtgggccgagagctgacggatcggcagcgctggttaaggccccgcacctgcagccccagtgaccttgaacgattccgctctgcggcgggtgtccctaaactagcagtttagggtgtcaggtaagcgtgccttgcattcaaagatttgggg

SEQ ID NO: 19626 - DNA, 2300 bp, Homo sapien
tggatggaacccggcttggcagagcagggggcagcgctcgtgggggaggcttgccccgcaggagcccacagtggggcggggggtgcggctcaggcatggcgggctgcaggtcctgagccctgccccgtggggaggcagctgaggcccagcaagaattccagtgcagcgctggcgggctggcactgctggtggacccggggcaccctccacagctgctggtctgggtgctaagcccctcactggccagggccggcggtgccagccggcgctcagagtgcagggcccgccgagcccacacccacccggaactcccgctggcccgtgatcgcggggcacagcagccccggttcccgcccacgcctctctctccacacctccctgcaagcagagggagctggctccggcctcagccagcccagagaggggctcccacagtgcagcagcgggctgaagggctcctcaaacgcggccagagtggatgccctggcctgaggaggtgctgagagcgagcgagggctgctagcacgttgtcacctctcaccagcactttgggaggccgaggcgagtggatcaggagttccagaccagcctggtcaacatggtgaaaccctgtctctactgaaaatacaagattagctgggtgtggttgtgcatgcctgtaatcccaggtactcgggaggctgaggcaggagaatcacgtgaacccgggaggtggaggttgcagtgacccgagatctcgccattgcactccagcctgggcaacaagagcaaaactctgtctcaaaaaacaaaacaaaacaaaacagaacaaacttaaactgaaatacgcatgcatttattggtaggtagtgcagaaggctggtgcaggggttatgaagaatgctatgaagtttcaagtatggcaaccagcatatgcattcacgtttgctatgtgtgctcaggtgtgagagccagagcgtgaaaattacttctgctcacggggagtccagtatatacactatcttgtcctctcgggaactctataaagtagaaattgttacgctacagattattaaaacaagaaaaaaacaggctcagtaaaggtaattgaattattttgggtgctgcagccaaccaccaagttgcaatgaccaaatcggagccaaataaattgctcacttctggtccgtctcatgtccccatctaaattacatcattaatttacaatcctttggcatttttcataatctagacagcactttcccttctttcgtctgtttaagtcttgccattcttcctacctctctgaggaaggagttcataagagtaggaataggctattaaattctaaccatttcagataaccataagtatcctgatttatcatattgccataaataagcctaggagaccctacttcataaatggtttcttgtctgtacattaggtaatcggtgtgaatttccataagtctctaaattcaaagcattaatgaaccacaaataggcttttaacaattgaatcccggttgctattcttgaccttttcatttattttcagagaccacttctcatttaagtgacacttagcaactaaaaagattcacagagtgattcagagtcgagtatgatgtcctcactgttgaatgctcatagaatattttttctctttccatagtcttgaggaccaacgcaaacgtctagaggatgtgggattcttacctgctaacatatctttggcattaactccccaaatctttgaatgcaaggcacgcttacctgacaccctaaactgctagtttagggacacccgccgcagagcggaatcgttcaaggtcactggggctgcaggtgcggggccttaaccagcgctgccgatccgtcagctctcggcccacccttggggatccccatcgcccactgcgacctagctgggagaacccagtccgcccgccctcccggtggccggtcttggaaccgcgcttctggaaggttcctgagtggctggcagtgggggcggctccaggaagccggggcggagcgggcggcgttggagtctcgggctacgcctccctgggccgctccgccccgcccgttgtcggaagccgcgctccgccaggcaggagacactgtggtcgggagtaggcagcggcgccgcgtccgctctcgcccgctctcgcccgctcgccagccggctctcctcccgccgcaggacccgcgcgccgcgctcgggggccatgcagcgcctggccatggacctgcggatgttgtcccgggagctctccctctacctggaacaccaagtccgggtggggttcttcg

SEQ ID NO: 19627 - DNA, 2300 bp, Homo sapien
taaaccaggaagaagtcgaatccctaaacagaccaataacaagttctgaaattgaggcaataagtaatagcctaccaaccaaaagaagtccaggaccagacagattcacagccgaattctaccagaggtacaaagaggagctgttactgtacttcctaaaactattccaaacaacagaaaaagagggaatcctccctccttcgtaaaactcattttacgaggccagcatcatcctgataccaaaacctggcacagacacaacaaaaaaagaaaatttcaggccaatatccctgatgaacatcgatgcgaaaatcttcaataaaatactagcaaacagaagccagtagcacatcaaaaagcttatccaccactatcaagttggctttatccctgggataaacactttgggaggctgaggtgggaggattgcttgagctcaggagttcgagaccagtccggccagggaaaatagtgagatatatcccccaagaagctccccactgcccccccgctcatctctgccaaaaatacaaaaaattagctgggcgtggttgtgcgttcctgaggtcccagctactcagaaggctgaggtgggcggaccccttgaacccaggaggcggaggttgcggggaacggagatggcgccactgcactccggcctggctgacagtgagaccctgtctcaaaaacaaagcaaaaaaaaaaacaacaacaaaaaaaaccaaacaaaaaaaattttatttcagtacatagtaattccttgggtacattttacgtccgttttcttgtcttttcccttgattatccattctgttagcatttccctcctttgactatcaggaaaagcaacagtttatgctaacaatgcatgctaacggtgccaacagtgctggcctgtggaaacactggttttaaaccctatgcagcataatgtcatttgaataacggcaaccagaaacttctcttacagtcttcgaatcttcctttgaaggttgtattttgtaattagggactgaattttttcgtgagtggaggcaattattaatgagcaaagtttggagtctgcctatcaccctaattctgcataaagtcaagacacaccttctaaaagtctttaccgttgctcacaacattccataccatgctgttcagcttaaaaacacactactaacctgctctgtctggtttgaaatgttttcaatttacacacaaatacagatcgccctgaatttgtgaatgtatttctaccttcgttaaaaaagaagactaaaagaatatggaatccctaattcacatttagttcgcctaggaaaactagcagttagtgaaaaactggccacatcacagccgcacagctccagcagcccgggtagcttccccaccctcactttctccagccccgcctccaggacggcctaaccgctttcctcatagctcattgggcgcgcggcaccaccgggcggcaactccagggatccgcccctgggcccgcccctccatcgcccggggctggggttgggcaaccgtccgccctttttctagaccgcgcgcatgcgcactctccttggaccctggagagacgcttagggatcagttttctcctcctttcttcccgcgatcgcgcggctctctggaagccttcccactctattattgccgaggatccccctcctagacactctgagaaggtgccgctccggccttgggtacggcggtacccggatgtggagtcgctctcgcccggctgggactctgtggcggggcggagcgcggcggctggtgcgggggcagagagaagggggcctgagggcccgggcgctcgccggacgccgggaggtaccaccgctgcccacgggggaggaggcggcgccggcgcttgggtgcccgcccccgagcgaggggccggggtggcagaaaggccggcagttaagcttgctccccgccgcccccctcgggctagcctcccccggccccctgcgctcctcgcgctgccggccgggggagagcgtggtttccttgcggccgtcgctgtagcctggccggggagcccggaggaagcgggagagtccccgcccacggccccctcccctctgcccgctctccgccgccgcctccgagcagccgcgggccgccctccactccgagcggggggcgcggcggcgacagctgggcagcggctttgggctccgcggggaccgcgccgccgcccccgtgagttattctcacgtcccccggggctcgctgccgcccccgccgacgcctagagtccggcccgggcccaactccctcacgggcccccc

SEQ ID NO: 19628 - DNA, 2300 bp, Homo sapien
aaatatctctggaaccatttctctcaatttctactgtcaacaccctaatttaagctaccattatcttagctggactgctactaacttcttttaatctgactccctttctctagccacttttacttttttcatatcttttttctccacactgcagcaggagtgattttttattttttttattttttttatttttttgagttagagtcttagttgcccagactggagtgcagtggcatgaacatggctctaagagtgatacttgaaagcagcagagggcatgcctgcagtagtaataaagaaatagttctggatgaatcagtagccactcatgtccactatcttctgtccctacagtcaagcatttatgtgacaggagactgcagaaggattgcacataaaacatatttggtgttggggtatcaggcttttttgtagtccactaggtatcccagttctttcaggtgttcgttcccttcctccttccttccttgcttccctccttcctgccttccctccctcttccttcctgatccttgcccctcccctccctttccctcaaaacaggcataccactcaggtttggccctttgtttagaatctggttatctgaatatagaaaatgaataacatagggtttgtttttctttcttatcgggaagtacccagtagtgtattatattagtaatatgaccacttttgtactctagtttttacatatgtagcatgttacttgatttttagaacacgttgtctcacctttaaagaatatattacattccccaaaggggactgaggttgtgagaatgaaagggctcctttcttctatttaattatggaaatgttctaaatggatacaaagaggaagataatgtaatgaactcccatgtacccattacccaacttcagcacggctaatcttgttttacctaaatcccactttacttcccctctgcctccctccagttattttgaaaaaaaaaacaaaacaaaacaaaacaaaaaaaccccacattattttatacgtaaatacttctgataaaacgaccttttcaaggacataaaagtaaatacagacggagtcagaacttgaatccaggagagtgtcacttttggacagataatacagcccttgcttggtcagcattgagcttgaccatccaggatgtgtttataaagtagtgacactgatgttgacaagccacacattgttgaaaaaaaaatcctagtttttatttattgaacaagtgatattaatataacaatagaatagtaaaggagtattacccccaattatttcacctgaaaatgaaggttgttttcattacttatattggtaccttttatagttctaatgtctgtctcattcatccatgtgattaattttagtggaggtcattttaccaagtgtttattttttctagagcttattatttcttgtttcctaaggggataaaaccccactatagtgtattgtttcctttaaaatagggaaacttgcttcctaatcattttctaacttttcctgactatgggaaaaacttgtcaatatctaagggtggtaaatgcttaggttaattgatagtttgtttccatgatatcatgaaggcaaaatggtcttttcttttggagtaattgtttacctagaaaatagttgaaaattctttcaaagatttctgaggttttgtagtctgaaacatctccttagtgataaaggattctttctttctctgtgctgaacttaagttctagtttgtggatgagagcgaggaaagagttactgagatgtgttcttactaatgaaaaagggagcagagggaaaatatatataattcgcatttattaacgtagttgagatccattatcttgaagctatatgtgttaaatttgaagtgttatttcctaatttattagaatatcttgtaaaatgttctgttcttatttttttcccccaaggaataatattcaaataaataaaatttgtgattaatctgagcatgtgtccttgttttaataggcatcaagcatgatggaaccatgtgtgatacctgccgccagcaaccaatcattggcattcgatggaagtgtgcagagtgtacaaattatgatttgtgcacagtgtgttatcatggagataaacatcatttaagacatcgcttttaccgaattactacaccgggaagtgagaggtagggagaacccttttcttcttcaaccgagggtttttgtttgtattcaagttatgtacttctgggccttaaaaataggattagcaaatagcttctgacagttggtttactaac

SEQ ID NO: 19629 - DNA, 2300 bp, Homo sapien
aactactttgagttctgtaactgttttgaatgaactatttaagtgcatttaatcataacagtgtttatctgtgctttctttgaaagtagttcagataatcctgggtgccatatggattgtcagaccccttgcaaaactagggagtccaccaggggctggcacagtggtattgggaatcggaaaccactgctttggatggaggaagtcttagagtaccaggatcagggacagacacatggtcttggtgggtgttaaaatttgcaatgcagtattggaataaatgcaatacgcttatacctactacccttttccatctgcttctggcaaggcagtgagacttcttttcatactttttggtataagctatgtatactaccttcatggcgcagtgcaggcagtttttcccctttataaagtaccttcttttagttttaaaaaatttaagcaatttggtctttcctgccttctcatttcttcagaaatatgcctgttacaggaggtgaggcaaatctatttgattcttctgaaatagttttggaatttttgatatatggaattttggtagtttatgcttcgtttttatcttttaatggtgtatttaattttttttctgttctcgaatatacagaaaaatgtatgctcatcacttaaccagttttaatgtgttgataaattgctccccattaaagccagttgagatcacattgtttggcattctttttttttttttcaatcacacaactcatcttagtttactttttgtgtcatctttgtaggacgtgcacggtggctcacacctatgatcccagcattttgtgaggctgaagttggagaatttattaaggccaggagttaaaggctgcagtgagctatgactgccactgcattccagcctgggtgacagaacaggaccctgattctttttttattgagaggcagtcttgctctgtcgctcaggcttggagtgcagtggcccgatctcagctcactgcaacctctgcctcccggattcaagcagttctcctccctcagcctcccgggtagctgggattacaggcatgtgccaccatgtctggctaatgtttgtaattttagtagagacgggttttctccgtgttggccaggctggtcttgaactcctaacttcaggtgatccgcccgccttggcctcccaaagtgctgggattacaggtgtgagccactgcgcctggcctaggaccctgattctttaaaaacaacaacaacaacaacaacaaaaatggtctttgtaaaaatttttaaatgtcaaaaaaaattggcttaccatcatggctgataaatgaggaatgctgaaagttcaagctgttggttttatatatatatatatatatatatatatatatatatatatatatataaaattatatataaatgtatatatataaataaataaatacatatatataaaatgatctaagtttatcatttatctttgggagttagtcactgttcaagtcagtttctaggttttaaaaaatttttttatagagacagggtctcactctgttgccccggtcagagtgcagtggtgcgatcatagctcactgtaacttgaaactccttggctcaagcaatcctcctgtgtcagcctcccaagtagctgggactacaggtgggtgccaccatgcctggctctctctacaagacaggatcttgctatgttgcccagattggtattgttggaaatcttactcacatttacagtttacttggcctcaagtgatccttctgccttgtcctcccaaagtgctgggattacaggcatgagccactgcacctggtcaagttctagttattttgttgtttcctacattgccttttctcaaattaatctgcttcttggtatattattatagcttcaaggtttttttctttctaaaatattcactaattcacatttcaatactaatgattaggataaagatggtgatagagcagttcaccatgcagcttttggagatgaaggcgctgttatagaagtactacatcgaggtagtgctgatttgaatgctcgaaacaagcgccgacagacaccacttcatattgctgtcaataaaggtcatcttcaagttgtgaagactttattggactttggctgtcatcccagtctccaggtaaaacctttaaagaaacacatcctgcaggtattgctaggatcctattaaagggaaacattaagttctatggtaagcattcctttgttaccgttctcatatgtcatagtaaatgataccaaaggcgtaagatgttacaaaattggc

SEQ ID NO: 19630 - DNA, 2300 bp, Homo sapien
aaattaataaacaatccctcaaatcggtaatgtagattagtcaagaattcaaaaaggaatttattaagaaaactgatcaactgccagtagttcttttgggcatgctaaaagcaggttactataaaactgaacacattttgatcaaaaaggtatactttgtatacctagtatagggaactcaaagttttgttgaatggaagaaatgaataaacaaataatcaaataatcatctttctgaatatactgaggcaaagatattggcaatatatatttgatgcatggttttgttcccaagaggaataatttcctaactcatttcattatcacaaatctgaggagcaatgtggcatagtggtgaagagctcccagtctgaaaccaaattatctgagttcaaattctggctctagccacaatggctagtgacttcagcagattacttaacttctgtgcctcagtttcctcatctgtaaaatgtgagaagaatcacaaatcctactttatagggttgttatgaaaattaaatgagttaatatttataaagggcttagaaagagaacctggcacataacacattatgtaagtgtttgcttaaaaaataagtactttcactgctacaaaatcattaacaaaatggggtacttgagaaaactgaaaattaacctactttatactctgagacatgtcatcttctcataatatgagtaaaattatttcaatatctaggaaagctgtttaaaattgcccaatatctaaagaagtattccttatgccactgttttaaaacagacattcaaaataattaaactgctatgatattaaatgctaaagacaacaagaatgtgaaggacaaacttccgtaggtgagtaagctcagaaaactcgtaatagtttttcttgtttcttaagaggacatatttggattaaaaaacaaggtatagctggtttctcttctgcatttttatgtgagatcttaaactatatctccacaggtttactggacttcatgttttaatattttttctctttgattaaaaaaatttcagtatcaaaatctattgtgaatatgctattaaaatttaaaacaaaagtatttttacctctgagtcacatactatgtaatagagttatagacaggttaatgactatttcaatctgtgtaaagtgtgcaatgatcatgcctaaaagtcacttcagaaaattagagaaacatgacaatgtagaagggacagcaaaaacactacacatttgaatataaagtagaattcataataaaatgcatctgaatacttgtataattactcaaaagcatactggaccctgttttttaccaaagcattataaaaaaaattaactgaaattgacagtgaattgttttaagtagcacttctaagatttcatttacatactactttcttctcccttgatgatgtctctccaccaccaatatacaggtcttacctaccatttctatacattttccattcaataaactttaaaagcatgtatatggcaacaactagctctaaagataaccctacaaaatcctttcaggcctttagatatgtaacatatcaccatccataacattttttatcaatcaaaaaatcaggttataaaatgtattttggcagcagagggacttcacttgttccataactgtctaaagattgtcttgctactagccatggtaatttttttcctctttccttttttctctgcagtgcttctaagtatagtgacagtgcatcaggctttcctagtctcagcgcaagctcagtgaaaatctgggaaatgtaagtggaaacatgagagaccgctttatttggcagtgcttaccccccctcaaaaaaaaaaaagtggggggcaggacaaatggctaagcagtgtttggaccgcaggatgaacaatcaataggcagaaagcaagattgaggcttcctcagcttttggatcgacaatcgacagctgagaggctattttttgctatggttgactaaatatggtcagggaagagagaggcacaagagagcctgtttgcctgggagtgcatgtttcaaatgcttagctgcctataaagctgtaacagtttagccagtggtcactgaggaagaatataagttagcctcgtagtgaccatgtggaagtcctgacctcgcttgcagacttgacctctggatgtgacaaggtagcttcactacagctctactatttaatcctggaaactaaaaaccaaaaaaaaaaaaaaaaaaaatctaaaagcaagaaagatgcagactatttcctaagaagtcagaagaacc

SEQ ID NO: 19631 - DNA, 2300 bp, Homo sapien
cctgggctggagtgcagtggctcgatctccactcactgcaagctccacctcctgcgttcacgccattctcctaaaaacaaaaagtttttaatcaagctaatatatgtacatagttaagtcaaatgttactacaaaacttataatgaaagagaaatgtcttctgcgtcatccctccttaccccttttttgtcccgaccaacaacttggaacttatcctgtaatttcttaatttatcaattataggcatctagtgatttcatgttatggaaaatgaagatttaaaactaataccctctgttactaccattcctttcaacatgattatatcacaatttttgtttaaattaatgacaagtatttacattattatttttacattttgtttttaataaaacgtttttccacttttcacatgatttaatacttgtatcttttaaattttccagaactgtttacccctgtaaattttgtttctcacatgctcaaatgtgtagggtaagagataatgtatggcattaacatcatgactatccaaacatcagtagtataatgtcgtaccaatactttttcccattgagaatctcaaagtctatacaatatctagtattttattttaatttatggaatgaggaggactaaaatccttactagtgactgaaaacaaaagcagaaaaccttagtcttctatgaagcccatgaatgggatttaggagtttgtagactcacccaaaattgtattaataggtaaagattttgacatgcatttctctggaggagagcctatagctttccaaagaagcctgttatccccaaacagtgattgttactcagttacagccatggaaggggctctgtaagctgtgattctcagtatactttgggttcataaacctgtttaaaaagtctaataaaaggccgggcgcagtggctcacgcctgtaatcccagcactttaggaggccgaggcgggtggatcacaaggtcaggagatctagaccatcctggctaacacggtgaaaccccatctctactgaaaatacaaaaaattagccgggcatggtggcaggcgcctatagtcccagctactcgggaggctgaggcaggagaatgacatgaacccaggaggcagagcttgcagtgagctgagatcgtgccactgcactccagcctggtcgacagagcgagactccgtctcaggaaaacaaacagacaaacaaaagtctaataaaagtttccaaatgatttaagtgtaattttagaggttcttcaatcctccacaacccattctcagacttcttgaacttagttctgctcttcggtggttggagtttaaatctttaattctcttttgtataactttctcttttttgctttgaaaatactttattactgatttttaaattttaaatattaaattataatggccattttgtgtgttttgctccagacttggtttaccacttctaaatgacatatgtcaagttttaactttgcaattcatgataaccagctacacaataatcgtcagctaagatggttcagcatatatagtgtattaattatcacagtttttcctacttctaaaaattattatctggctgttcttcattaactctttcattaataaatactgttgatactgaacctgagaggttccccaaagccaaagtggtgccctcattagggtatatttcttttctctttggttttttcctcttaggtttcctccttgtagcacttccattctgttttgattctatttcccagatagtaatagtgtgtctacctctcaaaatatcaaaaagctagctgggcatggtggcatgtacctgtagtctctgtcaaggccagcctgggcaacatagcaagacctcatctcttaaaaaaaaaattaaattaaagctgcacatttgagattagaaaagtagaatttctatttgtctctaagagcatttttttctttaaagaggagtatcttcatttgattgcaaacttttcttttgagtatatcaaattatgcaaatatagaaataatgtgaatttaactttcagtgcaatgcgtgttttactatctaaattaccaagaccatggattgtggatgagaagaaagatgatggttatactgccttacatctggctgcccttaataatcacgtagaagtggctgaactgttggtacatcaggtaagaaaagagttaaataattccctcttttttatttttttttaaacaatttgggaccattgccattcatttatttattgctttataaattgcctattagtaggttccagtaaaac

SEQ ID NO: 19632 - DNA, 2300 bp, Homo sapien
aggaaataattgttcattgtattttagcgaaaagccatttacaaaagaaaatgtttttagaaaattatcatgtccgggggtgttgggcagggggagagagagcattaggacaaatagctaatgcctgcagggcctaaaacctagatgacaggttgataggtgcagcaaaccaccatggcacacttgtacctatgtaacaaacctgcacgttccgcacatgtatcccagagcttaaagtaaaataaaaataaagaaatataaagaaaattatcacgtaagcaagcttataattctagtattagttgacatttgtcaatagtatctctctcctttattctcaagtcttaaaatcttgaaatatttattgtgtcacttatttctttaaaaaacaaatttcacagtttattcagctgtattggaaaatgtcattgttttcataatgatgggctctctattctggaggctaccgatggagaatactcattcttaggttgataacattttaaggaggtagaattgcatattgctataacttgtataacatttatttcagtgtgaaatttaagtcataaaaattagcagagaaaggcaacactcctattaatgttctctcttgtaagaagtgtctgtgttaccgttttccagactgtgctaacctgatgaaaaagtgtgtgcagtgtcgagcagtagttgaacgaagagtgcctttcattatgtgctgtggagggaaaagttcagaagatgccactgatgatatctgtaagtcgattgtcttaagcattttcatattttgcttttttttgggacttgcataaacacctcttctctttcgtaatacactactgccttataaaacctaagatgtctgacttggatccacagtggaacaggtattgttttctggtgctcttattatattataagaaacctgaagttctatttttgtgtgattatggaactgtgaacatcagtcttctgagaaacctgcatgtatgctataaagaatattgttgtgttcttgcataaagaaaatttgtgctctatttttaagatgaaatttagtgtgttttgtcaaggggtgggacaccatattacaatttatttttcagtttactgaaagtattaacctgcttccattatgcaacaggtttatttgcttcatttaagtattttatggaatggtaattatttgggacagagtaactataggtaaacaaaaatgtaacagtgaaagggtggaaaaatgaaaaataaatgatttaccctcaacattttcaatagtacagttgtttcaaagtattttttctctttgcattagatattagctgaatggtttctttgatttctttgttctctgaacatgttttatgagcagatgaggaagagcattagtgtgtagcaacttctgtctgaggcttttgtctttatcacaaatagaacagaataataaaaatctcagggacagattaactagaataaaagaccaagaatctagagaataggaaaagtgaaatcaaagatttccctccatgtttgcatactacagatgatggcctttcttgagttcctcatctcagatcagtaataacgaggaagtttagtcataaagaaaggaggctagatttgtgtacgtcctcataaaaatcatctgagagactttaaaataattattgctgccaaagctgaccaaagccctgctggttactttcttggttcatatggtacaggagcagaggaagcaagcataaaatgtattgatgagcttgccaaaggaagcacgtagagccttggaaaacccagaagtctgtgtctggattgtgctctggctgagataaatataattagaaattaatgtgcaaactgtttctttttggagttcataaatggaaaagtgtaacagaacgtcactactgtatgttgtccaagtgtgagaaaaatttttgaagaggattttaataatagttttatgtttttaataaacaaaacagtaatattttattttataaatgtcattctgtcaaagcaataataactgaaaatctttttaaatctatattatagcaagtgggaatattccagtattacaaaaggacaaggataataccaatgtcaatgcagatgtgcaaaagttgcagcaacagttacaagacattaaagagcaggtaataatgatttcatgtaaacagtgatgctgtgaatggcactgaatattttcccgtaaaactactagtgtttctgtaataagtatggtttatattagtgtatcacttgtattatttgcatatttgcaatgagtaata

SEQ ID NO: 19633 - DNA, 2300 bp, Homo sapien
caggctcgcgccagggctcgatctcctcggggctcagggttggaggccgtacacagcctggacacaaactgagccaaagagtttatttttagcaaataagatatgagtttttagaaaattgcttcgaatagcaaatccgagaaacattatttcaaaacgttggaatcaaaggaaatcaaatgcccacaacccatttccgtcagtgcttacaaatgagcttctgcaaaacccagtccacttaaacatttggtcggaactcacgaaaagaaccaaaagcaaggcattccgagtcctggcgggggttgagcggccgggcggacgcctggctatctcttctgggagtcgcgcattcgatcgcattcaggttaaaatttaaagcccctggatcctgctccagtcgccagcctctccattccagagttttctaccttcagccttttccaaatgcggccacgctgaaactgggagccgccgcagtgattgggggaggcaaagtggaacgtaataaaagtgactaaattggatgagaacggtttctggaccttctcggtagcaatttaaaattcagaagtgtttagaagcaatttacaacgaagaatgaaaaacgaagaattctcgccaacttcctgaattccttgccccctcccccgcactgccaggccctgtcccgctcccccaggagccacaagttcacaactcacagttacgtgcagaggaaacaacgcttagctacgaggtctcaccatctctggaaaccatactttacaaggcacctctccaccccagttcaactctgcacaggctcctcttccttccctaactgggaaaacacgaaaatagaaacaaaacaaaaaaccagagcctaaacgctttctaggagaccgaccttcagaaaatcatttacttggatttacctgggcggggggtagggggtggggtcggggtaaagtataaaaattcattctcacaaaaacaacgcctcttgtcctaaagtctccctcggcagccttctggggtcacgtctgtcggaagaaatcctttctgtaagcgaaagggagcgagacatatatcacggctcctgcagcggacgagcctgcggccgcgcgagttgccgctgacagatcggcgctgataaccccgcgacgttcatttccagtcccttttgcccgctagggaccgtatcagtttgtacagagttgtgataactgtttggagggagcgaagagggggtgtgtatatgaacgtgggggtggggaagcagcatttagcgctgggtccagggaaggtgacaccccctcttcgcagtgacttatctgtgacttacctgaaactctccagggaaatatcagaaactctccagggacatcaaaagttggagagcgtcctcggacacgactgatgtggaagcccttttccattctgcgtaccccatagactacctttccgtacatgacgacccgagttaaagttcccaaaggtcagctggggaatgttgtcttgaggttcccgaaaccaccacgacctgagccgtagcatcccgagatagggtcggagaaagtttaaggtcggtctcacacaacttcagggcaaaaagcgcatttgctgtgaaggggctaggcgggggttggggggcgggggggcgcagagcacgttcccccttccttctgggggcgtgctgacccaaggtctggagcgcccctcccgccgcggcggcggcgcgggactgtgcactgccaactcctcccgtgccaaggctccctccccctccctcgtgtgggtgtgtgtgtgcgactgcgggagcgggagggtgcaccgccgctggatgggtgcgggtcgctagccaggtcaggcgttctgtggcctccgcccctcccccggggtccctgggctcggtgccccccgggtggactcgcccccactccggggacagggcttgcggctcagcccacgcccgcaggcagcgcggctctcattgtctgcctgggcggcgcgctcccctcccccctcgccgtcccctccccaccctcttttctctcctcccctcgatccctcctcctcctcttcacctccagcgcccagctgctcgctgagcgcagttccgacccacagcctggcacccttcggcgagcgctgtttgtttagggctcggtgagtccaatcaggagcccaggctgcagttttccggcagagcagtaagaggcgcctcctctctcctttttattcaccagcagcgcggcgcagaccccggactcgcgctcgcccgctggcgccctcggcttctctccgcgcctgggagcacc

SEQ ID NO: 19634 - DNA, 2300 bp, Homo sapien
acgggttaacaagagcgtaggctgcacgctacctcgcctccactcctttttctagttcaaatgggatctgacttctcaaagatcccatttgagacttctcaaagatcctatttctgccccgggcgtggagatcaataagggaggggaagggagcctgcgcagccgccacagggccctggaagggctgggataccagccctccctcaaaggcaccgctccggtccccgcgtcctccccgcccaccccctcggccgcatcctttctccgtgcgcgcgccagatcccaggggtgatctgcagaagctggctgaggctttccttccgccctaaagtgtctcccccgggctgatgacacacaaaagaatttaagtagctgtgcgtgtcggcaccgccgcatcccgcctctctgcggatgcccctctcccgaaatgcctcggggtgagggttccccacgggaaaacccttcgcgtaaggaaggcaacctgtccccgaaaacgaaaccgccgcgttctcctatattggctctcccagagcttcccggactgcgctgaccagcccgaacgcgagccccagagagaaatgcaactcggcccagggaaagtgggacgccagggcgggggcagcagtctgggtccttcccagcagaggcaatgcggagagcttgtggggcgggaatcgccagccccaccggcgtccccgcggcgccgcacaccttagacacggcccgcgcctgcagccaccagcgtgcgcgctcacgccggccgggccacccggcccaccccgcggtcatctccagcagcagaaacgccggaccgttccggaatcggacgtagcggggtggagcggagagcagagaaaaggagggggaacgcaacgggctggggaggggggagcgtgagaccgccccagagccgaggcgaccccaaatgggagagcaggaagaatgacagggagactcggagcgagtgggggagggaggtgaaatgcagccgggctggcctcctccaggctgctcttccaaatcgcctcggctcatcggagattaccacactaaaattaatgcccacacacagacctggctagatagcaagaaagaagtttctctgcctgcctaactaccggctcccgcccctttgcgccgagataactcggagataaggctgcgcgcagataagcgcttcgaggagagaaaaagagactagaagttggtccgcggtgtcccgggagcctgggagccgcctcagcccgcccggagggaaggagggaaacaccgtcggagccgaccgcggcctggagagggccggagagccggaggccaggggcccgcgacgagtaggggtggaggggaggaaagcggggagatcgcgcgaggaggaagcagccgaacctcgggcgggcgctgcgcatggagaacggccgcggcggagggtgctcccaggcgcggagagaagccgagggcgccagcgggcgagcgcgagtccggggtctgcgccgcgctgctggtgaataaaaaggagagaggaggcgcctcttactgctctgccggaaaactgcagcctgggctcctgattggactcaccgagccctaaacaaacagcgctcgccgaagggtgccaggctgtgggtcggaactgcgctcagcgagcagctgggcgctggaggtgaagaggaggaggagggatcgaggggaggagagaaaagagggtggggaggggacggcgaggggggaggggagcgcgccgcccaggcagacaatgagagccgcgctgcctgcgggcgtgggctgagccgcaagccctgtccccggagtgggggcgagtccacccggggggcaccgagcccagggaccccgggggaggggcggaggccacagaacgcctgacctggctagcgacccgcacccatccagcggcggtgcaccctcccgctcccgcagtcgcacacacacacccacacgagggagggggagggagccttggcacgggaggagttggcagtgcacagtcccgcgccgccgccgcggcgggaggggcgctccagaccttgggtcagcacgcccccagaaggaagggggaacgtgctctgcgcccccccgccccccaacccccgcctagccccttcacagcaaatgcgctttttgccctgaagttgtgtgagaccgaccttaaactttctccgaccctatctcgggatgctacggctcaggtcgtggtggtttcgggaacctcaagacaacattccccagctgacctttgggaactttaactcgggtcgtcatgtacggaaaggtagtctatgggg

SEQ ID NO: 19635 - DNA, 2300 bp, Homo sapien
tgttgtcttgaggttcccgaaaccaccacgacctgagccgtagcatcccgagatagggtcggagaaagtttaaggtcggtctcacacaacttcagggcaaaaagcgcatttgctgtgaaggggctaggcgggggttggggggcgggggggcgcagagcacgttcccccttccttctgggggcgtgctgacccaaggtctggagcgcccctcccgccgcggcggcggcgcgggactgtgcactgccaactcctcccgtgccaaggctccctccccctccctcgtgtgggtgtgtgtgtgcgactgcgggagcgggagggtgcaccgccgctggatgggtgcgggtcgctagccaggtcaggcgttctgtggcctccgcccctcccccggggtccctgggctcggtgccccccgggtggactcgcccccactccggggacagggcttgcggctcagcccacgcccgcaggcagcgcggctctcattgtctgcctgggcggcgcgctcccctcccccctcgccgtcccctccccaccctcttttctctcctcccctcgatccctcctcctcctcttcacctccagcgcccagctgctcgctgagcgcagttccgacccacagcctggcacccttcggcgagcgctgtttgtttagggctcggtgagtccaatcaggagcccaggctgcagttttccggcagagcagtaagaggcgcctcctctctcctttttattcaccagcagcgcggcgcagaccccggactcgcgctcgcccgctggcgccctcggcttctctccgcgcctgggagcaccctccgccgcggccgttctccatgcgcagcgcccgcccgaggttcggctgcttcctcctcgcgcgatctccccgctttcctcccctccacccctactcgtcgcgggcccctggcctccggctctccggccctctccaggccgcggtcggctccgacggtgtttccctccttccctccgggcgggctgaggcggctcccaggctcccgggacaccgcggaccaacttctagtctctttttctctcctcgaagcgcttatctgcgcgcagccttatctccgagttatctcggcgcaaaggggcgggagccggtagttaggcaggcagagaaacttctttcttgctatctagccaggtctgtgtgtgggcattaattttagtgtggtaatctccgatgagccgaggcgatttggaagagcagcctggaggaggccagcccggctgcatttcacctccctcccccactcgctccgagtctccctgtcattcttcctgctctcccatttggggtcgcctcggctctggggcggtctcacgctcccccctccccagcccgttgcgttccccctccttttctctgctctccgctccaccccgctacgtccgattccggaacggtccggcgtttctgctgctggagatgaccgcggggtgggccgggtggcccggccggcgtgagcgcgcacgctggtggctgcaggcgcgggccgtgtctaaggtgtgcggcgccgcggggacgccggtggggctggcgattcccgccccacaagctctccgcattgcctctgctgggaaggacccagactgctgcccccgccctggcgtcccactttccctgggccgagttgcatttctctctggggctcgcgttcgggctggtcagcgcagtccgggaagctctgggagagccaatataggagaacgcggcggtttcgttttcggggacaggttgccttccttacgcgaagggttttcccgtggggaaccctcaccccgaggcatttcgggagaggggcatccgcagagaggcgggatgcggcggtgccgacacgcacagctacttaaattcttttgtgtgtcatcagcccgggggagacactttagggcggaaggaaagcctcagccagcttctgcagatcacccctgggatctggcgcgcgcacggagaaaggatgcggccgagggggtgggcggggaggacgcggggaccggagcggtgcctttgagggagggctggtatcccagcccttccagggccctgtggcggctgcgcaggctcccttcccctcccttattgatctccacgcccggggcagaaataggatctttgagaagtctcaaatgggatctttgagaagtcagatcccatttgaactagaaaaaggagtggaggcgaggtagcgtgcagcctacgctcttgttaacccgtcgatctcctaccatacccgtctcccccaccccacctcaggagctagacgtcagcttggagcggc

SEQ ID NO: 19636 - DNA, 2300 bp, Homo sapien
acttctacttcatctttccagaagtagaatgcataccctattgttctaatttgcttttttttaattagtgaagttgagtatcattttatctgttcactggacattttatttccctcctctagaattgcctgtctcttcgtacatacttttgtctactgtttctactcaattaactatatttttattaatgatttgtagttcttttgttttttcttttgagacaaagtcttgctctgttgcccaggctggagtgcagtggtgcaatctcagctgactgcaacctccacctcccaggttcaagagattctcctacctcaacctcttgggtagctgggattacaagcgtccaccaccacacctggctcatttttgtaattttagtagagtcggggattcaccatgttggtcaggctggccttgaactcctgacttcaagtgatcctcttgccttggcctcccaaggtgctgggattatagacatgagccaccgcacccagcctagttctttatatattctgaatattattcctttgtcaatttatatgttgcatatattttccaaatctgttacttattttgcttataacggttttgtcacccagaggcctttaaattctaatgcagtcagcttgttgtcttttaataatgaaaatataagaactatacaaatatgcgggcggaagatggcaaagggagctggtgcttgtgcaagttgttgaggtgtgctctgtggaatgatggctgtcacagacactgtcaagcaggaggttgccctggctgtgcacatgctgcaaagcatgcatgtgaacgtgattctgatcacgggggacaactggaagacagtcagagcctttgccacccaggttggcatcaacaaagtctttgcagaggtgttgccttcacacaaggtgaccaaggttcaggagctcctgaatgaagggaagaaagtcgccatggtgggggacggggtcaatgattccctggccttggcccaggcagacttgggcattgccactggcactggcacggatgtggtcatcgaggcagccaacgtcatcctcatcaaaaatgatttgctggatgtggtggctagcattcatatttccaagatgactgtccagaggatatgcatcaaactggtcctggcgctgatttataacctagtgggcatacccattgctgcaggagcaagctttccagatgagttgaagatatgtgcatgggcgggagatgatgacttattgcagggcaaggcgtcatccgtgttgaaggagtgccagtgtttcagaaatggacacagagcaggtaagtttgatggacaggtaagagaatcactctctatgtgccagcactgttctaagagtcctggatcttctggggatgagattagcgtttttcagttgtacatgggacagctgaggctcatgctagggagtggtgagccctttcctggaagaagttaatctaaaaagcataatctgtctcatttgggaggagctaaataaatatctcttcaatgaagcaaaggtcaatcagaaaatttgtattttagctataaaattacctatcagaatttaccatagggcataatcttagtcaagcacccaaattcattatttcagccacagatactgaaacaccaaagggataagggggcaggtatttcagttagctactgctgcataacaaatgaccccaaagcttagtgacttaaaacaatgatttgttattccttatcattctgtcagctgggaggttcttctgcccgccccacctggggtcatgcacaaggctacatttagctagggtgtcagcttgggatgggcatagctgggatgctgggtcacctgagtctttctcaccatgtggtactgttttaaaatataggttttagcgcttcctcaggatgtaaagtgtaacaaaggtaccggggtgggcagtgtgggtctgtgaggcctacgggtgcccgcgtcccctaactccccccgcagccggctccgcagtggtacgctccggttgcccgttagggattcaggttccaaacggaatgctgcgtcttctccagcgtttgttgtggccgaggttactgcagcaaccgccagagcagccttggcgctacggaggagcctagggctaaccctcagccatacctggggctggtcctggagttgctacgcagggttgtggcagcactgactgaaggtatgagacccgattctcatccttatggttttccatgggaattggtgatacgtgcagctgttgctggattttttgctgttctcttcttgtggagaagt

SEQ ID NO: 19637 - DNA, 2300 bp, Homo sapien
gtaggtttggtggagaactccaggcagagacaatagcacgcaatggcctaggagacatcaaaagtctagtgagaccagaggacagaaaatgtctggaaataaagccaaaggggtagcagaggcaattcaaaggggcttccttcacagagtaactggaagccactgaaagggtttaagcagcatagtgacattaacagatttacttttcaagatcacagtagctgcagtatagagaagtggtctcaaagtagacacaatttaaggtggaggagggaagatgtatttttattctattttttatcctttaaaaatgcttttaaaatggattataatcatattagctaagaaatactaattatggctagcttttgggcacatagtatatatctgaatactaagcagtttacatatattcatttaatcttaataccctgtgaggttggtactattattatcctcaatttacaggtaggtaaaatgggacagcgagcttaagcagtcagtccaaagtcactcagtaaggaagtattagagcaggatttaaacccagatgtctgacttcagagcctgtaacttcattagatcatgtaccatttttcaacagtacatgtatgtaatttaaaattaaatatatatatggagaatagaagttcaaatttttttctgaacaccagtgaaaacaaagatttaggaggggtggttggtagcgtggatgtggaaaggagcctagcagtagactaggtaagaaataacagtatcttggattatggaggtagtgatggagagaaggggatggatttacatgtttagtaagtaaaattggactgcgtgatggcttggatatggaagttagggatgaataaagtgtcaaggatgactctttggtttctgacttgcataaatggattagagagtgagacacaggcagaggccataggaacaggttgggtcattctgctcagtttttctttggaccacagtagagaccacagcacactgctctttcaatactctgttaaatgacaaacttattacaggttatttctgtcataaacataaaagcttcactctgtcaattatgtttcctatcttgcgttaaaaattacatagtcaaaatttcatccattttcttttaaaaatgtggagttaagtcttataaaatggggaagtgaatgatagttgctgtaacaggctaatagaaggtttagcacccctcttctgtatactaactttttaagttatatttattcatcccttaagatgtgggacaggtggaaaaattacctttccactttgtatttatgatttctaagtactaaacttttaaagcctgttaatattatcccttcccaggtcttagaataattacacaaaagtactggactggtttaaaagatatttgattctagtctattttgttcatttgtagaatttctagtggtctaaaaacgattcttttacaaatcaggagaaataggaatacctactatcggtttgaatctcaaacgaacagccacaagaaaaatggactttttaaaaaaaattatctaacagcatgttgtcccaataaataatgctgaaggagattccttctcgtttcaaatttgccagaaacttcccgtttaacctcagcaaaatacagatcgttttgatctatggcgttaccgcacaaccctgtcaggtcacatcactaaactgcagataacagcgacaaggccgaaaactatgttagacggatccgcgtccataccccccatcagttaattttaactcttcattcggtacaggtcactctacacatgcttccctgcaaaatgcttaagctagacacagtgtacagataactttcacagaaccgcaagggcttgatgctcccccaacagaacggcttgagctttccccagcgcaattcagaaatgctgtggcggtcgccagactcttcgggtagctcccggcagctccgaggtagcgctcccctccccaaccatcgccctccgggatgggccgcaccgaagagcccgctcctcagctagggcacgaagtgcgccgccgcgatgggcagctggaggaaggggcgtgacgcaagtggaactcccgcgtgacgtcgcgcgggctcccgggcggggcgggtccggccgcctccgagcccggccggcagcccccggccttaaagcgcgggctgtccggaggggtcggctttcccaccgaggatttggcactctggtgagggaaaagggcgaaagagaaaagcgagcagccgtcctttcacagcctcagaaagtgctcgcttcccttcgggg

SEQ ID NO: 19638 - DNA, 2300 bp, Homo sapien
acccagatgtctgacttcagagcctgtaacttcattagatcatgtaccatttttcaacagtacatgtatgtaatttaaaattaaatatatatatggagaatagaagttcaaatttttttctgaacaccagtgaaaacaaagatttaggaggggtggttggtagcgtggatgtggaaaggagcctagcagtagactaggtaagaaataacagtatcttggattatggaggtagtgatggagagaaggggatggatttacatgtttagtaagtaaaattggactgcgtgatggcttggatatggaagttagggatgaataaagtgtcaaggatgactctttggtttctgacttgcataaatggattagagagtgagacacaggcagaggccataggaacaggttgggtcattctgctcagtttttctttggaccacagtagagaccacagcacactgctctttcaatactctgttaaatgacaaacttattacaggttatttctgtcataaacataaaagcttcactctgtcaattatgtttcctatcttgcgttaaaaattacatagtcaaaatttcatccattttcttttaaaaatgtggagttaagtcttataaaatggggaagtgaatgatagttgctgtaacaggctaatagaaggtttagcacccctcttctgtatactaactttttaagttatatttattcatcccttaagatgtgggacaggtggaaaaattacctttccactttgtatttatgatttctaagtactaaacttttaaagcctgttaatattatcccttcccaggtcttagaataattacacaaaagtactggactggtttaaaagatatttgattctagtctattttgttcatttgtagaatttctagtggtctaaaaacgattcttttacaaatcaggagaaataggaatacctactatcggtttgaatctcaaacgaacagccacaagaaaaatggactttttaaaaaaaattatctaacagcatgttgtcccaataaataatgctgaaggagattccttctcgtttcaaatttgccagaaacttcccgtttaacctcagcaaaatacagatcgttttgatctatggcgttaccgcacaaccctgtcaggtcacatcactaaactgcagataacagcgacaaggccgaaaactatgttagacggatccgcgtccataccccccatcagttaattttaactcttcattcggtacaggtcactctacacatgcttccctgcaaaatgcttaagctagacacagtgtacagataactttcacagaaccgcaagggcttgatgctcccccaacagaacggcttgagctttccccagcgcaattcagaaatgctgtggcggtcgccagactcttcgggtagctcccggcagctccgaggtagcgctcccctccccaaccatcgccctccgggatgggccgcaccgaagagcccgctcctcagctagggcacgaagtgcgccgccgcgatgggcagctggaggaaggggcgtgacgcaagtggaactcccgcgtgacgtcgcgcgggctcccgggcggggcgggtccggccgcctccgagcccggccggcagcccccggccttaaagcgcgggctgtccggaggggtcggctttcccaccgaggatttggcactctggtgagggaaaagggcgaaagagaaaagcgagcagccgtcctttcacagcctcagaaagtgctcgcttcccttcgggggctttcgcgaatcccgaggcaatctcggaggcggtgagtaaaagcaatctctttaccccacccggagctctgggtcggagcgactgcttctggtctggagctgcgtgcttggcgaagggctcccggggtaggggtggctcccggctctggggttgtgtctgatgaaataggccgggcccgggctacactcggtggtggtggaccggcgggaggacgagcgctacctcagtactacttctgggtctcccgcgcgggctgaggaagcgcctttcgccgccaagcccgccccgcgcatgcgccgactgcggctcgcgcgcgcgcttcggaggttttttggccagacccgcacgcggaaccggcgcgggcacctggggagaaatggatggagaagggacctggctggaaagcctttgccccgctgctctgctccgcccataagaggacccctgaaatgtcccgtgcagtttgttcaagtcccctgtgtgatgaaatgtgcctctcgccttacccgtgtgagaatacctgtggtgtggcagcgagtatt

SEQ ID NO: 19639 - DNA, 2300 bp, Homo sapien
ttcatttgtagaatttctagtggtctaaaaacgattcttttacaaatcaggagaaataggaatacctactatcggtttgaatctcaaacgaacagccacaagaaaaatggactttttaaaaaaaattatctaacagcatgttgtcccaataaataatgctgaaggagattccttctcgtttcaaatttgccagaaacttcccgtttaacctcagcaaaatacagatcgttttgatctatggcgttaccgcacaaccctgtcaggtcacatcactaaactgcagataacagcgacaaggccgaaaactatgttagacggatccgcgtccataccccccatcagttaattttaactcttcattcggtacaggtcactctacacatgcttccctgcaaaatgcttaagctagacacagtgtacagataactttcacagaaccgcaagggcttgatgctcccccaacagaacggcttgagctttccccagcgcaattcagaaatgctgtggcggtcgccagactcttcgggtagctcccggcagctccgaggtagcgctcccctccccaaccatcgccctccgggatgggccgcaccgaagagcccgctcctcagctagggcacgaagtgcgccgccgcgatgggcagctggaggaaggggcgtgacgcaagtggaactcccgcgtgacgtcgcgcgggctcccgggcggggcgggtccggccgcctccgagcccggccggcagcccccggccttaaagcgcgggctgtccggaggggtcggctttcccaccgaggatttggcactctggtgagggaaaagggcgaaagagaaaagcgagcagccgtcctttcacagcctcagaaagtgctcgcttcccttcgggggctttcgcgaatcccgaggcaatctcggaggcggtgagtaaaagcaatctctttaccccacccggagctctgggtcggagcgactgcttctggtctggagctgcgtgcttggcgaagggctcccggggtaggggtggctcccggctctggggttgtgtctgatgaaataggccgggcccgggctacactcggtggtggtggaccggcgggaggacgagcgctacctcagtactacttctgggtctcccgcgcgggctgaggaagcgcctttcgccgccaagcccgccccgcgcatgcgccgactgcggctcgcgcgcgcgcttcggaggttttttggccagacccgcacgcggaaccggcgcgggcacctggggagaaatggatggagaagggacctggctggaaagcctttgccccgctgctctgctccgcccataagaggacccctgaaatgtcccgtgcagtttgttcaagtcccctgtgtgatgaaatgtgcctctcgccttacccgtgtgagaatacctgtggtgtggcagcgagtattttggtgagcacctgcagtgtagtggtttatactaaggaatacacacaaattacaggcctttgagcccagaatgcaacttgggaggtaagacgtgacgttctgagagattgaaaaatgtacattgtcgtcgtgcctcgaataacggttcattgcagagagagatgctaacaaaaagtgccgggcatgcgggtaggtggaaagggttttgcgagccagaatttgcaagttgaatgttttgtttttatgttttgtttttaaggcactgtacatcacttacttgaagatagatacgtaaaggatgcttattttacactctttaaacgaatatgttaatactttttcggtcattgaagtaattaaaccttcattttaaactgttgacttaatagaaatcgtttatgtcttctttttttttctttttgctgcagagaggtattttttctttattttattattattttttatactttaagttctagggtacatatgcacgacgtgcaggtttgttacatatgcatacatgtgccatgttggtgtgctgcacccattaactcgtcatttactttaggtatatctcctaatcctatccctccccccaccccacggcaggccccggtgtgtgacgttccccttcctgtgtccaggtgttctcattgttcagttcccacctatgattgagaacatgcgggctacagagaggtattttacagttattggtctcatgacttgatttccatccctgacatagccatgtcccagctgtgtgaccttggacatttactgccttacgcctcttcccccaactctaaaatgaaattatagtagctgtcttacagagtttttctgaaggttaggtagaatataaatattctat

SEQ ID NO: 19640 - DNA, 2300 bp, Homo sapien
actccactggatattttcaaaggatacatcttaggtaaagggaaagagcatgcaattaaaaaactgatttcaaaaattctcatcactttaaaatattatgggacctaaagaatagaaaatttttgcaaatcatatgtctggtaaaggacttatatctaagatatataaagaactctcacagctccataataaaaagacaaatatcccaattaaagatgggcaaaggatctaaatagacagttctccaaagaagatatacaaattgccaataaacatgaaaggatgctcaacatcatcagcagtcaaggaaatgcaaaccaaaaccacgagatggcaaaaatcaaaaagctataacaagtgctagtgaggaggtggagatactgggaccctcacatactgctggtgggaatgtgaaatggtgtagctgctttggaaaacaggcagtctttcaaaaggtaaaatgtagaattggcatatggcccaacaattccactcctaggtataatccaagaaaaatgaaaacatacatccacacaaaaacctgtatacaaatgttcatagcagcattgttcataatagcaaaaaagtgacaacttgaatgtcagctaataaatacctaaaatatggtatacttatgcaataaaaaattatccaataaaaagaaataaaatattgatatatgctgtaacacagataactgaaaacattatgccaagtgaaagaagtaacaaaagatcatatattaaacgattccatttatatgaaaactcccagaataggcaaatctacaaagagagaaagtagatttaaggtgcctaggactgcagagggtatatggggaaggaaagtgatgaaaatgttgtaaacctagactacagtgatggttgtacaactctgtgggtataccaaaccactgaattgaacattttaatgggtgatttttatggtatgtgatttatatttcaattaaaattttttaaaattaaaaactataacattgatggggttttcaatatatgtagataaaatacacaggaactacataaagtgtagttacagaacatgaaatagtacattaactccaagtagattgtaaaaggctaagtaggtagatactgtaatccctagagcaaccatgaaaaaaataaaaacaaaaagctcaaaaaaaatcatgaatgatagtgaaaaaaatgttttcatatagagactaaaacactcactggaaaaacaactaatgactgtgcttcaggaaaaagggaaaataaacccagaataaaggaataacttgccaatgaagaatacaagaaaaaatactgcacttgaactacagaaatgtttggtggctgaaaaaaaaaattacttttttaaagatagcaggctgggcgtgggtggttcacacctgtaatcccagcactttgggaggccaaggcaggcagatggcttgagtccagtagttcgagaccaacctgggcaacaaggcgaaacccagtcacttcaaaaaataaaaaaatcagctgggtgtggtggtgcatgcttgtagtcccagctatccagggggctgagatgggaggatccacctgagcctgggaggtcaaggctgcaagtgagccgtgatcatgccactgcactccagtctgggtgacagagtaggaccctgtctcaaataataataataataataataaaatatagcaaaattatgaaaagatgcctatatatcttaaggcaaacaattttttttttcttttttttttttgagacggagtcttgctctgtcacccaggctggagtgcagtgcagtggcacgatctcggctcactgcaagctccacctcccgggttcacaccattctcctgcctcagcctcccgaatagctgggactacaggcgcctgccaccatgcctggcttattttttgtgtttttagtagagatggggtttcaccacgttagccaggatggtctcgatctcctgacatcgtgatccaccagcgtcggcctcccaaagtgctgggattacaggtgtgagccaccgtaccgggccaacaatgtttttaaaggagtttaaaaacgtatataagtggccgggcgcagtgactcacgcctgtaatcccagcactttgggaggccgacgctggtggatcacgatgtcaggagatctagaccatcctggctaatgtggtgaaaccccgtctctactaaaaatacaaaaaaaaaaaattagccgggcatggtgggcgcctatagtcccagctactcgggaggctgaggcaggagaatggtgtgaacccgggaggcggag

SEQ ID NO: 19641 - DNA, 2300 bp, Homo sapien
aagatttagaaaaacaaaggaagtcatcattgctttataagagcaaaagtggaaaccacaaatttattaaatgcacaggtttaaaagtgtacagtctctccatcaaattgaacactatgtagtcattaaaataaaaattcttccatgcagaaaaatattctacatggaaagataatcacaacacagcaggcaaaaatcacaagagacaaaacagcctggctgggcgtagtggctcatgcctgtaatcccagcactttggggggccgagacgggcggatcacgaggtcaggagattgagaccatcctggctaacacggtgaaaccccgtctctactaaaaatacaaaaaaattggcggggcgtggtggcgggcgcctgtagtcccagctactcggggggggctgaggcaggagactggcatgaacccgggaggcggagcttgcagcctgggtcagacagcaggactccgtctcaaaaaaacaaaacaaaacaaaacaaaacaaaacagccgatttcacttttgtttaaaaacacacccaaggccaggtatgacagctcatacgtgtaatcccagtgctttgggaggccaccatgggaggactgcttgaggctggaagttccagaccggcccgggcaacatagtgagacttcatctctacaaaaaaattttttctttttcttttcttttttttttttttttttgagatggtgtcttgctctgtcacccaggctggagtgcagtggcacgatctcggctcactgcaacctccgcctcctgggttcaagccgttctcctgccctcctgcctcagcctccccagtagctgggattacaggcacgtaccaccatgcccagctaatttttgtatttttagtagagacagggtttcaccatgttggccaggctggtctcgaactcctgacctcgtgatctgcctgcctcggcctcctaaagtgctgggattacaggctttagccaccgtgccaggccaaatttttttaaaaaaattagccaggtgtggtgggtgccggtagtcccagctattcgcgaggctgaggcagagagaatcgcttgagctcaggagtctgcagtgagctatgatcacaccagtgcactccagcctgggtgacaggctaaaagaatatatatacatatctctctataaaatatatgaaaatacaaaacagaaatcaaaatttaagttttacgttatttccacagaagatattgttagtgataccccctttttttttgctcctctttgcttatcttatgttctgaaattaacatttatcatttttgaatgatggaaaatatattttacaggagcaccgttggagtctttcacttaacactgcctcccaaccaggccagtggtcatgtaaattaagtcaattgtcataaaagggcttggaagtttcaaggtagttagccaaaataattaaaatcctggtgaaatttcacagagctggccattgagctttgactccactgacatgaggctgctgtaaacagacaccaggctccatgttttcaaaaggcctaaaaacagcacaaaataaaatataacaacgattgttcatgtaaagggccacgtgccatctctgtcctgagcaaatgtaacctgaaaccctctctgtctggcactccgggttggcggcacctctctggacggtgtatttgctctccattactcaatttactttcctgaacttgaaatggagtggaatttcaatgtagagttacccattagctccagggctaaatttaaacctttaattaaattaatccgttgatctgaaacacattgcttctccctcaaaagtgcagcaggtttcttaggtgtcacagagcttaattcagtgtggcaattgttccttactgcatttgttaagttgcccataccgcctggggaaacccgcacacgttttcagatccctccaggtgaactcctccaccctgtccccgcccccgcccccacccccaaccaaaacaagcattcgttgtgggtggggactgcgactcctcccagattcagagctactgctctgggagggccgtcaggaacccgtatttatagaagacatggtaggtgccaaacgtgcttatgagataaacgacagggtaactgtccacattggtcccagtttatgagggagaagagatcataatctacaaaaatttgcaaggtgaccaggggaaaagagtgtaaggtcattttagcccacctgggtcttcacagaaaatggagcacatttcagagccaaagtaaaaaatttgcgttgtcctttgctaagagag

SEQ ID NO: 19642 - DNA, 2300 bp, Homo sapien
aaacacattgcttctccctcaaaagtgcagcaggtttcttaggtgtcacagagcttaattcagtgtggcaattgttccttactgcatttgttaagttgcccataccgcctggggaaacccgcacacgttttcagatccctccaggtgaactcctccaccctgtccccgcccccgcccccacccccaaccaaaacaagcattcgttgtgggtggggactgcgactcctcccagattcagagctactgctctgggagggccgtcaggaacccgtatttatagaagacatggtaggtgccaaacgtgcttatgagataaacgacagggtaactgtccacattggtcccagtttatgagggagaagagatcataatctacaaaaatttgcaaggtgaccaggggaaaagagtgtaaggtcattttagcccacctgggtcttcacagaaaatggagcacatttcagagccaaagtaaaaaatttgcgttgtcctttgctaagagagagatgaaaagtgacaataccatggattggggatgcgtgagttcgttggccacatgtaagatgttcgtgcttctgggctcttatgcatcccaaggcgtgcatttatcccgggggctgcatccttggcctgggaatgaatagacccaactgcaatggttgttagcgatagctttacggtgggacagtctccataggggctgtggacttacccgtgttattatgaaaaggatctatttacttctcggggaccaacggccttgcggggtccaagtaactcgctcgcagtccaaaactctgcaacgctccacataaccgtcctgtagacccacaactctcccaggagcacagccccaggacctaacccaccgggttctgctcgctcacccaattcccagtgcgagcgcgcgggggaaacgtgctcgcctcccgcacctggcttccgcggccccgggagtcgccaactctcccagcaggcagctccgacaacccggacagccgggccgatcccccgccccaccacccgctcggctctcgcgtcctcctcttcctcctcccgtggccccttgcctcccgccgtctgcctctgcggccgccgcctgcggctttgttttcctcccaggtcgcattccccacacgtgattccgtgttattgcaaagagggctttggagcgcgagcgcggggcgcgcgcacctataaatacggacacccggccccggagcccgcgagccagcggccaggcgaccggcgggcggccagccagcgagccgaactagccgagctaggtagcgaggcgtgcgcgtgggccggggcggcggcgcccccatccccagcaccgaggggcgagcatggcccgcccgcgggggggctggaccgccgcgcacgccgcccgatccccgcgccctacccagcccgggtcgccgccgctcgcgcccgccgcttagcgctcgggcgccgctcgcttctccgggcatcgcggaaatcccgccgcagacggacacaatggcggcggcggcggcggccgccaccacggccgcctgcagcagcggcagcgccggcaccgacgccgcgggcgccagcggattgcagcagccgccgccgcagccccagcctcagcccgcggccgccgcgccggcccagccgccgcccgaacccccccggaagccgcgcatggacccgcggcgccgccaggctgccctctccttcctcaccaacatctcgctggacggccggctgccgccgcaggacgcggagtggggcggtggcgaggagggcggcgcggccaagccgggcgccggcggcgcctgcggcgcgaggactcggttcagcttgctcgccgctgccgagcggggcggctgcatcgcgctcgccgcgccgggcacgccggctgcggggttagccgctgggtccggcccctgcctcccacagccctcgtcgctgccgcccttgattcctggcggccatgcgaccgtgtccggccccggggtggcgcgggggttcgcgagtcccctgggcgccggccgggcgtcgggggagcagtggcagccgccccggccggcgcctctcgccgcctgtgcccaactgcagctgctcgacgggtccggggccgccgggcaggaggagttggaggaggacgatgcctttatcagcgtgcaggtgccggcggccgcctttttgggctccgggacccccgggagtgggagcggcagtcggggacgcctcaactcgttcactcagggaatcctgcccatcgccttctccaggccgacttcgcagaactactgctccctggagcagccagg

SEQ ID NO: 19643 - DNA, 2300 bp, Homo sapien
ctccatctcaaaaaacaaaaaataggccaggcaccatggctgatgcctgtagtcccaacactttgagaggctgaggcgggcagatcacttgagactaggagtttgagaccagcctggccaacatggcaaaaccccatctctactaaaaatataaaaattagctgagtgtgatagcacacacctgtaatctcagccacctaggacgcggaagcacaagaattgcttgtaaccaggaggcagaggttccagtgacccgaagtcacaccacccactccagcctgggtgacagaacaagactgtctcaaaaaaaaattgtagaaatgtcccaaatcagatttcatttattcaatttcagttgaacacatatagtcttctaattaaaaaaaaaatctagagcaagatcattagctttttcaaacaatttctagttcaacttgcacatgtttgtatctgattgccaagtgctgaagtctgagtgatctcacatgtgaagaagatgccttctggaaacctcataatcatgtgccgcggtaactaaacaagcacccggtgtgctgtccatttgttcttgctcggcaagtcaaattaaggctgaggtgcagtctccacatacagcagcagttatgtctttctcccattttattggtggtttttcataatagcgtgcctgtttaacttgatcatctaccgagccatagggaaattgcacatcccacatctgccgattccttaatcttcttgagcctttgttatcatctgtaaagagggggagacgatatttaacaatcgggtgcctcgtagtgtgactgcgaagagcaaatctgagatctctgtaaggcacttacagtacctagaacatagttctcagtaaatatctaatgggactcttgtatcccatatactctgttggtgccgtacagattttgtaggggctgatgtcaccatgtcagcaagggatttgaactttagagaattgagttttctcaccaagtcatgtagagcagggatcccttctaacggaagcccatcctctcccactctgctctcttgccttttgacacgtgtgacattttatctaaacaaattttgtgaccttcctgaacaaaacaggttgttttaggatgggccagtgtttctggacacctgtactgttcaacacttgcactgtctaagaacatacgctgatattcatgtcatttacccatccagcccctgttggtgggaagctgctatgtgtgtacagaatgactaaaccagacttttttatttgaccctgtttgctacaaacgtaattgaataattggggcctggcagatcggaagcaataggaacaatatatttcaatccagtactctgtgagcagcagcatttcacagagccagaaataatttagcctgtagagcttattaagaagtgcaatgttcgttatgcgtaacttcagttctgttagagccaagaaaataaaagtcaaggctgaaatataaggaaatgaataagatacatggaggctggtgagatctggaataaaaaaaatatttacataggagttcagctttgattttatattgtcacaaattggtaccagatgcctgcatttcagacagactcctgagctgatcccagagtgtgagttgggaaacaaatcactttgccatttggaaggctgattgatattttaggagtttctttttgttttcaaagggaaaataatgcatattatagacctagcaaacagaacttttgtaaatggcaattaacagaagatgcccaagtgaggaagtctccagtttctttttataaccctggcaaaagtaatggaggtgacattttattagcattggcatctcccgcttacaatgggagctagttcagccttgttgagccgtgtccagagctggtagcttcatttccattttccttcaacctcagggagaaacacaagggtatttctgtctggggcggcaggacctcatgtggtctccacgtggcaggatcctagaatcacggggtggcagtacatattttcccctatggctttaagaaaatggcttttcattttgagtcttaggtttggtctcaacagtgcttgcttagcctccaggccatttttcttcctggtgtttgaatgactcataaaatgagtttggagtggtctgaagcctctgcctccttccttgaatgctttctaagaggggctgccatgcaagaatatatgctgattttcccatgtaagttgtcagaggatcgcctgggtgacccagagagctgagtctgtttttttggctcccccctttggatgc

SEQ ID NO: 19644 - DNA, 2300 bp, Homo sapien
tcaccaacaataaacccagtaggtgtttaggataagaattcatttctcctaagaaaggggagcagcaaggagaggtggtctcatgcagcattagaaagaacccaggctggctgctgtggctcacgcctgtaatcccagcactttgggaggctgagatgggtggatcacctgaggtcaggagtttgagaccagcctggccaacatagtgaaaccccgtctgtactaaaaatacaaaaaattagccggccgtggtggtgcgcgcctgtaatcccagctactcaggaggctgaggcagaagaatcgcttgaacctgggaggcagaagttgcagtcagccgagatcgtgccattgcattgcagcctgggcaacaagagtgaaactccgtctcagaacaaaacaaaaaaacaaagaaagaaagaacccagcagctagatcccagcaaactgtggtcccacgatgcccagggaatgctctctggcctcatgttcattggccgtctctaggaatataaggggcctcatggaagagggagggatgtctgtaaaccatcagcttcatcttcaggctttctgttcagttggatttcatttatgtcaaagtggttgcaacaaggcatcactggcaagcgcccgaagagggacaacgggctgtcccatcaccagggctcacctggtcattttcatcggtgtgactgtgttgtctcatggagtaagcatcctcatggctctttgaggtgcacacaaaagcatttttttttcctctgacttgtcctcccagggacttgaagttggacggaggaagacaatcaactggtgcagtgagtttgaaagagatcattggtctggaaggtgtggagctgggtgctgatgggaaggtaaggctgccaggctgccagtcaccaagttgtgctgaaggcacaagggtcaggaagcagaggaggggggcagcccacaagcctctcttgaggtggaggactcgaggtctggggcagattcccaggcatgtgatgccagcctgcccggctcccctagtgtgcagccggtgattgagtagcagcatggcaggagttcccacagcatgtgtatttctctgtcagtgctgtttacaactgaatgtacagttttgagtacctcacacacagacatgttccaggatggaatgacgaatggattgaacatctattaactagtggtgtcagcaagcaatattcaggctactagaaagtgtcatagcttcccatggtcctgggaagctaagagaccctcagtcttacactgtgaccacagagccccagggcggtcacattcctcttccatccacatgcaacgagtcgtggggttgaagtctcaggagtgaaaggttgaaagatgaccctgccctttgtgcagggtccagacggtcctcatcaaccctttcaaaatctgtgtatggcaatgacgcaagtgtttcttggggaatctgtcccggggtagtttgtttgccgatgaggctgctgggagctcaaggtgtagatagagcgcatgtgagatgctcgcctgggcaggtgaaaatcaatgcacttgctctgttcacccctaacgaggaagtgttcccataggagccaggaaggatgggatggagtggagggtcatatgtggcgtctgccagaggagcagggtaggaggccatggccctcaccagggactcttggggcctgaagtgttctgggcttctgcacttggattataaaaagcaatgcagcgtgtgccttgtggattacacaacaccacagcaggtcctgagatagtaccttatagtcaaatacattcacatttcttccatgtaataggaatagtcagacccagtgggataaattaaaactctgtagccttatgtcagttcaggttgggtgttggcaccaatgagtaccaaaacaaatttcatttttcagatctcattgaatttcagaattgcaaataggagaaagtggacctgaatgtggggtgacaactgtagcttgatcagaatgcagagctagcaatgcctgggaataatcactggcctgtttttgtcttcaccttttagactgtttcctatacccaatttctgttacccacaaatgcctttggagcccggagaaataccatagactccacctcctctttctcccagttccgtaacctgagccaccgcagcctctccataggccgggcaagcggcacccaggggagcctcgacacaggtaaccttggcctggctgggtctggtagctcgtggtgggagggaggtgcctccatttacatggggattgagtctccctg

SEQ ID NO: 19645 - DNA, 2300 bp, Homo sapien
gtgccttattttatccccaacagttaaccagcccagttttgagcccataggcagacagtagatgcatctttgattgggttattgagctattgctgtgtgaaccacccagatctgatcagtcctaattatttgaaggctgtatcttctatgaagtcagccatgtttattattattttcctcaggttatagttgggcttttttaagaatgtttactctaagaattacataatatataacctggtttcaatacttatgctttttatgaaggttttcttttccctgaaatttttttttcatattgctttgtgcaaagatgttatgtcagcaaatgtattcagcaggtgtatagagtgtcctatcttataaccggctgtggagatgagactatagagagtagtgacaagcagcccagcatttcggagacagaaagacctgggtaagaatctcattctctggcaatatgaccttggaaaaatcaaataacttatttatgtgtcagtttgcttatatgtcaaataagaataattgcatacacttcacagaaatgttgcaagaattatttaaaataatgtatgttaagcagttactgttagcttttttttttttaatcaatttttgaagtatctcagcggacctgatacatcattttatctaacattttggaagtgctacactggtgtttaaagaaaagggaaaaaaaagtcagtcctgaagattgttagatgagtcctctgttgttaggtgaaatttcagctttcagtttatatttggttggtagtaagagaatggggaattgagaaaatgtggtattaactctgatgtggaatcacacacccaaaagaatggttacagtgaaaaaaattgacaataccaaatgttggtgaggattgtagaatgatatttatgctttagaagtaccaaagctaaacaacatctacataatacaacatctacgtattccccctcctcagtatttacccaagagaaacaaagacatatgttcacaagttatgttcagtgttgtggaattagatggtggtggtagctgcataactgtgagtatactaaaagctattgaattgtactcttccacagggtgaattttatggtgtgtgcattatatctcagtaagcctgttatttttttaaaaaaaatacatgttcaaggccaagtgtggtggctcacgcctgtaatcccagggctttggaagaccagggtgagaggatcgcttgaggccaggagtttgagactagcctaggcaacatagtgaaacctcatttctacaaaaaaaaaaaattctttttaaattagccaggtgtaaaggtgtgtgcctgtgctcctagctctttgagaggctgaagtgggaggattgcttgagcccaggagttcaagactgccgtgagttatgatcactccaccacactctaccctgggcaacagagcaagactctatctcaaaaaaaaaaaaaaaaaaaagacatgttcaagaaaatccatggcagctttattcataatagcacctaactagatgaaatagtccataaatttcatctgtccatacaatggaatcctcactgcagtaggaaagggcacatggccacagaggggattcgggatgagtgaatggattgggaggagtctgcggagcctggtgcaatgctgggaagggccggtgtctctgtccaggtggcagctgtgtgggtgctaatgggtataaatgctcagcaagccatgtacttgagattcctgtgcctcctacactacacggtatttatgttatacttcagttttaaaaatcggatgtggatgctgtaatggtgcggcgctcagaaagcagagcccaacgtgctgaacctgccctcctgtttgttggccactgggaggaaaaacaggcccggcagcttcccgagcagagccctggggcctcttgctttgtggtgtctcctgtactacaggtggtggcggggggcaggtttcacttgctgggaaaaggacaccttgctgctggggccttgttattctgggcggtggccaccgtttctcctgaaagtcctggttggagagggtttctaacagatcttcagctcggtgccaaggtaaagaaggtgagctcagacttcccggtagcattgcagaagcgtttcttcctttggtcctgccccacacgggcgcgcttttccttcaggggctgtgactaattatggaaaacggcacacctgccactctctcagaccatgaggtttaactgagtgaacaccgctgttccggggctctgcctctcgctgaacgctcctgctggg

SEQ ID NO: 19646 - DNA, 2300 bp, Homo sapien
ttgactttctaatgagtgaggatagcttcctgaaaatatctgtgtttggcagtgttacttttttgagcaagaatttttaaaaattgctttacggtgaaaatttctaaagacatatcaaagtaaacagaataatgtaatgaatgaagtcctgtgtacccagttcccagcttcagccattttcagcttctggccccacccactgccttgctcagtatttattccaggcaccctagcatttcatctgtaaatattttagtatgtataagagatttttctaataaaacattttacggggggaaaagtttaaacctacagaaaagttgcaagaatattacagtgagctctcatgtattcttcaccaagattcacccattggtaacattttttgcatttgctttcttgctatctcaatgtatatatgtatacacatgcataaacatacataaatatcacataaatatatgataatgtagatattattcttgctcttattttttctgaatcatttgagaataagttgtagaggtcatgactccacttctaaatactaaatactgtgtctcctaaaaacaaccatcccttagataaccaaagtgcagtcattgaatttagaaaataacatctgatatgatactgttatttaatattgagtccatgttcaaatgttgccacttattatctggccacaatattattattattattatttatttatttatttttatttttattttttttttgagatggagtctcgttttgttgcccaggctggagtgcagtggtgccatcttggctcactgaaacctctgcctcccgggttcaagtgattctcctgcctcagcctcctgagtagctgggactataggcatgtgccaccacgcctggctaatttttgtgcttttagtagaaaaggggttttaccatattggccaggctgggctcaaactcctgaactcaagtggtctgcccgccttggcctcctgaagtgctgggattacaggtatgagccaccatacctggcacaatactatcttttataacatttttttcccctaaagatgtcatgtctaagccaggtgtattggctcaggcctgtaaccccagcactttgggaggccgaggcaggcggatcacctgaggtcgggagttcgagaccggcctgactaacatggagaaaccccacctctactaaaaatgcaaaattagcctggtgaggtggtgcatgcctgtaatcacagttactcgggaggctgaggcaggagaatcgcttgaacccgggaggcggaggttatggtgagccgagatcgtgccattgcactccagcctgggcaacaagagtgaaactccatctcaaaaaaaaaaaaaaaaagatgtcatatctcttttgtaccctttaatctagaacagttcctcagttttttattgtctttcattgccttcacatttttgaataggggaggcctgttgttttgtgaactgtcctaaatttgggtttgtctcagtgtttcctcgtggttcaatccacgctctgcatgtttggcaggaataccacccaagtgatgttgtgtccttccgagctttatatcaagaggcacacaatgtggatctgcctcattattggtggtgttaagtttgatcattcggttgtggggttgcacaaaggattttaatgcaatttccgtagtgttttcatttttgaaacaggcatatttgtggtctgattccccagtttttcacttgtatatttttggggatctgcagttgaaaaaacacttgttttattagatgtttcacaggcacactattttcctcaagtgagccagctgtggttttgcagatgtcctgtaaatgcctgactctgggaaacggctagctgaggtccagagaaggaaatgtctgcttatgagtagagcacataattgaaaactacacaggtagtcaggttcacagaggaaggacagaggaaccaagttggtctcgcaggatctttgcctcatccaactccagaggatgcattttcacctccacgctcttagggaaacctttgatgttgaaaggtgaagctgcagtgttttatctccctctccacagtgccctcctcctcctggccgcagcaggatgccttcccttcaatgactcccaggtaagtccaagtgaactcatttgccttcaaagtgtcttttattctctgaagcctgggtgtatgaccagaatttcctagtccttccttttagaagcaggataacttggcctatgcagaagcattccaaatcttgcaggctgggtagctctgggcctgg

SEQ ID NO: 19647 - DNA, 2300 bp, Homo sapien
atagctagatccattttcgtgaggcaacaaattacaaatgggtatatgttgatatgtgaatacggaggaaggtgtagaaggatacaccaacctgttggtattggttatgtgagtggttaagagtgtggtattggtttgctaatttttcttttataaatctctattagtcttgttacaatgatttttttttttttttttttttttttgagacggagtctcactttgtctcccaggctggagtgcagtggcacgatcttggctcactgcaagctccgcctctcaagttcacgccattcgcctgcctcagcatcccgagtacctgggactacaggcgctcgccaccacggccggctaatttttttggtatttttttagtagacacggggtttcaccatgttagccacgttggtctcgatctcctgacctcgtgatctgcttgcctcggcctcccaaagtgctgggattacaggcatgagccaccgcgcctggccacaatgatctttttaaattgtcgttaaagattggtgttttggagagggagacacaaactctggggcaagagtgataggtgagaagcgagtgtaggcttgtgaaggggcctccttgtgaagtgttaacttcttacatgattttatttctatggagaggaaaatttagtgcatttgaagcttcatctcctctcttcctgttctgtatttttgctttttaataacccagtgtactagtctgttttcacgctgctgataaagacttacccgagacttggtaatttataaagaaaaagaggtttaatggactcacagttccacggggctggggaggcttcataatcatggtggaaggcaaaaggcacgtcttacatggtggcaggcaagagagaaaaaatgagagccaagcgaaaggggtttccccttataagaccatcagctctggggagacttattcactaccacgagacgaatatgggggaaactgcccccatgattcaattatctgccaccaggtccttcccataacatgtgggaattatgaaagctaccattcaagatgagatttggggacacagccaaaccatatcatccagtcttggtagagaaagctatacccatctgtacaagtggtttgaaggagactgtgggagaaaagggagggaaggggtgaccagcctacctccatctctatgttggtcccctctgcagaccaaccagcaggcccaggaagagacctgtggaaaagtgagcagaggcaaaggactgcgatgagacagtggtggctggggagtggcttcaaggggacaagccgaggtcagccctccctcaatgctggagggagcagagagaaacaaggcatgcttctgaaaaacagaaaaattacataagggttggtgtgtcgttttccatccactgctccagcaccgagagccaggaggacttttgctgtggcttaagagtgatggtttccccgtgtgtgggtgtttctgaaaatctgtgtgtttctacaggcagagaacactggcactttttgctattgtccaagtccatcaataggttttcttgcatgtttactaacatttgccggaagcctcatgagtccagttttccaccctatagactaggaataggaataggaataggggctgtgcttgggaaagggttcttattttatagaaatgtcaagagaatggaatgactttaaatacaaacaaaactcaaaaaacctatactcaattccagttccttcttccttcaccttccctcttttaagtgaacatttgttgctgttaccttttttgtgtcatttgccaaagcgctacagactcagtggagaaaattgggaaaattcagtgaagcacgggtaatattttggtctcatagtttagagatagcgatgaacatttttctttaaacactgatggggtattgtgaactgcggtatgcttttttcctcttctgccactttctactctttaaaagaagataaaaaaataaaaaataaaaaataaaagaagaatgaccgtccttcgagggcgcggcccctttaagaaggcagacgccgggggcggtccccgcgctgattggcggagctcggagccacgtggccgtctctgggcggctgctgccgctgccgctgctgctgctgcgggggtcgggcggcggccaggggatttgggcaggcaccgtggatccccgagaaggggacgagttgacagatgtgcgtgaggaggtctctggtcggcctcaccttttgtacctgctacctggcttcttacctcacgaacaaggtgagggggcgggcgcggg

SEQ ID NO: 19648 - DNA, 2300 bp, Homo sapien
gtgtccaaaaataaaaaaataaaaaataataataataataattagctgggtgtggtggcacgcgcctgtagtcccagctactcgggaggctgaggcaggagaattgctgcttgaatccgggagggggatgttgcagtgagccgagatcatgccactgcactccagcctgggcgacagagtgagactccgtctcaaaaaacaaaaacaaaaacaaaaaaaactcttggacctgaacctttcctgcattctccaacccattctctcactttgtccctgttgaaccctacatctgaccatgccgaaccacctggccttttccgaggtaccctgaagactgctccccttgtacagaaggccctgctccaccttacagcccatctcaccaatgcctggtcatcttgtgaggctgagatcaagtgtcatctactctaaggaatccttcctgacatctgggtagatctgacctcttccggccgggcgcgatggctcacgcctgtgatcccagcaccttgggaggccaatgcgggcggatcacgaggtcaggagttcgaaaccagcctggccaacatggtgaaacaccgtctctactaaaaatacaaaaattagccgggtgcagtggcacgcgcctatagtcccacctactcggaaggctgaggcagaagaatcgcttgaacccacgaggtggaggttgcagtgagccttgatcatgccactgcactccagcctggcgacagagcgagactctatttcaaaagaaaagaaaagaaaagaaaagaaaagaaaagaaaagaaaagaaaaaagttaaaaaaaaaaagatctgacctctctcctttacattcaaaacaaaacaaaaagaatattcagattcttagttttattttcgacttcctgtccttttctgatatatcccccaaatagtctctcactggcacatttttgtcatacactgcatctcagccttagcctttctttctggtctggtcttttccttttaatcttttttctcttttttttttttgagacggagtctcactctgttgcccaggttggagtgcagtggcatgatcttggctaattgcaacctcggcctcccgaggtcaagtgattctcctgcctcagcctcctgagtagctgggattacaagtgcgtgtcaccacacccggctgctttttgtatttttagtagagatggggtttcaccgtgttggccaggctggtctcaaactcctgacctcaggtgatccacccaccttggcctcccaaagtgctgggattacaggcatgacccaccacgcccagccctctcctattttttcctagccagaattgagaagtccatttctattaatagttacacccatttttcttaaactatttatcgtccaattataatcctttgaacactaggaaggaacacaatttccacacacattcacatatataggcaacatttgccaagcacacatctgcaccctatcatatggctatagtttgccttattgcagtaggggtatttggaggattcagaacatgttttcacctggaatggaaaggaggcaaagattgtgtgctaatggaaatcattaagatcagtaacccagggctctcaagtatggacagttagagatactgactcggaactgagatttagggaaaacagttattcagtacctatttctagaatgtttgaatatacaacatatagacagtgtatagtttatagtcaaaatataatgtacagccagtccagttcccaaaccgattgtctgggttcaccccttattagctttgccacttgttatctgtgtgacctcaactaaattactttacctctctgtgcctcagtttcaatatcagtaaaatagagataatgacagaatttagctctcacggtaattttgaggactaaaaagttaatgaaagatttgaacagtgcattgatatactaagtgaaatgcaatgtttagttatcttttatctggtcattttattagaatctctacaaaatacagaaacaaaagttttattatgcagtcttatttttgttcactgttacgtaacacattttacacattttccgcattccacgccccgcccttcaacaacaaccaccacaaactccgaccgtcctttccaggccctttccctctataaacctgccgttttctgtctcccaagtcatcccagtttagaactgctccaggaaataatgaatgaacagagagagcctagtttgtttatttatttacaatccactagtctaatctagtttagatccagcggcaatttttggggtgcca

SEQ ID NO: 19649 - DNA, 2300 bp, Homo sapien
aaaaatagctctctgagaaatagaactaccatatgatccagtaatccaacttttgggtatagacccaaaagaattaaaaacagaatattgaacagatatttgcatagctttattcacaacagccaaaggtgggaacaacccacatgcccatcaacagacgaatggataaacaaaatgtgctatatacataaaatggaatctttttcggccttaatgaaggaaggaaatcctgacacatgctacatggatgaaccttgaggatattttgctaagcaaaagaagccagacactaatggacaaatactataaaatccacttatatgagatacttagagtagtcaaatttagggacagaatcagatttgcaagataaaaagtttctggaaacgtatttcacaataatgtgaatatgcctgatactactgaacacctcaaaaagggttaacacggggccgggcgcggtggctcatgcctgtaatctcatcactgtgggaggccaaggtgggcagatcacctgaggttaggagttggagaccagcctggccaacatggtgaaacccggtctctgctaaaaatacacacaaaaaaattagctgggcatggtggcaggtgcctgtaatcccagctacttgggaggctgatgcgggagaatcgcttgaacccgggaggtggaggttgcagtgaaccgagacagggccattgcactccagcctgggcaacaagaacgaaattccgtctcaaaataaaataaaataaacaataaaaataaagggttaacatgggggctgagcacggtcagcgagagaatcacttgaggccaggagtctgagaccagcctgggcaacagagaacgctgtctctacaaagcataataataaaaaaatgagccaggtgtggtggcatgcacccgtggtcccagctacttgtgaggctgagatgggaggttgagactgcagtgagccgtgttcgcatcactgctctccagcctgggcacagagacactctgtctctgaaacaaacaaaaaaagaggggctaacatggtaaatttcatgtttcttatcaagtaaaaaggcttgctgacccacaatctatattaggtttccctgttactagcaaggagtgaaggatgtgctatcccaaaatatgtccaaaaattggtatattattttgagctaaaaacaccggagaaattgtagtttcagaaagggctagatgacctgtcgtttcctacagggaataagcagtaaagattcctctgggagtggcaccctctctgtacccgggtcagaaaatagcccttatcaccagagactgggagttggggctgcaatggacctgaataaatgaacttcccaagtaacacttaccttccactaattttacaccctccccaatatttctcctagtgactctcttagaaatgtatcgccccagccagatgccttttgtgctttcttctcaaatgcatcattctttgtctaaaaagtataaaagcatcttgctgtggccacttcttcagacctcactctcttttgaaggtccccatgaaaaactaataaagtgtgtatgcttttcttttgtttatctgcctcttgtcaattcggtttctggctccagcggaagagcccgcagaagcgctgaggggactggagacggtctctggcgcccctacacctgctcagtgagccttcagccccttctccctgacgaagctcccagaggctggaactctggcgcgggaggcacttgggaaatcctcccgaaagcaaggaggagcctttcctagaccgggagcggtcccacgcgggggtacaggttggggcaggggcgaccgagccgggcacaggaactcgcagcagggtagggttggcggctacgccgccctcggtccgcggggaaccacgcgggcttccgggtcacgccgccgcgttccgaccgccctcggggagaggggaggagcctccagcgccgggcggggcgtggttaaggccggtgggccccaccgcagccagacgctgcccgtttaagcgcagagggccgcgggtcacgtggtgggcggggtgggggcgtggcaccaggaagcggcgtccgcgccgggcccagagccgcagccgcagccgccgctacagtccgggccgggctccaccgcgcatcctgctccactctggcgaccgcccccggggcccccgccgcgggcgcggcgcccgccatgggcgaggaggactactatctggagctgtgcgagcggccggtgcagttcgagaaggcgaaccctgtcaactgcgtcttcttcgatgag

SEQ ID NO: 19650 - DNA, 2300 bp, Homo sapien
aggcatgagccactgtgcctggccaagtttattttttttaaaagctcagttaaataataattgttctaaataagaaaatagattaagattttatgtaacagacatggaactaaattacgtatatatagaggtatattttcttttactttttttttttgtttgtttttgtgatggagtcttgctctgttgccaggctggagtacagtggcacgatcttggctcactgcaacctccgcctcccaggttcaagcgattctcctgcctcagcctcccgagtagctgggactacaggtgcgtgccaccatgcccaactaatttttgtatttttagtagagacagggtttcaccatgttggccagggtggtctcggtctcttgacctcttgatctgccctcctcagcctcccaaagtgttgggattacaggcgtgagccaccacgcctggcagtacggaggtatattttcatttgaaaaagtggatatctcagtttttaaatttgtaatgaaaattttaaacacacaatagagactaataaaaaagaacccctgtatgcctgtatctgattcgacaatagtcaaaattttgcttctaagttacttctgattcttctgtggcctaaaacagtggcccaaactttcaaactttatggtagttagtataatgttctttcatttcttcttcctttttttttaaacgtactcttctgtggcattcctgtttatttttaaattttttttggagagtgtcgctctgttgcccaggctggagtgcagtgttacaatctcagctcaccacaacctccgccttctaggttcaagtgattttcctgccacagtctcccaagtagctgggactacaggcgcatgccaccacatctggataatttttgtattttctgaagagatggagtttcaccatgttgcccaggctggtcttgaactcctgggctcgggtgatcctcccgcctcatcctcccaaagtgctgggtttataggcatgagccgccgtgcccagccagcattcctgtttagacaatagataaagtgagagcagtcctggctgaagtggaggtggggacctgttccctcccaccttggtctcctccttgtccctgggcaggcccagcacagagtttaccactggactagaatatgcattcaggaactgttcacagcaacatttattagatggcacttaaatagaaaaggctgagcatggtggcacacacctgtaataccagtgactggggaggccaaggcagggggatcgccttgaggccaggagttcaagaccagcccgggcaacatagtgagaccctgtttctacaaaaaaatttaaaaattagccaggcacggtggcacgtgcatgtagtcctagctactggggaggctgaggtgagggaagatcgccaaagcctaggaggtggaggttgcagtgagctgtggttgcaccactgcattccagcctgggtgacagagggagaccctgtctctgaaaaatgaaaaaaaaaaatagtgattatattttcctgttattaaggaatatacattcattatacaaaacttggaaaacagagaagaaaatgaacttagcatatcactcaagtataactattacatgtgtttctttccaatcattttagactctatgcttaggtttggggttttcttttaaaatattatgatcaagctgtgtttagtgtgtgttctcttttccacttaactttataataggctttgagtaactgcatgtttctttgtaaacacttgttggcagcaaaatactccattaagtgaatatcttataatttacttaaccgtgatgccatttagaacaaaggaattttgaatggccagatgtgatttatgtctgtttgttccctaattagatacgggcagctgtatgttctcttcttgaggcatcattctcggacctccaacagcacaggagcggaggtggtcctctatcatctaccacggtagatttcatgctttgttttccctctctctctgattttaaaatgtgaactgcagcttgttgatctgttttttgctttctatcctacagagaaggtgcctgtaaaaagatgcacatattgaagttaaataggacgggaaagtttgccctgaacgtggtggacaacctggtagtcgtgcatcatcaggatacagaggtacaagctgtctgcgtttctaccaaagttaaggttgcttaaaagccttgtgaaaattggtggctgggcacggtggatcacgcctgtaatcccagcactttgggaggccaaggcggacagattgctt

SEQ ID NO: 19651 - DNA, 2300 bp, Homo sapien
tttagacactgctctgagtatggcttcagaagtgttacatacgcataataaaatcctttacagctattaaaaggagtgaggtaggaaagcatactgctaaaagcaaagaagccagatgagaactgtgtactgtacatccccacttgtttaaaacgtttgtatattatattcacatatgtatgctttccactacatagaagttttctggaaggtatttctgcacatttataaagatgcacatctaataatttcatttccccccattttctacttattgctctgaggtcaacactgaatagtccttatgaagatggtattgaatattctttcaacaaaaaagtctccggatctcaactactggagctcagaaaacgataccccaaagtaggaggctttggcatgctaagtactttgaactaaaggagattaggtctcagtagcagcctcagaaacaaagtctacccatgactttctcctgccctcctgtctccagcggtcttgcacccctgaagtaagtcacaggaaccagaattcttcttccccaaggagggttatggaaacttagaaccttcaaagtaatttataaacttggaaatcttactgtaacattttcttctacctctctctgtctttgagacagggtcttgctctatcacccaggctggagtgcagcagcatgatcatagacaactgtagcctcctgggctcaagcaatcctcctgcctcagcctccttagtagctgagactacaggtgtgtgccactatgcccagctaacttaaaaaaaattttttttttgtatagagggagtcttgctacattgccctggctgagaatttacatttctaacaagttccaaggagatgctcctgctgctggtctggggatggccgtttgaggatccctgcatgaaggcatacacaggacttgatcctcagtgggggcaccaggagctggagcctggggagtgggaagcgagagcacagagctgactgaggaccacgaggtcgtcgtggaggacctaggctgaaggtcctgaagaaatccccatagtttcactgccaggccagccaggtggacatctcagggctgaggaggtgagaaggcaagacagaaagtgaaacagcactttataggatagggatgggaaggtcatctgcatcatgggactccttggggaggggttcggtcattgctccagatgaaggtttagtcttttcatcgtaaatttgctttcactgttgggaaagagatcttcacctccattttcttaacttcaaaatggaaatgacagatgcttttgagtggtctgaatacttgaaatttgagggaaaacgttaccagaaacacatacaactagagttaaagataaatacatatatcaaacgcatggctcaaaaatgacaacgcgtcttctttatctgccttcacgtagaacttaaaacagaccctggtccccacctcggggtttcctcgcgcccacgggctgcgctgcgcagctgggccagcaggtggcgaggctcccgcactttttttcccgggcctggccgcaccgccaccgcccaccccgcgctccgccccgccccgccccgccgcactcgcggatcgtcacacggtcaggccaccgcgcgtcaccgccccgggctctgctagaaagtgccggggtccagattcctttcaggtgactgggttgggaggagaagtcgctcagcgtaattgtcggagccgaaataaacagagactccgcggccgggcgggaccttacccggaagtcccccagaacagcactacccttcgctgaaacctcgcccgccccctccaacccagagacgaaaagggaaagcatcacggccagaaaccgttggcacaactccacagatactctcccgggccgagccagactccataagtcccgcgcctggcccccggggattgcaggggctgaggagaagggcaacacggggaccttgaagcggggtcgcggcggcgccccagcccgggccagggagtcccggcagcggcacctcccagaaagggcggagccgacgacgccttcttccttcctgaccggcgcgcgcagcctgctgccgcggtcagcgcctgctcctgctcctccgctcctcctgcgcggggtgctgaaacagcccggggaagtagagccgcctccggggagcccaaccagccgaacgccgccggcgtcagcagccttgcgcggccacagcatgaccgctcgcggcctggcccttggcctcctcctgctgctactgtgtccagcgcaggtgagcggtcgccggccaccgg

SEQ ID NO: 19652 - DNA, 2300 bp, Homo sapien
ccctaagttccttgttctcaagtcaaacctctggcaagttccagctgaagcaaagaaaattagatggaggggccgggcacggtggctcacacctgtaatcccagcactttgggaggccaaggcgggaggatcacgaggtcaagagtacaagaccatcctggccaacgtggtgaaactctgtctctactaaaaatacaaaaattagctgggcatggtggcgcacgcctgtagtcccagctactcagaaggctgaggcaggagaatcacttgaacccaggaaggggaggttgcagtgagccaagatcacaccactgcactccagcctggcgacagagtgagactccatctcaaaaacaaaacaaacaaacaaaaaaagaaaattaggtggaggaaaagtgaaacattcacacaggtagttggaatcagatagaaagcattgagggcttaggaaacgggcaggtaaactcttttgagaggtcagaattgggagaaattttgccccacttagaggtgaggaaagatttggagtgtttctgggaggaaatagcattcgagcagagccttggccttgaaggatggaggaaaattcatttcaagcaaaaaggaaactgggtgaacaaaaacacaacagaggcaggaaagtgagaacattagtgggaaataggttattaatagtgctggattatcaacaacactgctcttcatagccatgtggtggctcaggtgtctggaatccaacagagttcattctgttattacagttgtctattgctggaggatcaatctttcaaatgatgcaacacatctggatgttcttctttctgaatgttattatctatgtgcatagcagcagtcatgttaactgacatcaattttaagatcctgtttcattttgttcttgcagaaggaaactccacttgccaatgctgcattctgggcagccaggagaggaaacctggcgctgctgaagctgctgttgaacagcggccgggtggacgtggactgcagagacagcgtacggtggttcggtagatgcatgcccagcatgcaccattgccctctgtgggcacaggagcacctcaggaatacattcccctttacaatgcttatttactttttcatgtgtttgcttgctttatcctttttaaaacatccaaggtactgtggtgaacttaaaaacatgctgggggaagtcagaaagaaaaggaaacaatgaaatgcataaaacagaaggcaaccacaatagggaaagaggcacttcactgggaatcagaattggcagattacaagaagaaaagcctgtttagtgaaagaattcaagccaaccacttccatgaaaagatggagataatttagagcacaagtgggctgccatggatgtgggcgttatgtttcttctacaaggatgagaaaacaaaaattgaagcctcccccaggattttatcctttcattacctcttgaaaacataaatacactaattggcaatttaaaaagggaaacaaaaatagatactactgcccactggcagataccacttagagagcttttccatccccagctagaggcaatcgtttttctgtcctcagcaagacttctcatctctgggaccaagaggacctccaatgaggaaagggagcgagcaatgatgttttgattttaggatttgaataaaaatgtttcaaaggagctttgttttcctgaaaacagggtgtgccatttccagcttttattgtacaaatttgaaatctaccacaagcccaaaagtgaaatagcagtttgccccagttggccccgtgggggcatcacagtaggatatctttggtttacgggatatctttggttacacctccagacccactccacacccttctcgctcttagtcccacagtctgaattgtatgtactgctccagcagactcgctttcctctggcctccagttgtgtttggcccataggagcatctgcaggagtcagagggtaggaggagagggacatcagggagcccaccgccctccctgtttctgtctggcagcagcgccccactgttctctgcatcctgggagccgctcccttcccccctggcaccttcaggcctcagctggtcatggacccccactgttcctagatcccagtactgtgctgttctttgtagatgccctacacccaggcctcagcttaatagtctctttattacactttcttccaattatcccaatctgaatgtaccatctgttccttgccagaactcgggctgctgtcaagtcttgggcatctgtgaactggccatcttggtcttatt

SEQ ID NO: 19653 - DNA, 2300 bp, Homo sapien
ttccatttcagagctgtttatatgaagatgagtttaaccgcgtgtgtcagacggtgttaggcacgttctttccagagactgacaagaatcccatcagcaccctggccagagaaaagcagctttgagctcaagtgtaacggaaaggaaacaggctttggagctagacaaacacctagccctatcacttattagcaaattactccaatctctcagaatcttagttttttcatccgtggaatgggttaatactcaccccataaaatgtttataaggaaagcaccttgtacctagaaaacactcaaaatattagttctttcctttctcccttttatttatcaaaactattaaagcagaccaggcgcggtggctcacgtttgtaatcctagcaccttgggaggccgaaccaggtggatcacctgaggtcagtagttcgagaccagcctggccaacatggcgaaaccctgtctctactaaaaatacaaaaattagctgggcacggtgacaggagcctataataccagctactcgagaggctgaggcaggagaattgcttgaacccggggggtggaggttgcagtgagccaggatcatgccacttcacttcagcctgggcaaaagagcgaaactccatctgagaagaaaaaacaaacaaacaaacaaaaaactattaaagcaaaacctctgatgcttgatttttatataataacgttgtgtggcaacttaaaaactgtgtcatttataggcactcaaggcaaggaaaatgtttagagtccttatttttaaaattggaattttctataaaagttcagaatgtttttaatttaaagttgttttaagcacaaagtaatacaatttatccatgaaggttaaacattttaatttttatcattaacttttatttgtaattgttttctaccttttaaattaaatattcgttacaaatttaattgagaagagggaaggagggggagaatgaatgagtggattcttatagtttgagggggtaagacctccatttttatactatttttttgttttgtttttatttttatttttgaggcagagtcttgctctgttgcccaggctggagtgcagtgaccgaatcttggctcactgcagcctcaacctcccaggttcaagcgatcctcccacctcagcctcccgagtagctgggactacaggtgcgcaccaccacgcctggctaatttttgtatttttagtagagatagagttttgccatgttggccagtctgatctcgaactcctggactcaagtgatctgcccgcctttggcctcccaaagagttgggattataggcgtgagccactatgcctgggctacttttttactttcacttttctaaaatgctctcaaagagctgttgttgccgtttatacttaaaactcccagttttacttcgcccaaaccaatcctgggcaggcagcaggagtggacacacatactgcaatactccagggctgcagcatcagacccagaggaggagggaactgctggattaataacgcggaggaggaggaggggtatgagtctattccaaaattggcctttgcccttcaaagaggaaaagaccacttattgtttgtgcaatcaaaaggtttgtttcctagatattttccccaggagaaaaaagtttcccaggaaaccgagaaagaaattataacgaaaatagctattggatgaattttttcctcaagcttcatttttacatcattataatatttgtgctgtaatgaaggttgggagtcctctggggcagaccagtctatttgggaggatatgtatggagtttgtgtgtgagtacatgcgggtgagtgggcgtgagtgtggaaagtatgtgtgtggaacctctgtgtgtgtggaatgtggagcgtatgcacaatgtgtgtggagtttggagtgtgtgtgtggacgagtgagtgtggaagtgtggacgtgtgtggaaagtgcacagtgcgtgcggagtttggggtgtttgtgcacgcgcgtgtgtggcaggtcctggagcgcgtccacgcgacaccccatgtgtagtgtgcgcgcgcgcgcgcccccgcgccgccccttcggcccggccctgtgtgcggcggctgctgccgggccgggcggcgggagcgcgcggcgtcggaggccgcccctctgcggaacgccgagagccccgggagagtgaagggccggggaggacaaggcgccccgggcccaaagcgcgccggctcccgctcgggcggccgcggacatgtgcaggatgtccttcaaggtgagcgaccgggactccggggtc

SEQ ID NO: 19654 - DNA, 2300 bp, Homo sapien
ttgcaaatattttcttctatcttgcggattgtcttctactttctttttttttttttttttgagatggattctcagtttcccaggctagagtgcagtggcacaatctcagctcactgcaacttctgcctcctgggttcaagtgattctcctgcctcggcctccctagtagctgggatttcaggtgtgcaccaccatgcccagctaatttttgtatttttagtagaaaatttcatcatgttggccaggctggtcttgaactcctaacctcaggcgatcaacccatcttggcctcccaaagtgctgggattacaggcatgagccactgtgcctggccatctttcgctttcttgagggtgccttggaagcacaaaagttttaaaatttggtaagtttcaatttatctttgtgtgtgtgtgtgtgtgtgttttgagacagatttttgctctgttgcccaggttggagtgtagtgccatgatcttggctcactgcaacctccgcttcccgggttcaagtgattctcctgccttggcctctggagtagctgggattacaggcacatgccaccatgcctggctaagttttgtatttttagtagatacagggtttcaccattttccccaggctagtcttgaactcctgacctcaggtgatccacccacctcggcctcccaaagtactaggattacaggcatgagccaccgtgcccggcccaatttatatttttcttttgttgcttgcgcttttgatatcatagctaagacagcattgctaatccaaagtcatgaagattttctcctgtgtttttcccttagaattttatagttttagctttatagtttagctctctaaatgtaaaatttagagatcttaaatccattttgagttaatttttgcatatagtatgaggtggggatcctactagattattttgggatgtccagttttcccagcagcgtttattaaaaatattattcttttcccattgaatagtcttggcaccctgttgaaaatccagtgaccataaatgtaacggtttatttctgagctctcaattctattccattgatctatgtttatcgttatgtcggtactacactgtcttgattactgtagttttgtattaagttttaaaactaggaagcgtgagtccactgacttcattctttctcagaatcgttttggattttctaggtctcttgcatttccacatgaattttaggatcagcttgtcaatttctgaaaaaaaaaaaagtcgggattttgatccctatcaaaatccattgtgttgaattgtaggttgctttaggaaatattgccatcttcacaatattgtctcctaatccatgaacatgggaggcttttccactcatttaggtcttttaacatttctttcaaagaggttttgcaatttttattgtacaaatattgcattcctctaatttcttcgagggcctatgtgggttctgttttagtagggtgttctgcatataagaccaagcatcagtccggggtcgtggggggagggggtcttctctgttctgaggccatcatggcaggtggcgtacctcactcaatctctgttagcttatttgtaaaattgagcagattaggcatctaaaggatttcctctaaggttcctttccaggttggcaaattacaacttgcattattggctgtcttttaaatatgtacgttccaccactcccagttccctggctcagcctgtggctgcagtgccacagggatcctaggtgcacagtgttgaggagttgacgactcaacacttggctgggaaatcgaaatgtctttgatgtgagttctgtaggtagtggcagtttcctctgctctcaaccaaattcgtttacaagcctcctttactcttaggtcacaggtggcttttctggctttgacctgagcggtgagtatccagagaggagaacgatctaattaatttctgtcctggcgcctggagggttcgaagatcccaggctcccgttcccgccgcctgggtgggagcccgggaacgcctctcccattccccgcccgcgaagtttgcagcgcgcctcgcgcgggagagacgccgtctgctggcgcgcggctgagcgctgtcagttcctgatccggctggtgcccgctccagccgcggcaggttccagagctgagaggccacccccacgccgcgggcttccagcgcgtggagcaaggggagcggccccggcgccgcccatatccccggctgcgctagtcctggcgctgcaggtccgggaggcgcaggcggagagcggcggtgcccccgagcc

SEQ ID NO: 19655 - DNA, 2300 bp, Homo sapien
agagtttttagcgaaatatattagctctgattttccaaacatgaattcttggatttcctatgaattccttcactacataataatgggatgtgtctttggaaattgttacacctacgtttagagtattgctttatgattttcagagtacattataattcctaattagtttttatgaggttggatcactttttccacgtgttggtagacaactcgggagtgttaatctgagcccaaataagcacttttttcaagatcaaagagcaagtgtttgatagggacagaactggctgagcttagggtttccagtaatcagtgtgacaattcttccttcctcagagataagcaaaggggcttctttgagcaaagggtaaatctctgtgcctgagaggagtggttctcaaagtatggatgagaacctgtgagggtccccaagaccttttgggaggtctacaaggccaggggtcctccttcctccattacagatctatgtgaggccagatcttcaaatacttcagccaaacaacatatcacatcagagtgaatgaagaagcaggtgtgggaatccagctttctcctattaagccccaaactcagcgagcttaacaaaaatgtaaagcaatgccactgctctcaccaaaaatttcatgttttagaaaatatagtaatttttaataaaatatatttatgctaacatgtaaaatgtttgttatattaaatgaattaatagtatatctaaaagttttttaactttaatttttaatatggtgcacatcaatagatagaactcatacaaacaaaagtttttttaggtcttcaataatttttaaaaatataaagggggtcctgagaccaaaaagtttgagtctcattgtcctagattttttggcttctgctttggggtttggaatgtttacattagctggcagttctcagacttaaaaaaaaaaaacaacttaccatactactgtttgtgaaaaatattaagatgaaactcattttttttttctgggaaagaaaaggaacccacagggtctgagcactccctactccccaactagaggagcctgtggttcaaagggcattcttgggctagaggcgagtgctcctcagacagtcaccgggaaatctgttgcctgggggtcagggagcctggaagggggtggggataatcctcactcattaacacattaacatagatttgcttaacaccgtgttcaatgtcgtaccaggctctttgggaaataggacctcagggttcaaaattcaagccagataagttttgggggaaggaatgggaataaactgcaaaggctcctgggattcacacatgaggcaccatggagttgaagagtgggaggtgaagaaagaaggaccgaagccccacttcatctcttccatacttttgcatcatcctggccatgggcaaaagagtgatgagggcgaatgagaaagccaataagagggagaacaatcaggaaaagatgaggccggaggagatccacagggaaggagtgctaccactccatcaaatggctgcttgggtttcagttctggcagctgtgatctctccaaaacctggaaccagggttaggacactgctgggaaacactctgggctgttctcctggttcttggccctgggagggtttagcacgtaatgactactgcttgccatcagacttttctgaatgcatagactttaagatacactgtagactggttgcaatggaatggcatattggttaaggtgtgacaaagatgatgatcaatgtgtatatttggtggagaaagaaagataatgatttttgttttgaatttgatcagcttgagaggctgcagctgggtagagatgtccaatagacaggaatcaggatcgggatcttgagcaagggattgtggtgggacgtgttgccttgggaatcagcatcacatagagatggtagaagctgtgaatcgatgagatgacattaataactgtatctcttttgttttatcagctcttccatgtggcctatattttaatcaaatttgcaaattctcctcgccctgatctttgggtcttggaaagatctgtagactttggaagcacctactcaccatggcaatattttgctcgtaagtaatcttgcctaccatgttatgcatggctttaattacttggaacagataaagactatggatttaattagaaaattaatcttggctgggtgtggtggctcacccctataatcccagcattttggaaggccaaggcgggtggattacctgaggtcaggagtttgagaccagcctggccaacat

SEQ ID NO: 19656 - DNA, 2300 bp, Homo sapien
cagttaaaaatggttaagatggtaaatttcatgttgtgtgttttttaccacaataacaattaaaataaaataatataaacgtttgtgcaagaaaagattgtattttctgtcaccgatgtgtacgtttaatgaatgacctgagctgcatgactcagtcagtttccatatgccttccttccctctttctcactcaccttatgtttgcacaaacaaaagcacatttaaaagataagttggacactgggaattttatttcattttattgccccttattccctgccttcattttttttccttccttcatgggaataacccaggacacctgacttctaaatgtaaatactccaggaggcaggtatttccccgtcttatttcatttctccctatgcattttaagtgtcttgtttttgattcattcggggtgtctgcctctaaggaacccctggaagtgagcctgcctaaggaagaccctgactttctgtttccatgtgtagggaaacttcagacatgccagcagccgtgccccagtgtctagggaggagctgatgacagtgctgtctagactggcagatgtgcgcatccaaggcctctacttcacagagactcaaaggctcaccctgagcgaggtggggctagaggaagcctctgacacaggaagtgggcgcatagcacttgctgtggaaatctgtgcctgcccccctgcctacgctggtgactcttgtcaggtaggaagttttcccatccgcaacatttccctagggagctcctgtggccgtttttggctgctgtccagcactgtgggatggtttggggccctctgtctattgtttctctgttcaagtttctgcagggcttatcttatatcttacttagactcccttcaggaattaagtgtgaaaaagacatcatcagtgtctcagaattcataggaaagccacagagattcaatagatgctgagggttagagaaatccagggtaggaaaataatgtactatagtttcaaatagctagaaggaggatattgactattcccaacacaaagaaatgatcaatgtttgagatgatggatatgttattaccttatctgatcactaaacgttgtatgtgtcacaacatcactatggactccataagtatttatcattattatttatcagtttttaaaataacatattttttaaatgaaggagctcaccagccagcatcttagtatttgagcccctgctttcccaataactgaccttatacctttctctaatccggagcctccctctacccactctcaactccccagtagagttgaattccagagaatatcctggatttcttagaggacattatgttctagcttgcagcaggactctcgttgtttgaggtccagtcaaccagagctgtcttcagatgattaaaatgtgccataaaatgaaactgtttaatttctctggctataagtatgtcttttcttaaagatcagggcaaaagcacaacgttagcatgattaataaaagtagcaaacactcattctgtgtattccatacatccataagtacgtaggcttagcaaaacctttcactttctttcctggccccctggtagccgaaaaccccaaggtgatctgcgcatacgagttcccactttttaaacctgcaaaaacaaatctgacctgctgtggtcttctggggactccaaagttgtaatatttagcccacaggttgcctacattcttccccttcctccatctcttttctagcctgattaaaattgatagcccgagggaaagagagggactctggatttccaccctcctacccagggcgtgttccctgcccgtgactcagcctgtgatttagggcgtctgcagggtgaggtgggtggaaggtgatgcccgccccacctcacaggaattacagagcggtgcgcttacctgcgggactgttatgtgcgctctggcacaggctgactcatgtgtgaagtttaaaggtggggcccctgccgcagacagccttcctcacctgagtcaggcaggcccgggcactgagcaggaagggcaggtataagaggaagaggcagaggttcctgcgcagccagcggacgtccaggaaccgggatgcctccagcagtgaggcggtcagcctgcagcatgggatggctgtggatctttggggcagccctggggcagtgtctgggctacagttcacagcagcaaagggtgccatttcttcagcctcccggtcaaagtcaactgcaagcgagttatgtggagtttagacccagccaggtaacgtccttttaagttttg

SEQ ID NO: 19657 - DNA, 2300 bp, Homo sapien
ctccaactctactaaaaatacaaaaattagccaggcatgatggcacatgcctgtagtcccagctacttgggaggctgaggcaggagaatcacttgaaccccagaggcagaggttgcagtgagctgagatggtgccactgcactccagcctgggtgacacagcgagactccatctcaaaaaacaaaagcaaaaacaaaaaacaaaaacaaaaaagaaatgtgttgtttaatatccaaattgggggattttccagataactttgtgttactggtttctaatttaactctttcatggtcagagaacacgctttccatgatttcagtccttttaaatgtgttgaggtttgtttcattgctcagaatgtggtccatttgggtgaatgctgtatgtatacttagatggaatatggctgagagggtatcctaagaagtaatagaacctatttccctgaggggaaataggggatgctgtgcccatgaatgggggctaaaaagcagcctggaagctgcccaatgctcatcgttgggtgatggccacatgagagcctagcaaagcttacaggggcaggacaaatctacagacctggatctatgctggaatgttacatactctcaacgccactatggtatataaatcctaaactgccaaagtaagacctggtcctagaccgtgggttggaggttcgagtaggggtggtgataagcataagagcactagacagggcccagagagcacaaagaaaggggaactcccacccagaaagagcctgcaaacattgttagcagagaagtaataagaaagacacccaacagaagcaacagtcaagagatgagttcacttcggataaaatgaaaacaacaggacaatctgaaaatgactttgcagaatgacacccaatagaaggaacaagaaattaggaaatttgagggggaaacctccagaaatcaaacaagaagaggtagataggaaaagacccaattgaaaatcatggaaatgaaaaaatacactcattgaagtaaaagaattcagtagatgagatcagctctagtctagacacagtgaacaaggctttggggaaagtttaataagtacttttgggttgagggctgattctagtgactatagctgagtatatatagcaaaagattattctagaaaaatgactctttcctatccttttgcataactttagtccaaggtttataggcttaatatggagaagaggagggaaaagcatttatgtcttgaggggaaaaaaaaggaagccactggcttgcttggatttcatcaacatggccctgcagccttcaccattctgcacacacgctgtttgccacaccctgtgctaagggctttactcaagtctcacaacctcctcatgaggaacctagtgttgttctcattaaacaggcatggagaagctgagaaacttgcctagaatcatggtggttctggaagaattcaaatcaagatcaaattctaaagaccatgctttacccactccacttcttatccaggtgttctgctgacaatctatataatgacttgcctccctttccccaaagtaaagttaaaatagaactatcttcttgctgtatcacacaaacatgcgaaaattaagaaagattacgtataagaagggaagtaacatttttgaatgctcatatgtacatgacattttacaatacattagctcgcttatcaccaaaaccaaccctgcagctaaatacgataatccccaatttactaatggaagagcaaggcttagtgaggctcatctatcatgtggcagactaagggtttggacctaggctttatttaaagcctgtattcttttacccaacactggttctgacatacatattgaggtaataatatcattttttcctataaactttttcaatatattaatactttttccaaaaaatggaaaataatcaccattctagatattacgtgcagtagtgtctaagggtctaagagtaatgaggcaatttagcctaaaaaaagggcaagggacccggattatggtcctgaagcaatcaccgatgagctatacaaccgtggacaagtcacccgacttctttgggcttccattttctcagttgcaatatgaggctgttcagctacaagagctctgagttccctgtggttctgttggacgagattctttgaatagattcttaatgattccttcattcaagtagccatatgcactgcttttagtgttgtcaggttaactgcaggtttttaaaaaactgtatttattatagaatctggaaattaatcaggtaagtagt

SEQ ID NO: 19658 - DNA, 2300 bp, Homo sapien
gtggtgagccaaggggtaaacaaatgctttaatcattgtgatagccatagttctagcacttgactcataagaagtacttagtgtgtgtgtaataatacttcatgcttagaagttatatgggtctaaaattcaataacgaactatacaaatgtgatttgtaataaacttaaaaggtgacatctatgaagcattgcacatcacaagagcatgtatttctttcaaatacacagaagaaaatcgaggaacaactgagcaaggtctaccctgcaaggggtcctgaggatggtgatccagccagtgagtcagaatctgacttacgcccaggagccagctacctcaaagtgctgagcacatcaaattcaaaatggctggtgaaaatgcttgcctctggtagaagagctgcaagtaaattggacatcagaaggaaaacaatttaactcatgcaaacacaactcaactaaaaacagagattaaagagagctgctgtaactcacaccaaatatttagcagctgcaattttcattttttactgccaagttcaattcacaaaaacaacaacaatatttatttaacatctgttatgtggcaacagtgtggtagtcatctttaaggctgttaagcatttgaataaattataggaggcaatgaatctcccttctaagaaatctttctcatttggatacagaatgtgtctatacaaaatgaaatatgcgtagatcttccaaaacaagatcttctttgtgtagctcttccaagacaagatcttatctatgactttttttatatattcaagctttcatggccatgataccttacataaaaaactaattgcagcacagttcacaatagctaagatttggaagcaacctaagtgtccatcaatagatgactggacaaagaaaatgtggtacatatatacaatggagtactattcagtcataagaaagaataagatcctgtcatttgcagcaacatggatggaactggagatcattgtgttaagtgaaatgagccaggcacagaaacacaaacttcatatgttctcacttatttgtgggagctaaaaattaaaataattgaactcattgagatagtaaaaggatggttaccagaggctggaaagggtagtggtggagtaggtggaaatggggatggttaatcggttcaaaaaaataggatgaataagacttagtattggctagcgcaacagggtgactatagcaaaaaataatgtaattgtacattttaaagtaactaaaataatataaatggattgtttgtaacacaaaggataaatgcttgaggggatggataccccatttaccctgatgtgattattaggcattgcatgcctatatcaaaatatgtcatgtaacccataaatatgtatacctattatatacccacgaacattaaaaataattttttaaaaaaaattaataggatattatgtcatttcccccaggtctggctcagtaattccccatgaacaatgtagaggacgtattgtctagttaacttggttaaataaggactcaatgaatggggaaaaatgtatttggaaattctttcctaaaactgaaataccgtggtcatccattcattaaatagtcactgaattcctaccatgtcctgggagtgtgcagtggtgaacaagccagacatgtggtctttgctcacatgaagcctatggggagacaggagatccaaaaataaatataccattacacgttgtaattaattgaaaatatttgtgtatactaggaggcagagaaagcccagtgtgctgccttactgtaatttccagtctctccagaaataagaaaggcactgctccactgccttttaattgcagcttttctatgtttttgcattaggagtaattatgtgcccttgacatttttgtgctcagagtgcagcaatctgcctaacaagcatggcttgcttctccctggacataactactgagtaattggcaggcaggccggactgacctgcgccacacacagagccagagcccgctgccaatgcttcaggcccaagggctgtgctcctgggtgcatagcacagaaaagactgccaggctgtgtcaatctttttaatcatgcttacgcatataggttaaccacagttatgtaagcaggttctgagaaaaggtgagaaagagaatggagagttttgctacaacagaggcaggattctgaatttatttccagctgcccatcttgtccctcctggagacctaacccctccagcacctacacacacagcctctttagaagcaactatcctgccactgg

SEQ ID NO: 19659 - DNA, 2300 bp, Homo sapien
gatccaaagttccagcagcctgtaagtgcatgttgtcagggtgacctcgggcagtgtgtggccaggggagccctccatgccaatggcctcatgtgggcctcaatgagcagtacagtccctaagacctgcgtttgagggccctgcccatcaaaacacacacacacacacacacacacacacacacacacgcataaatttatttaaaaacatacaagcacctctgtaacttgggatctggcattcagtgctgcctcagtggggtgcataaccctcaacatccattctcatgattgatgccatgcaggctccagggaacgcttcttctcatctttagctcagtgccctaaaaacaaaaggttacagcctctcagtgccatgaaggatggtgacactgctgatgtttgagactaacattatgttaaatccaagaaaacctagattttcttttaaaggtcagcttgtcaaatccttcttctcagacagcatgaatgcagtgactcctgcattacaacgtactgtttcccaaggatgtgaatcgtccattttcttgcttctgtcagtgttccagtttgtggttccagatgtactcaagaattagcatggctttgcaacagttacacatgacacttaaggagtggcagtaattcttattactctaaaatttctatttataaaagttgaaaatcctgtatggatttagatattcttataagggatggtacaatttacaaaataagtaaaagcaacttacatgacaaaattattttgcatttttctgtaataacttattatattggtcccatgataatggatgacataatgtttaaaattcaggagttatttctaaacctgaggattgctttcatttaaaaaaaattctgttataaatgtttcagcaaagtttcttcaagttgaaattaataaactacactctaaaaacgacagcgactcaaggaaggttgtccaatttggcattagagcataatcttgattgcaacactacattaagggattttgctaaattagagaaaaataaatttgtggaaaaaacataaagatgatttatgaattgcttgtctctagaatattaggcatccagatatcaccagcccatcatcagaacagtgagacttctgtgataatggttaaattcagtcacttttgatgttttgctgacatttggtcatatgaacgccaaagctttgcaagaataattggcagtgtgagaatagaacacactttggcagctgaatttataacttttaaatatttgggcacatggcatataggcctccatttctcctcctgccccactgcgcaaatgttggtggcgggctggagtgggtggtaccgggatccgaggggctctgccttgcagtcccgcagcgcggggctccggggagctgcggggcaggtgccagagaccccgcccccgccgcccacctcctcgggaattggctgccctggtcctagggggcggccccagggtcgggatgaagtctggggtcgcgggcgcgggctgcgtggggtttcagttactcgtggagtttcagttactcgtggacaaagcgccgcgcgctagcatagcggcccgggcggagttccccttccctttccctttccttccacatccgcacgctcgttctccctccgcgccttgccctcctcccgactcctgggtccggccccttcgggggagggtggggcgctcgggtctccgggtctcgcgtgcgtgtgtccgagcagtcctgggcggtgggcgaaggcgcggcttggggacccgggaggggccggggcgcgggggctgcaggaagtggaggcggccgccgctcggggaccggcttggcggggtgagagacacccggaaacggattccgcttcggggcccgcgcgagttgggtgcttcggagggcgcgagaggagcgggcgggtgctgctgagtaatccccgcggcggcggccggacgcccacctcccacgccgcgccgcagccgggccgcggctcctccctccgcggtccttccctcctcttccctcccgtcttctcccctcccctcccctcccctcccggctccgcttggctccgggcaggtagagccgggctccgggcgcgcgcggggccgcagcagctgctcccgatctcgcctcggcccagcgcagggcctcgcacgcccatggccggctcggagcagcagcggccgcggcggcgggacgacggagactcggacgcggcagcggcggcggcggcgcccctgcaggacgcggagctggccctggccggcatcaacatgctgctcaaca

SEQ ID NO: 19660 - DNA, 2300 bp, Homo sapien
cagatatctgaccaaaaacaaaacaaaacaaaacaaaaaccaaaccaaaataaaacaaaaccctattttttaattcagaaaaaattagggcttccagagcactttgcaataaaagcaatgttaaggcctcagtcagcattatctggtgccattcattaatccacttaataattattttactgagtgccaggaaagctccctcttctcgggaagtttacatacttaaaaagggagaattagcgagactccgtctcacaaaacaaaacaaaaaaaagggagaaatgcttttagactgagtatgttggtgggtctgcagatatttttcatccttcatcacttgcctccagcaccactttggtaatgtaaataaaagtgagatgaggctgtcatgatttctgatagcttggtttataacacatttaggtgtcagagacataatgaactgagctactgaaaatcctaagtacctcatctatggtgtcttttggaattggagacatttatggtttttttaacgtaaccttggtgggtcatctcaaacatctattaggtgtaaggtattatgcagaaatacctgtaactcaaaaaacaagattttactctccatttcttcagtgactgtttggctgagtcattctgaaatgcaaattgttacaatgtaaacatctaaccaagaattttcaaaccactgcccatcgctgctttgatttcttgaactcttaatgatttgatgtggtttcacaatcttggcttgtgttcatctccctttcaatcaccagtatgttattttttggtcaccaatgatttaaaacgcaaatgtaccttccactgcccctctcccacaccccaaatccttaccctatggaagtccatggttgtgggtgtggcctctgcatacctctcgtatttcatgtctcaccatgtgattcccacttgaccctccagagtcttgaacacacatgtcgcttatcacctctgtgcttttgctcattaggtccaaggccttggatgctgctccagcaagtgttttcacctgactgcatcctgcttctcctttagaactcatctcagaaatctcctactttaggaagccagtgggttagaagcattttctcagtggccccatgatgtatgctctatgacttatccttgctatataattctatataattctgcttgtgtttgactcttctcccagatttaccaaatccttaacaaaagatgaatagggcaatgtttctctaatccacatcacctgcataagaaatcatcccaggagcttgttaaaaatgccttcccaagccctacctagaacctaccaaaccagaatctctatgtaaaacacggaaattgacaaccactggcctctgggaggaggaattaggcattacatagaggtcacctgggtttcaagtgtgttgcttctatttcatacccaagtcaactaggtgacagagatcagcccccttgctagctttcacaagaaagccagttaaattgtgctcttggtgatttctgcatactttactgaaaaaggagcattatctgttatggaccaactttctcttgctccccttatccttctctctttctgcatttcctcttctagcttctaaagtatctgcctcgactatgtatcttcttggatgatctcgatttaacaattttctttctacaaaatataccatctgcagaaaccaaaacagtacatcatgattttgtgaatgtgtatcttcatagtgaaaaccgtatttgaatacttgccaccatgatttgcttaaggaagaaatccactggaaaagtttacacagcaaaggtgtgtgtctgcgtgtgtgtgtgtgtgtgtgtgcatgcctgtgcatgtgctcattttaaaaatcagatatgacttgtcctttaactttagttggcagagacagaaaagtgcaaattcagtaaataattgacttacacaatatgtgacaataaatactctaattttctgtgacatctaaaagttataattctttactcagtagaagacagctatcaggtgctaaaataaaaaaaagatacctaacccaataaaggcaaaatcttagttatattaaccagcaaggtacatattacattattattactagaccatgcctccaagtgtgtcaaattataaaaatgtgttcagcatacataaaatatacattaaagatttctctcatcataggcacaatctaatacaaaaatatatttgacatttataagttagaagatccattgagagcctccaaaataggacaggggaaggaatgagtgatgacaac

SEQ ID NO: 19661 - DNA, 2300 bp, Homo sapien
agtcaggtgaaaacacttgctggagcagcatccaaggccttggacctaatgagcaaaagcacagaggtgataagcgacatgtgtgttcaagactctggagggtcaagtgggaatcacatggtgagacatgaaatacgagaggtatgcagaggccacacccacaaccatggacttccatagggtaaggatttggggtgtgggagaggggcagtggaaggtacatttgcgttttaaatcattggtgaccaaaaaataacatactggtgattgaaagggagatgaacacaagccaagattgtgaaaccacatcaaatcattaagagttcaagaaatcaaagcagcgatgggcagtggtttgaaaattcttggttagatgtttacattgtaacaatttgcatttcagaatgactcagccaaacagtcactgaagaaatggagagtaaaatcttgttttttgagttacaggtatttctgcataataccttacacctaatagatgtttgagatgacccaccaaggttacgttaaaaaaaccataaatgtctccaattccaaaagacaccatagatgaggtacttaggattttcagtagctcagttcattatgtctctgacacctaaatgtgttataaaccaagctatcagaaatcatgacagcctcatctcacttttatttacattaccaaagtggtgctggaggcaagtgatgaaggatgaaaaatatctgcagacccaccaacatactcagtctaaaagcatttctcccttttttttgttttgttttgtgagacggagtctcgctaattctccctttttaagtatgtaaacttcccgagaagagggagctttcctggcactcagtaaaataattattaagtggattaatgaatggcaccagataatgctgactgaggccttaacattgcttttattgcaaagtgctctggaagccctaattttttctgaattaaaaaatagggttttgttttattttggtttggtttttgttttgttttgttttgtttttggtcagatatctgccctggcgatgctctttggtttaaagtagttgctttttaaacatttgaagatggatcaaaattaaggctgcttgtactctgataatcatgattatggtgttatttagagcccagcccaaatacctgagcctaaatgagtgaaagagcagagagtgggcgtttttttgttttttttgttttgttttttgtttttttgagacggagtctcgctcagtagcccaggctggagtgcagtggtgtgatctgggctcactgcaacctccgcctcccaggttcaagcaattctctgcctcaacctccagagtagctgggattacaggcacccaccaccacgaccggctaatattttgtatttttagtagagacagggtttcaccatcttggccaggctggtcttgaactcctgacctcgtgatccacccgcctcggcctccgaaagtgctgggattacaggcgtgagccaccgtgcccggcagagtgggcgtttttaaatgaagcagtattcctttagtttggtaaaattgagctgaagttacacacagtaacaccttgacttgttgctgacggtgtgctttgtggggatagttggtgtctgatctcaactgtggagaaacaggaagtttctggattcatgctgaactcccattccacaggcgagtttcacaaaagaaaaagtgctctgttgcatacaattattcactgtgtgtctacaacgtggcagaaattattattcctaaaggtgaccgaagagagctatagtttatggggccaggagcaatgtgtggaatggcgaggcagtgacaagacagcactgccataaatctcttactttctttccaaacgagctctaattttaagctcaacgaccaaagacggagaggcagtcgctttgagctactcctggctatttgttgggaaatcacctaaatccgttcagatttagccagaaaaggggaaataagtctccctcgccggccaaatcatggcctttgtcgctttcggctccccattggctgcggccgctgtggccccgcctccttgagtggtgcggagctttgtgatgcggagcttcgtgatgcacgccccgatgcctgcggggctataaaaacgctcgcaagcgccaagtctcctcaggagccgccggcaagggggcaacgaggaagctcttaagagcgcggccggaaagcaggtggggagaatctggagaaaaggcgcaccctgcggcctcggagaccattatgtctcagggagtctctcgcag

SEQ ID NO: 19662 - DNA, 2300 bp, Homo sapien
tagatgtttgagatgacccaccaaggttacgttaaaaaaaccataaatgtctccaattccaaaagacaccatagatgaggtacttaggattttcagtagctcagttcattatgtctctgacacctaaatgtgttataaaccaagctatcagaaatcatgacagcctcatctcacttttatttacattaccaaagtggtgctggaggcaagtgatgaaggatgaaaaatatctgcagacccaccaacatactcagtctaaaagcatttctcccttttttttgttttgttttgtgagacggagtctcgctaattctccctttttaagtatgtaaacttcccgagaagagggagctttcctggcactcagtaaaataattattaagtggattaatgaatggcaccagataatgctgactgaggccttaacattgcttttattgcaaagtgctctggaagccctaattttttctgaattaaaaaatagggttttgttttattttggtttggtttttgttttgttttgttttgtttttggtcagatatctgccctggcgatgctctttggtttaaagtagttgctttttaaacatttgaagatggatcaaaattaaggctgcttgtactctgataatcatgattatggtgttatttagagcccagcccaaatacctgagcctaaatgagtgaaagagcagagagtgggcgtttttttgttttttttgttttgttttttgtttttttgagacggagtctcgctcagtagcccaggctggagtgcagtggtgtgatctgggctcactgcaacctccgcctcccaggttcaagcaattctctgcctcaacctccagagtagctgggattacaggcacccaccaccacgaccggctaatattttgtatttttagtagagacagggtttcaccatcttggccaggctggtcttgaactcctgacctcgtgatccacccgcctcggcctccgaaagtgctgggattacaggcgtgagccaccgtgcccggcagagtgggcgtttttaaatgaagcagtattcctttagtttggtaaaattgagctgaagttacacacagtaacaccttgacttgttgctgacggtgtgctttgtggggatagttggtgtctgatctcaactgtggagaaacaggaagtttctggattcatgctgaactcccattccacaggcgagtttcacaaaagaaaaagtgctctgttgcatacaattattcactgtgtgtctacaacgtggcagaaattattattcctaaaggtgaccgaagagagctatagtttatggggccaggagcaatgtgtggaatggcgaggcagtgacaagacagcactgccataaatctcttactttctttccaaacgagctctaattttaagctcaacgaccaaagacggagaggcagtcgctttgagctactcctggctatttgttgggaaatcacctaaatccgttcagatttagccagaaaaggggaaataagtctccctcgccggccaaatcatggcctttgtcgctttcggctccccattggctgcggccgctgtggccccgcctccttgagtggtgcggagctttgtgatgcggagcttcgtgatgcacgccccgatgcctgcggggctataaaaacgctcgcaagcgccaagtctcctcaggagccgccggcaagggggcaacgaggaagctcttaagagcgcggccggaaagcaggtggggagaatctggagaaaaggcgcaccctgcggcctcggagaccattatgtctcagggagtctctcgcagtgggagaggtcgtcggggcaggcggagggtcctcagagtcgggggtggggggcctgtggggcggccccggcccacaccggggagtgcggcgaccagacggccagctgccgaatctgaggcctcggtgggtccgtcgcccgcctctcttggacaagtccaggcgatgtgagcacgcccagcctcctacatttcactcccgtctctcccaaacagacctagcgcaaaacgagcactgacacagcgggggcccacatcccggaggttctttagggagaggtcggggagtgcggttacctatggctccgaagtccccgctggcatcctgaaaggcatcgtatttctcgcttaaggcgttacccttgtggtagtgggcgcatggacgtttacagttgggcggggcaggatttaaattccgccagtggtggaccagtattggtgataggagagatctgggaagaattattaagctgtcgcttttaaataaccctaatag

SEQ ID NO: 19663 - DNA, 2300 bp, Homo sapien
gcagcatggagacaggcaggttggcatcctgagcccccactggctcccgggtgctcccttcttgcctgagctcagcgcgtcgtaagtgcatcatgctgtccatccctctggcatctggctgggaggatgtgttgggttaggacttcactggggcttctttagtagctacttagcggtaaaactggtccttattaaatataagctggtgcagcctagtcagtaccagccctccagacccagcaaggaatgattttaatgaagataaaagaatgttgatttttgcttagagttctatttaaagttgatcatgatagaggatatttattctgcaaagcctgctttgagatttttttgagagatacccacagatggtgcagattttggtgaaaacatttagatacgtgtgatctgagaaagactgaccattgttaccatgaaagggagggggtcattgtcaagtcaaccctcttctactttcaggatgtttcattttgcattatgccttggcatattttaatttcttccttttgcttcttttcagatgtataattttactagttttgcaatggttttgaatgaagtagacaaagacatggagagtgtgattcccaagacagactgcaggttacggcctgacatcagagccatggaaaatggagagataggtaactagcatccgccaaagccaccagtgaagactcatttctcgggggatgatgctttgtttattcctggtgattgttagcatcattggggtactagcgtttttagtctctcttagagattaagtttgagttaacattcaatttaaattcagtaacttttattttaaatttggaaatctgcgcagaccttattagctcatattattgtggtaatactcccctgagaatttaatatactggagatggccagaggcatattccgactaataaagtcactgtctacttcagaatttacatagcaccttgtcagcctcagaggagagtgtggcctccccttggttaagtataacttacatgtttttgtgtgttggtataagtaggtgtatatacttatgtagtatgtgggatattttgatacaggcatgtaatatgtaataatcacatcagggtaaatggggtattacaacatttttttctttttttatacagagtcttgctctgtctcccaggctggagtgcagtggcgcaatctcggctcactgcaacctccacctcctgggttcgagctattcttgtgcctcagtctcctgagtaactgggactacaggcacgtgccaccacacccggctaatttttgtatttttcgtggaaatggggtttcaccctgttggccaggttggtcttggaccttctgacctcaggtgatccgcccacctcagactcccaaagtgctgggattacaggctgagccactgtacccagcccatttttatcttatagtgttaaatttcttccaactcagtggttctcaaaaggggggcatttttccccccaaggagacatgtagcaaagtctgaagactttggttgtcactttttaggagggactgctggcgtctgcaggccatggatgctgctaatcatcctctcccacactaggcagcctcttatgatagagccagcacatctaacatgttatagtgccacagtggagaaaaagtgagacacagcaacagtattttggaagacagtttaaattccttaagaatggcatctgaagaagctccgtgaggtctcctaagaattcagaataatttcacatttatttagtttttgcacccaagttttcattgaagaattttaacacagttgttttggccttaagaataaacacgttgttcttggccaggttgttaagagcataggctgtgaaagagatgctgcgtctgtgataccagctctgcctcttactagcccaggtatctgttaaaatttttgcttgatatttgattctggtatttgtgttctaataaaagggagataacatgtagatatggttcttttgtgaagttcttgtgcttaatactgtgcctggcatcctctgtgtagagtgttaatggtttgtgttgatgttcttattttagatcaagctagtgaagaaaaaaaacgacttgaggaaaaacaaagagcagcccgcaaaaacaggtccaagtcagaagaggactggaagacgaggtgcgtgcctgagtcagggggtgtggctgagccctcaggcaggctgctgtgtgcagacgaggcagggatgccagacactgtgaccccagagcaagggcctatctaacacaaaccctgccga

SEQ ID NO: 19664 - DNA, 2300 bp, Homo sapien
atccactgcttttctggtctctctcattcctgtgttcctgtcatctgcctaccatggatttctgacgttcctgaacacagacgctgcgggaagtttgtgtcattagcgttgtcacctctgtgctattttgtaaactgtatattcactgaatgtgtctcagccagtagttctagatttgttcactgtgtgatgctgggactatgacttacccttccaaagccttcattccatatgtctaaaaagcggtcgtgacctctcctcgagggattgctgcataaagactgcatacatacagcactagcatagctgggccgcggagaggggagcccgaggaaatgctggctccctgtatttcatctaatgaaaaattctcttttcatcagatgcattcaggatccctcctggttttgtggcatcgatacatttagttgacttccccaagaatgtaaccttttgttgttctcagattgttcctctctggtgtgtgagctccacgaaagtcaggtagtgatggtgcttctctagcaccccagttgctgggcctccagtagttccttagtagatactcaaatgatgctttgggaggctgaggcaggaggattgcttgaacccaggagtttgaggttacagtgagctgtgattgcaccactgtacttcagcctgggcaacagagcaagaccctatctcaaaaatattaaaaataaatactcaaatgaattattttgtctttaagaaggaaacagccttaaaaacataaaaccctataggaacgagtgatgatgataatgacttaaatgtggataacactaagtggcacaacacacgaagcttgtgagactcttagcacccactcgggcattcagcaggtatccgttggcttcccacactgtgttcaaagtaaggatataagaattagaaagtcacagtgtccctgccctcatgtagtttacattctagtggtgtgcaataaacgatgatttacaatttgtaagtgtatatgtattttcctaaggacagggatatgttctaagaaatcattaggtgatttcatcattgcgcgaacctcatacagtgtacttacacaaactaagatcgtgtatgtatttttatgtatatctcttttttcatgtggaaagccaaaagtcctaacaccgttactgagtatcggtcatttcccttacttgatccacagtgccaatatcaaatgccatatagcagatttctatacatgctccgctataaccttaggggactgccatcatatttacagtctgttgttgactgaaaatgtcattatgtggtgcttgactgtatcttaaaactttctacttaaattttgttcattgattggtttttctagatgagcacctctgaggagttggatgaaatgccagtgccggattctgaaagtgtattcattatccctggaagcgttcttctatggcgaatagccccacggcctccaaattctgcccaggtgagactgggcttgctggctgtggcctcactgtctgtgtttagcattgtggcgctctttcctggcacgtgtagggtcggcccaggcagcatggagacaggcaggttggcatcctgagcccccactggctcccgggtgctcccttcttgcctgagctcagcgcgtcgtaagtgcatcatgctgtccatccctctggcatctggctgggaggatgtgttgggttaggacttcactggggcttctttagtagctacttagcggtaaaactggtccttattaaatataagctggtgcagcctagtcagtaccagccctccagacccagcaaggaatgattttaatgaagataaaagaatgttgatttttgcttagagttctatttaaagttgatcatgatagaggatatttattctgcaaagcctgctttgagatttttttgagagatacccacagatggtgcagattttggtgaaaacatttagatacgtgtgatctgagaaagactgaccattgttaccatgaaagggagggggtcattgtcaagtcaaccctcttctactttcaggatgtttcattttgcattatgccttggcatattttaatttcttccttttgcttcttttcagatgtataattttactagttttgcaatggttttgaatgaagtagacaaagacatggagagtgtgattcccaagacagactgcaggttacggcctgacatcagagccatggaaaatggagagataggtaactagcatccgccaaagccaccagtgaagactcatttctcgggggatgatgctttgtttattcctggtga

SEQ ID NO: 19665 - DNA, 2300 bp, Homo sapien
ttttcaatgatagtttgtttccttctgccaaaattgacaaagaaaaataaatgtctctttaaatgtattattaaaatgtccgtttctggccaggcgcagtggctcatgcctgtaatcccagcactttgggaggctgaggtgggcagatcacctgaggttaggagtctgagaccagcctggccaacatggtgaaaccccgtctttactaaaaatacaaaaaattagctgagcatggtggcgcatgcctgtagtcccagctactcgggaggttgaggcaggagaattgcttgaacttgggaggcagaggttgcagtgagccgagattgcaccactgcactccagcctgggtgacagagtgggactccatctcaaaaaaaaaaaaaaaaaaaaaatctgtttctttgttatgaggtataggacagaacaaaactatattttcagaaattttactaaagttatatttacagaaaacaaaactttcccaacattaaaagcctttctgcaggtaacttagatcatttatagggtccagcgttgagagccaaaggtgcattatctaacctgcacttgggctggtccaaccgtcgttctcctaagtcagcctaatgtggtaacagtaaggttctgtgatttttgctgaattatgtaatgcagtagtggaaaaagaaagcactaaaacgttgttatttcctgaccagtttagctataatacaaatttagcagattgttgataaatttattgaaataggaagtttgctggaatgtgtatcagagcctttcttagagctgaggatgagggaatggcttgtcctctgcttaagatgggaagttggaggtcgtcgtgaatttccattttaatgaaaaactcaggcaccatttaaagtttgatggagactgagtgactgctgttttgagccaaaatacataaaacattaaacaaggagtcagaaaacctgggttcaaatcctgtcttgcccactcacaagccatgagagaccattagcatgcttgttaataaccacattgtcctacctcacctccactaaagcatccttttgatgctcaaaagagatgaagaatgtgaaatgcctgaaaacgctactgtcgtgtacaaaaatgcgttgtcttcttcccaaactggcagatggcaccactctgaatatatagccaattggaaatgtgacctttccatcctaagaatgcctgcctgacaattactatagggttgcttcgggcttttgtccttgagaatttaaatattatcatcctggaaaaagtatttttaaaagtattttatttatttttgtatagagacagggtctcactctgcccaggctggagtgcagtggtgtgatcatagctcactgcagtctctcaactcctgtcctcaagtgatcttcctgcctcagcctccccagtagctgggactacaggtgcacaccaccatacctggctgttatttttttgttttgaaactttttgtagagatgaggtcttgctgtcttgcccaggctggtcttgaactcctgtcctcaatcagtcctcccatcccagcctcccatagtactgggattacaggtgtgagccactgacccgacctttttaaagtatttttaaattactttacttttatgtctacagtattggatgtaatttaaacttctcataaggacagctagctactacagctttttcattatacatgagttttaaaaattaaaatttttttggaagttatacttaagatgctttgtgagggaagaaagaggtggaaattttgggggcaaccactgaatatgatttcgtaaagaactgagtaatctttggagatgtcttttactatgtgagatctgtttacttgtaagcttatgtaagtgtacctctgtttgataaatccacttcagccttatattaggtgcaggttctgtgaaatccctgaggaggtagttaacagatggattgttgagggacaaagtaggctgcttaggtttcaaagcctgaggcatgaagggagggatccattgttacggaagcctcacacccaagttcaattcattaactatgaacctgctctgccacagattccgagtccgaaaggtccctgagtagattggaagcagtgacagcacgctcctttgaagaggaaggagagcatttgggcagtagaaaacacagaatgtccgaagaaaaagactgtggtggcggagatgctctctccaatggcatcaagaaacacaggtaggatcgcctctgacagttgtcactgctgcgtttttacgataaagtacatttggattcat

SEQ ID NO: 19666 - DNA, 2300 bp, Homo sapien
agtaattcaggccaggatcatgggaactggctttggttcatcctccttcttcctccctatctttaatcaagtcccgtcaatttttttttttttttttttgtgaaggagtctcgctctgttgcccaggctagagtacagcgacacagtcttggctcactgcaacctctgcctcctgggttccagcaattctcctgcctcagcctcctgagtagctgggattacaggcacacaccaccataccctgctaatttttgtatttttagtagaaacggggttttaccatgttggccaggctggtctagaactcctgacctcaagtgatctgcctgcctcggcctctcaatgtgctgggattataggtgtgagccaccgtgcccggttcaatttggttttttaatatcttggttgcctatctccctttattctgtcttccctgactccagcatacagttccccattgctgttctgtgagataaattctcaaggctgctctgttggatgactgtaaccatttcctcatacaggctccacccttcaaaactaggtgaggtgtccctgctgctccatgagttcctggctgtcatagcatttatcatattgtatcattatatattcacaaactggagcttcctaaggaagcaactgtatcttagttatttttgtagcatggtacttggcatgtggtagatggtgaataaatatttgaatgaatgaataatgaatgtacaaaggaaaaaattcaggctttgggatcagaccaatctggatctaaactctgctacctcgaccttgaacaaatgaatatatgtttaggaattctgtttccacatctgaaattgagcgcatatatgtgctattttatgtgaggtgcttcagtacagtacctggcacatttaggagccatgtagattgccttttaaaacaagaaggtaatttgttgttcattgttttgctacctagcactacttttataaactgaattcattctctaattttcagggcctagggagagattctgtagcagggactcctctttccatacatgatttttccaagtacagtaacagttattattctgagtgaaaaaagtaaaagaaatgaactgacttttcaaagatgccatgaggctgggcgtggtggctcacgcctgtaatcccagcactttgggaggccagggcaggtggatcacttgatgccaggagttggagaccagcatgaccaacatagcaaaacccccgtctctactaaaaatacaaaaaattagctgggtttggtggtgcaggcctgtaatcccagctactcaggaagctggggcacgagaatcacttgaacccaggaggtggaggttgcagtgagctgagattgtgccactacactccagcctgggcgacagagcaagactctgtctccaaataaataaattaattaattaatacaataaaataacaatgaaaacaaagatgccatgaaacctcactgacattcattcccaattttcccagcatggcctggaatggtctttaacacattctaggtctgtagtgcaattacagctaccaccaacttcaatgggacttaaagtacctaggatcttgtgaaagaaatatttaattttgttcatttttactctgaactcactaaagtatgaggacagagttaaacactttagtaaggtgaaaggtttgaaacatgttgaaacaaaaagatttctttccctccatcagagtgttacagttaaccataaatttcattaacctgaacatcccacttaagtgtggtatttgggtggtgggttttcctgtcctctgaacctttgcccttcaagcctggctggaataattttacctaagtaggtttcacggtagtaggattaataccgttgttttccttgttgctcagtgtcccaactagggtataaacaataaatatgtgaagactgcctttcagtcttggttttggaaccgtaaacgcgaacgcttcagcgtgagccggagtaagtgacaggcaggactggagagaagattcctttgctttccagagtttcccaaggggcgggttggttaaaaaaaaaaaaaaagaaaaaagaaaaaaaaaaagttgccagggccggtgtctccaggagagggccgagcgcacagcagctctaggacctcgcaggcgcctcggcgcggcactcacgtagagcccaaggagcagtccccgacctctcctcggagggccgtgcaggcttccccggcggtccctacctgcgcctccgcccgccagcggcgctggggaaggggaggagcggcccggacgct

SEQ ID NO: 19667 - DNA, 2300 bp, Homo sapien
tctcctgcctcagcctcccgcgtggctgggattacaggtgcgcgctaccatgcccagctaatttttgtatttttagtagagacagggtttcaccatgttggccaggatggtctcgatctcttgatctcttgatctgcctgcctcggcctctgaaagtgctgggataacaggcatgagccactgcacctggcctcttttttttttttttttttaatagacagagtctcgctctgtcgcccaggatggagtgcagtggtgtgatctcggctcactgcaacctctacctctaagattcaagcaatgctcccacctcagcctcctgagtagctgggactacaggcatgcgccaccgcacctggctaatttttttttttttttttttttttttttttttatattcatattcatgtttttattgggagtctggaaatacgcaccaatgtatacacgtgagttatctatgggtgagggaattgttttatgtgtatgcatgtagtttatctatttgatataattttttttttttttttttttttttttttaactttttcagaaaatttattgagagggagggagagggcaagacagaagcatctgaaatttagtcttctgcctgtgagggccctctggctgaagttcaaaaggaaagaggagctttgcccaaggaaaactattcaaaactatgtttggtgcacttgggaaagcctggtggtgcattgttggcccagaacaggttctctgggattcaaaaggcagggtgaagcttttttttttttgagacggagtctcactctgtcacccaggctggagtgcaatggcgtgatctcagctcactgcaacctccgcctcccgggttcaagcagttctctgcctcagcctcctgagtagctgggattacaagtgctcaccaccactcctggctaatttttttttttttttttacccaaatgagtataaatcatgctgctataaagacacatgcacacgtatgtttattgcggcactattcacaatagcaaagacttggaaccaacccaaatgcccaacaatgatagactggattaagaaaatgtggcacatatacaccatggaatactatgcagccataaaaaatgatgagttcatatcctttgtagggacatggatgaaattggaaaccatcattctcagtaaactatcgcaagaacaaaaaaccaaacaccgcatattctcactcataggtgggaattgaacaatgagatcacatggacacaggaaggggaatatcacactctggggactgtggtggggtcgggggaggggggagggatagcattgggagatatacctaatgctagatgacacattagtgggtgcagcgcaccagcatggcacatgtatacatatgtaactaacctgcacaatgtgcacatgtaccctaaaacttagagtataataaaaaaaaaaaaaaaaaaaaaagaaaaagcctcaccctggctgggtgtggtggctcacgcctgtattcccagcactttgggaggctgaggtgggtggatcacgaggtcaggagttcaagaccagcctggccaagatggtgaaaccccgtctctgctaatttttgtatttttagtagaaatgggatttcatcatgttggctgggctggtctcgaactgctggcatcaagcgatccacccacctcagcctcccaaagtgctgggattacaggcatgagccatggtgcccagtctctttttgtattttttattgttttttattcactcatctgtctcttctttcgacagtatcgcattaaaaaaaagtttttaagatagtattgcacttttaatggttataatgttttaatatgtgagatttccccttaccatttttaaggattttctttgacatccttatctgtttattcttccagaaggcatttaaaataattttctgaggctcttcattgggatttaattgaaattacattctatgtaaattaatttaaggagaattggcatctttattaaattttcccattaagggacaaatctgtgtcatgcaaacttttaaatattacatcattcctgtttttcactttattttgttgtggttggtaagagagatagtgtattttttaactggtggtggaacccatctagattccatctaggaggctatttcatttagttcaaaagcattttattgaattcttactgtgtgccaggcattttagacatcaaatccagaaatgaggtctctcttctggaatttcatctagttggcaggagttcagaatttatttttggtattagggcagaat

SEQ ID NO: 19668 - DNA, 2300 bp, Homo sapien
ttatagaacatttctatcatcgcagaaagttccattagacacagtgttctagaataatgaattctgttatgccatcatggtgattttacctgtactagccgtcaataatataaatgcccatgagatatcttttctgcatattttatggaaataccaaataaagtcctttaaagatacagtataaatagtaatgctatcaagattggaacttctcttattgataactgtagtgattactacttcatcctcctattgactgcaatctgtttttcatttgcaaactgtagaagggagttgcaaagtgcaagttgtgaatttaggtaattaaatcatcacagagagaatgaaggctttcatggaatcatggaaaattatttcagtagccaattattattgtcattatttcggtagttttattttggctatgaagatggttcaaggctgggtgtggtggctcacacctataatcccagcaccttgggaggctgaagtgggtggatcacctgagatcaggagtttgagatcagactgacaaacatagtgaaaccctatctctactaaaaatacaaaagttagccgggtatggtggcacgcacctatagtcccagctacttaggaggctgaggcaggagaatcgcttgaacctcggaggcagaggttgcagtgagctgagattgcaccactgcacaagagtaaaactccatctcaaaaaaaaaaaaaaagatggttcaatatccttagatagtaagccctgaggtttcttcttttccagacaaatacagctgctttagttaccacacattttgcagttgaagtattgtgctagtaaagtgcctgctttgttaataaaagatgatgccagcctgagatacaccagcaggattgcttgtggtatccaaaaacatcatttcaaaagatctgccatatgctgtttcacacatatcacaatgaccaaaagggcctattataggttctcaatacatgcttctagacttgatggaaaaactacagtccttttaaaaatgatacctatttattactttttcattgcaaaagaacatgttcattaaatacatttagaaaattcaggaaagcagaaatcagttttcgtatgctcgtaatttcctgtctttttagttatgcagaaatgcttttaaaaagcaaagctgtggcctgcaggggtgactcacgcctgtaatcccaacactttgggaggcccaggagttggagaccagcctgggcaacatagggagagtctgtctctactaaaaatacaaaacttgtccgggcgcggcagggcgcgcctgtagtcccagtcccttgattacccgcctgtagtccagctgaggccggaggatcgcttgaacccagaagacgatgctgcagtgagccgagatcgcgccactacactccagcttgggagacagagtgagaccttgcctcaaaaaaagaaaaaaacaaaaacggtggaattatactagagtttgaaccttcacgttatagactatttgctaactcctctagctagacgccttgtgcatggaatctggaggagaggaggtgaggaaattttgtaaatccttgtctcacgcatatctattctataatggttacacctgtatggcattttaagcgcttcctttcacaggtgaaagtaaaaggaggtgtttttttgtaaattgtctaatttacattgccaattaagttcccacgggtcgagttgcagccaaagcaaaaaagaaaaaaatctgggcagctggataacctattgcttaatgacagacttcagactattaacccaggacttatattttgcctggggacgcgagtcttccactggctcacacgggcggttccttgtagtctccgggtaaggcctgccacttcttccctcggggtgtggtgggaggagcgcgaaggctttacgcgtccctagtagctggcaaaacctggaaccagcgccggtggcccaggcgggacaggagcgggccgggggcgtgggcaggccaggcaggggcggggagtgggcggggaacgggcgtgtccccgctgcggtcacgtgtcgggagggatgccagctcgccaggaggatgcgcgttccaggggcgggctgcggggaggggcggcgccacctcgcgctccgccgtggtcccggcgccgggtcccggagacagacgttacgcgggctcgagcgtcctcggggagtgccagccagagttggtgacgaccacttcctcgacgtggggcgggcggacgggaagcctggggtcgtggccaccgcctcgggagctctgggagcc

SEQ ID NO: 19669 - DNA, 2300 bp, Homo sapien
ctcaaaagaagacttaaaatgtagctttgaggaaataggaattaatagaaaatcatgggtgtaatctgtagaagatggcctgggttgctatgatatgtggtaagaatagaggtactatgtgtaactaattgaatatattgtgctttgtttagaaggttaagttttaacatggcgtttttcaaacttgggttttaaagttttagtggggctgctgggagggagggagtactgctaagtacttgggacttctgtcctatttccacttcagccagaacaatcagtcctattttcatttcagccagaacaaatttgttttacataagctttcattgaagaaaaggttccatggccttttaaaaaagtgtgaaaaccattatgtttgcatagaagctgcagaaatatgaaaaggtcagtgaagaaagagttcagggatgggtgtggtggctcacacctgtaaacctagtgctttgggagattgaggagggtggatcatttgaggctaggagtttgggaccagtctgggcaacatagtgagacccccatctctacaaaatataaaaaataaatagctgggtgtggtggcacatgcctatagtcctagctactaggggagctgaggcaggaagattgcttgagcccaggaggttatagtgacttatgctgatgaaccaaatatatgacagtggtctcataagaccacttgcatgtccaataccatatctgtaatatggtatttgtactaccatacattatggtatttgtactaccatatttgtactgtaccttttctttgtttagatacacaaatgccatgtgttacaactgcctattaggtacagtaacatgctgtacaggtttgtagcttaggagtaacaggcgatacatagcccagataagtagtaggctataacatccaagtttgtgtaagtgtattattctatgaagttcgcactatcacgatgaaattaagggtaaatttctcagaatttatccaatctttaagagattcattactgtacttctggttcaggtttacttttgttcccttcacatcttagccccttaaaggctatgtatgacatatgattttgcatctccagtgtttagcacagtaagagcctaaaaaatgtctgttgaactagtaaatccacaaggtttatactcaaagtaatgtaagtggaattctctacaggtgttgaactcctaactcttgagaagagttttatttttctctacaatgatttatcttaagacaacggttttaaagaggggcagaaaaatacccatgattaagggagaaagatgtaatattttgagtttttgtatattatgtgtgacgaaaagtgaagcaagcaaggatgccttgcaatcaagagatgtcttgactgaggcgtctcgaataaggtggttgatataattcataaccaatgtattagaatgtcattgaacttgtgggcgagggagtaatgacaaactgattcatttttttgggaaaatgaatcaatgctccttatgttgactggcataactagtgactggcacaaaagttgcccccaaaatattcgagactaaagaaaacgatcgcaatacaacagtgaatgggagaataaggttccccctcacgctttcaaaattaccgcctgccttctctgttctccagttttggtaaatcaaacctatctttgccaaaatccgacaaaacttaaaacatgttaaaaacagacaaacaaacacacaaaaactctccctaggaatgtaaagacgagtctgggactgtggactgaggtttgagtcccttcccgggacgcggtggtaaatgactccctaaagtctcctggccattccgatggcgccaaggccgcaatgggcaagcaaaagccccccgccccggcgcattcctaggagacagagccgtgagggcctctggctgcaactcgcgagggtcggctttccctgggtctccgccctacgggagacagtgaaggcgggagcaaggccccaaccgagaaccccaccccaaacccgggggccaggagccctttacacccttcggcccgccacccggaagcagatgccggcggcgcggcgtggcagggttgtggttccgggtcgggccgcgccgcagccagctctcggctcgcagccgcagcgccccgcccccgcgctccggacctggcaggcggcggctgcagggcaggtccaggggccacatggctgagggggacgcagggagcgaccagaggcaggtgaggccccggcggggtgctgtctctccaggctcggctccggctcgcctcgcc

SEQ ID NO: 19670 - DNA, 2300 bp, Homo sapien
aatatagaattctaggttgagttttttttcctttcaacatttgagagatattgcagccactgtttttctgcttctgttgcttctgatgagaaacatgctgacactcatacctttcttattttgtatgttatgtgtcccccctcaacccctgctgttcttaagcttttctttttcacactggttttgagcaattttatttgatataccttgtgtagttttctttgtttcttgtgtttggggttcattgagcttcttggtttatatttctcatcacattttgaaacgttttaaccattgattcttcaaatttttttctgtcctttcctttctcctttcctcctgggactcctattagacatatattaagtcacttgaagttgtcttctaccttagtgatacactgttaattaaaaaaaatctcttttatctctgtgtttcattgtaggtggattatatcattacatgtttaagttcactaatcttatcttctgcaatctctgccattaatcctttccaatgtatgtttagtccagaccttctagtttttatttctagatgtttgattaaaaaatcttctatatctttacatatctttttgaaaatatggaatacagctatattccattttcgtttttccatattccatctgactattttaatgttcttgtctgttaattctaatatctgtgtgatttctgagttgacttcaattgattgatgtttttccccttattatagatcacatttgcctgcttcttggcatgtcagataatttttaattggatttaagacattgtagttttacattgttgggtactggatatttttatgttatataaatattcttgagctgtgttcagggttgcaattaagctgcttggaaacagtttgatcctttcaggttttgcttttaagatttgctaggaagaacccaagaaatatttagtatagggctaattattcctgactactgaggcaagacccttctgaatgtactgcccaacgtcccatgaattaggaactttttccatttggctaatgggagcaggcactataaccagccctctgtgagcattgggtactattgcctctaatattttcgagtggttctttttcttgcctaaaaacagttcctccacaagtgctaatcagtactctggtgaatacttgaagggggtcctctgcagatctctggagttctgctcagtgtggctctgcagttcagaatcctctctggtactcctgtactctcaactccatttcctcatcccagggagtctcctgggctctgcctggatttcccctctctgcccatgccctgggaactctcaagatagtaaggtggggcaactgcagacctcatccgttctctcagggatcaccgtccttccttgttaatgacaagtgccttgaaaaccattgtctagttttttggctgtttcagatgggattgtgaaattcagcccctgttactccatcatggccagatgagaatattgaactgaatctacacgagttttaaaaatggcctggtgtggtggctcatgcctataatcccagcattttgggaggccgaggtgggtggatcactttaggtcatgagctcaagaccaacctggtcaacatggtgaaaccccatctctacaagaaataacaaaaattagctgggcatggtgatgagtgcctggaatcccagctacttggaaggctgaggcaggagaatcgcctgaacctgggagacagaggttgcaatgagccgagctcacatcagtggcctccagcctgggcaacagagtaagactccatctccaaacaacaacaacaacaacaacaacaacaacaacaacaacaacaatgaaccttgtgtgagcccaatttatttcctgtataatgattatattttatagatattacatgattttattctaataatggagatggatgcatcacagtaaaatgtttaaggtaaaacatttcactgttttttggaaatactttctcagtgtcagttaaagggaaactgttaccacaagcttactttatcaagaatcaggaagtactatgagatcagcattagattaaaacagtgttgttttgagtggaagactacacattttaggtatgtgattagaaaacatacttgtcagaattgtctggctggattaatttgctaatttgaccttcttcatcatttgatgtgatgccagatactaatagcacaatcaatttatcactaagcactcgtgttactttagcattttttatgtccttagtagcttttgctataatgctaggaaatg

SEQ ID NO: 19671 - DNA, 2300 bp, Homo sapien
acagtcctgaattgtctctcctttgaatttttatgctatgtaaacaaaagatggtctaatgctctacttatttcctttcccttcttgaagaatttactctagagtgggcagttatatgtaactttgcctccttgacccctgctgagttgactacaatggacactggacccatattagagccaatcatatagtttttcctgggatatgtaattgaaaacagagaccgggtcattaagatggtgctgggttactggtactaataagaccatgtacagttgcattcagagtgggtgccatgacaacccatacttctcacaaatattgattgactgaaggcctaataagtgcccatcattgtatggggcaataggggaaaaaatcagctcaaacacctgctctcatggatcctctattctagttgcagggcttcattttagctatagtcaggcaaaattacagaagagcagaaactaggaagctaagagcaagacaatctgcagcaaagagaattgagcgggttgacaagagactctgcagcctctgaaagacagacttggagatttggagatttgagctcacatagttcccatggggcccaactatgcttctaccactacctctattgctattgttgctgctattactggctaacatctattaagtacttactatgttccaagcactaggcaaatttcttgatgtgcatctaatagtttcaatacccttatgatccagacacttttgttatttccattttataagcgaaggctctgagatggtagtgagttacttgagaatgccagccagtaaatgacgtaacaggaacttgaattacaggccatactgtttgcaaattggtctcatcttattactctgtattcctaaaatacccttgtaataaactagctttactgggtgtctgccccttccaatcaacaggtaccttagatagcttgctatgtttagcttagactgcaggcaggtagacagagtagttctctatttttctatcattctacaaatagaattgtagcaaaaataaaccccattttgaaaatgttcaaagttagacatttgtatcagtgttttggtttgaatattcatttcttcagttgtatgactaaaattagtggtttcgtcctttgtgggcacctgagccctggccagaggggtagggttgggagggggctggcaagagagtttagacaaggagggtgtaaatacataggcatatcaataaatgtttgtaaaccaagtaaataatatatcttgcacacatgtgaaccatgtgttctaaatggagaagtagttaatatctataaaacaaggattcctgtaaaataattactgaacccatactagctttttgtcagatattttctatatcaacagacactataattgagggatatatgagtctgccctttttctaaaattaagagtaaatcctcataattagaagttgagaatcactatagtaaattctattaaaaggatatcaagcctttataatgtgaaaggcagatatgctgctgtcattcacaaatcccatctaaatagcaggcagctctcactgataaggacacgctttctgacaggttccaatacaacctcacactctcattatgatgctcaagcagcctctaccaatggattggagttagcctgtgagatgctgcctttcttgtttagaaaatgaagaactcatgttgttcaatgaccatcccgtgatttttcctagggtccagatagagcattgagaatcagccagttagttttaccagacacgtcttgcttatttggctttgtgtcagtgttcttgagtcaccaaatctggtgcctttctcatttcagtttgtcaactgggtaaaacaaaacttacctctgtatatggtattaataaacaaatgttgttgagcttctgtagagagcagtagttgtggagtaaatgttatggcataattgaaattatgtcttttaactccctaagcaacagacctccctccccacctgcttaaaagttggagttattattcacatcctgtttaaaaatagcacaaaatctgcagcaggatgggcgtggaagttgtctgtagctttaatcactaatgacctcatcttcaaatggtcagtgataataaacaagaaggagggatttccaagggagcagagcattaataaggtaagattttaaaattaatttttcaagttaattaaaatgtccaaaagcacaataaaactacagaaaatctggcaagggaatggcagcaggactgattaatgcaagtcaattgtcttct

SEQ ID NO: 19672 - DNA, 2300 bp, Homo sapien
caagacataattattattgtgttttctgtcttctttcatgtgcttactttttaatatttttttgctgaaagcaataaggtctgtatcaataagaaccccgtaacagattttggtctgcagaattgcctttttatataaaaacaagcaaaatgcagagggaattttttattaaatattagacatctgggttgactgcattaattttaaatcattcccgtaatatttcctcttttcatttggttcttcagatgctcacataatatgcaaatcattttagaaggaatacaaaagaaacattaaatatattaaaatctgcattttaataaaattgtcaatgtgtaatatataccttgcttctaaggaagaatgataaaaagtaataaaagggtaatttagacatagaactatttaatatcctcttatattttacaactcaacaaaaagtaaatgcagaataactgctttgggctcagatttgaaaatgtctcactcaaatattctctcttttcattttgttttttcttgaaagattcaagagggcccaactctgcgtgctggttgaaatgctacggtaaactcactcttgaatctcaacatgtcagatgaaatttgtcattgcttcttgttgcagatggagtggatgttgaagatgatccgacttgctcttggccagcttcctcaccttctagcaaggatcagacttcccctagccatggagaaggttgcgattttggagaggaagaaggtggccctgggcttccatacccgtgtcaattctgtgacaagtcgtttagccgcctcagctacctaaagcaccatgagcagagtcacagtgacaaactgcctttcaaatgcacctactgcagtaggctgttcaaacacaagcgcagccgagatcgccacataaaactccacaccggggacaagaagtaccactgcagtgaatgtgatgctgcgttttccagaagtgatcacttgaagatccacttaaagactcacacgtccaacaagccatataaatgtgccatttgtcgccgtgggtttctgtcctctagttccttacacggacacatgcaggttcatgagaggaacaaggacggctctcagtccggttccaggatggaggactggaagatgaaggacactcagaagtgcagtcagtgtgaggaaggctttgacttcccggaagacctccaaaaacacattgcagagtgccaccccgaatgctccccaaatgaggaccgagcggccctccagtgtgtctactgccacgagctcttcgtagaggagacctccctcatgaaccacatggagcaggtgcatagcggggagaagaagaactcatgcagcatttgttctgagagtttccacacagttgaggaactgtacagccacatggacagtcaccagcaaccggagtcatgcaatcacagcaacagcccttccctggtcacggtgggctatacctccgtgtccagtacgactccagattccaacctctcagtggacagctcaaccatggtggaagctgccccgccaatcccaaagagtcgagggaggaagagggccgctcaacaaacccctgacatgactggtccctcgagtaaacaagcaaaagttacctacagctgtatttactgcaacaaacaattattttcaagtcttgcagttctgcagattcacctgaaaactatgcacttagataagccagaacaggcccatatttgtcagtattgcttggaggtcctgccctcactctataacctaaatgaacatcttaagcaagtgcatgaagctcaggacccaggtctgattgtttctgccatgcctgccattgtctaccagtgtaacttctgttccgaagttgtcaacgacctcaacactcttcaggaacacatccgatgttctcatggatttgcaaaccctgcagctaaagatagtaatgcattcttttgtccccattgctatatggggtttctcactgactcttccctggaagagcatattagacaggttcattgtgacctcagtggctcccgatttgggtctccagtgcttgggactcccaaagaaccagtagtagaagtctattcttgttcctattgtacaaattcgccaatattcaacagcgttcttaaactgaacaagcatatcaaagagaatcataaaaacattcccttggccctgaattatatccacaatgggaagaaatccagggccttaagccccctatctcctgtggccatagagcagacatctcttaagatgatgcaggcagtaggaggtgcacctgcacgtcc

SEQ ID NO: 19673 - DNA, 2300 bp, Homo sapien
gagaagatgtgtttgaaaatattttttaaatgaaatagcaggatttaagcctaaaagataaatgtgaaatgtggtagattttacctagaatgttgagtacatttaatagatggccttttttttcaattagggtaaatatttgaaaccttgatttgtttcaggtatattagctttaggtgacaacacttttttaaggggaaaactagatcattattgagtttttttgcttttagttaaatttttttttttgtatgttgagtggtgagttgagtttatctgcatatgttcctggtgtattcactttaagtataaatcacatccacatccatcagaccctttcttatgctggaaacatgttgggttatagagtcctataaatgaggatgcaaaatcatgcggttttcaacttgtatggcgaagctttgttgcagtgggcaaggatccaggaatggtgtttggttgttttctcagagtgagagggttgccatctggcattgatagtgagatggtgttgtcatcagtttctagatgcaggaaaggaatgatcctcatctgtttcctgtggataaggaagaggctgacaatctagtaaaatcttgttaccttaaagaaagcagacatggaattcgtttacataatgctcaccagtttctacttttatattaatcatttagcttgctagtgaacttcagctttgaagaatttaaaaacttatttgaacatactctaattgaataccattagaatattctaataatgctctaactgagcctcttattctaactgaaacactatccccaccagctccactccatggtctttacttgtgtgtttttttgaaaaatcgtgctcctttggagagtggaaagcttttaaagtttcttctgatcttgaataataggttatgaaaagcaaaaaagaggtttcacaacctgctttgagatggtcttattttccacttggatatcaagaaagcaacagaaataacagtgcacgtttgctaagaacatagtttttaaaatcacctaatataaggtaacattcctttatggataacttgctaagtttatatctggctctcagtcttgtttgtcttctttttgtcactcataaatctttcagcatttaccataatcatttatcacttttcctgtttccagtttttcacaagttgctttgtctctgctcacctcaaagtgcaggtcctgtttagctaaggaagttcaggctgctgaagcttttgcaaaaggaagatatggtgggccacctcttgaactttccaaacaaaatacactattaaaatctggcccttgtgaaactctcattttttcttgatcctagctgatcctagctacatgtaatatctagcagtacccttctaacatttaataatccattttctggcctatggaattcgaatttcagttattgaagaaatcctggttatctttcattacacaagacataattattattgtgttttctgtcttctttcatgtgcttactttttaatatttttttgctgaaagcaataaggtctgtatcaataagaaccccgtaacagattttggtctgcagaattgcctttttatataaaaacaagcaaaatgcagagggaattttttattaaatattagacatctgggttgactgcattaattttaaatcattcccgtaatatttcctcttttcatttggttcttcagatgctcacataatatgcaaatcattttagaaggaatacaaaagaaacattaaatatattaaaatctgcattttaataaaattgtcaatgtgtaatatataccttgcttctaaggaagaatgataaaaagtaataaaagggtaatttagacatagaactatttaatatcctcttatattttacaactcaacaaaaagtaaatgcagaataactgctttgggctcagatttgaaaatgtctcactcaaatattctctcttttcattttgttttttcttgaaagattcaagagggcccaactctgcgtgctggttgaaatgctacggtaaactcactcttgaatctcaacatgtcagatgaaatttgtcattgcttcttgttgcagatggagtggatgttgaagatgatccgacttgctcttggccagcttcctcaccttctagcaaggatcagacttcccctagccatggagaaggttgcgattttggagaggaagaaggtggccctgggcttccatacccgtgtcaattctgtgacaagtcgtttagccgcctcagctacctaaagcaccatgagcagagtcacagtgacaaact

SEQ ID NO: 19674 - DNA, 2300 bp, Homo sapien
gatcttcccccccttggtaacttggggggaggaaattaaagtatttaaagatacgtttcaaaagcattttacctatctgtataggtcaatatttgacagatttaggttaaaatagtttttatgtttgtcttttgggtggttggtgctttaacctcccttaaaatgctatgcagtactatcccaaactgaaatatcaggctcttgagccagatctaaatctctgagctaagggttttatttatctcttaatagaggaaggcaacagaaatactaacattgggaaatgaaagaacaattttagagtaaagcaaagtagactactttgagaaagaaacaaaaaaaatcaacccatatagaaaactttaacaaattagggtacgcgttagtattacgttagcaatttttcactttccaataaaaccaggattagatgccatcaatattttagataatatcacacataacttgggaccacacatacatggcaccatagtattctgcacacatatggctaccacacgaaaggaaagtcttgtaaaaacttggtgtttacacatttttccctttctgaatgatttctgtgaaaatgaatgtataaggttatgtataaaatctagaatccttaatgtaccaacacagattctgcaacaaaagttgctttatttcacagtcatgcaaagttaaatttgactacaactatgatttcactttaggaattactgcagatggattgaaaactcatttaattataatgaagatattgaaaaaaaacatactgtatttgcagctatccacatgagggtccaggcagtttacaggttagactggaaaaaatacaacttccttaaagctttgatgtctttgcatggtggcttaatagatagctgtaccttaattttacagaacggagaatttttaaaatctgattaagaacaatagtatttgtacaaaattctgcctgttttgtgtaattaaccgtattctgaatctcttaatttccaccaagacttgtgaatctaagctctacttggtagccctctcaggcatttataacttgacaagcgtgtccaatcaataaatagcaacaacaataataatactaaaacatcctttcccttaagataaggtaaaagaaggaaacaggtgatggtttcttgttttgcgatgggagcaggtgaaaagttagaaaacaaaactgcgaaaagaaacaaaaattcccaccgacctgcagacatttcaatttattttagaaactattttcttgtacacatattcttaagtgcatatttccttacctcttgcttaaagaaaaaatcaacagaaagctttattttctggacaaagatctatgtcaatttgagaatgttaaaaaagtgaactcaaagctgtctcttttgaatcacattatgacattcgtcagcatcaatgactttctctaaacgagaaaataaaaaaaaagtccaaataacttgcctttataaagattccaagtaagagagacttggcaggtctgcggttgccataaaaaagatttcccgagtccgggcaacaacagcagacacacttttttaaagtccgacaatgcaaaagccaagcaatgaatttcccccctcctttctttttctttttctttttctttttttttttttttttttttgccccctcaagaacaaattgttgcctccttttacatccatcctaccagaagggggacctttccactttcagatgctcctctgctttaatttctgaagaggaaaaaaagcgagcagaagagccccgagatccgccgtggagctctaataacgcagctgcggcggcggcgacggcggcggcgcggggtgtgcgagcggccgggcgggcggcgcgaggggcggcggcgcaggagcgggcggggcgcgcggcgcgtgggaggcggcggcggcggcggcggcggcgggcggggctcggggcgctcggccgccgcctggctccggatccgcgcgccgcggccggcgcctccagtccgggtcttggcgggccccctcctccctcccgctccccgcgctctcgccttttaatcatgcccctctgtctgtgtgtgagtgcaggcaggctgacaatgatttcctcagtgattacgtacagagcgagtccctgcgggttaggggccccctctggagccatcctgatggctttgggggccttgcttccattttccattattatgtggactaccggagcgacagcgcagtccaagaccttgcaggtttgtgatgaggagggagcacacagcacactccttctcctcctcctgctcc

SEQ ID NO: 19675 - DNA, 2300 bp, Homo sapien
aattagacaagtgttcctactggttcatgttgccctttgaagtttcagtgctatctgccaaatgcacagaactggagcagtaggactatttacgattcatgtttcctattgaaatactgttcttagctactaagtactaaggtacttttgtgtaaagcattgagacatgactctgcatgctaggtgttgagtgcacagtgatagtggtagacaagtattggtttccaaatttgacagttttccaatttggtgtgattaccttaagtccagctataccagagtgttttcttcaaggcttacaatagtgaaagataacaattaaatttttaagagtaattactgtcagtagcagcataaactttcttccctttattcttatgacagcttgagtcttcatcctttaggtcccagtttaaatataatcgggaagacttttcacactaactcatgtaagtgttcctgtcattctgttagttcctcccccttttttttggctagtttttcttgggactttgcatatatacatatttgtttgtttctggtctgttagtcccattagtgtataagctccttgagaggaggttccatgtccagcttattcacaatcgtaccctaggtttccagtataaagcctaacaaacaatgcatttaatcaatgacattcttgacatttttgtgaagagcatttatttgatacttaatttttctttttttttttttgagacagggtcttgctgtgtcacccagggtggagtgtggtggggcagtcatggcttactgcagtctccacccccttggctcaagtgattcttccacctcagcctccttagtagctggaactacaggtgcacaccaccatacccagccaatttttaaaattcttgtagagacagaggtctcactttgttgcccaggctggtctcaaactcctggcctcaagtgattaaatttttaaaataatgtattttttctttatttttccaatttatataaaaatggaaatattttttattattcattaacgttgggtaacactttatataaactttccctttgtgttatatggaagtctaaatttacagaatactttaaaaccccacggcaacacaaaacccacatttgtccgtgttccttccataatttgaaaactttgcctttttcccttacactgacttgaagcctggcagcttgggcctaatttacaaggcactaagtaagtactctcttaaaaaacagagagtgaggatgccctgtttcacaacttaattccaaaaagccaagtcagacgaaatcgacccactttcctgctaagggtttgtcccaagaggcgagctcttctctgtccgctccagccaagctggccgattgcccctgagcactggacacaaccttggtgtcccggtttcgggtcagggttactttccaattgttaggcacgactttgtgcgtgcgtgcgagactgtggactcggaggtgcgcatttggggcgtagccgagccatttaaaccagcgaatccgcgttcaccttgtccttccacctctgccctatctcggcagatgctccacggatttgcacgaactcccgagtcttgacctccctcccctctccgggctgccgggacaactcggggcggccactcttgccaggaggcgtaagtaaggatgaagttggaaaaactgaactaggtctagggcacgctctgcaacacagtcggggagacgcttcagagggccggagagggaggcaagttgccacggcgcgaagggggcgggccggcttgggccgctcgcatttcctgtgacaggggctgccccagcctctccttctcccgcggcggcgggaccatttcctgaatcgctgaagcggagggaggactagggcgcgactctaccattagcgcaaagggccagggggtgcccataaggagagctcgggggatgcagggacggtcaagaaagttcggccagggctaggggtcccccagagtgcgcagaagcgagacatccctggccagagtgcctccttcaggcctgccccgccgcccgtccgcttggccccggagcatcccccctccccgcattcccgaggtggttcagcccgagaggccggcgtctctcccccagtttgccgttcacccggagcgctcgggacttgccgatagtggtgacggcggcaacatgtctgtggctttcgcggccccgaggcagcgaggcaagggggagatcactcccgctgcgattcagaaggtgaaaccgcgcggggttgcggatgccaggcccttaccgcctctgggagagac

SEQ ID NO: 19676 - DNA, 2300 bp, Homo sapien
acttacatcaggtatgattccatttatgtaaaatttttgaaatggcaaaattatagagatggacaacagattagtagttgccagggatggtagagggagagagagatgggtatgtcttgcaagtcaacgccacagatctttgtggttgtgaaacagctctgtatcttgattatgatagtcattataccaatctatacatgataaattgcataggcctccccgccacatacacacaggtgtgtatataaaactggcaaaatctgaaaaaactctgtgcattacaccaatgtcagtttcctggttttgttaccatattatacgtacataaaatattaccattggaggaaatggggtgaaggatataggagacctcttcttaccgtatttgaaacttcctgtcaatctataactatttcaaaataaaaaggaaacataatttaacgagtacaccaaaacacttctcaagaaaccactttggacaaatgttggtttatcataataatgtaaagtaaccagttagagtgaattgttttcattaggaattactggttttttgcagtcaaaccaaacttgtcaagactgtaatactgaagaaaagcaatggaggggcaataagtacaaactgcttcaagagtcaactaaaggccaggtgtggtggctcacacctgtaatcgcagtactttcggatgccaaggcaggaggattgcttgagaccaggagtttgagaccagcctgggcaacatagggaaaccaagtccctacgttaaaaaaaaaagtattaataattaaataaattgtttaagtcaattaaaattctgatttaagtatttggaattcagggaatcaaatttttcctcttttgaggaaattattctttttttcttttttttggttaaagttgatttcaccaactttaagatcctccccagtggaaaactgcatatattaaacaacacatggaaagcaataatagctaaacttacctggctattactgcccaccaggcaccattttatgtaattatgcccataaacacatattaagctcagaatactctgctgcagattttttaatattcccattttattgataaggagaaagcgacagagttgtttcatagttagtaatgtagcaagttgtaaagagtttctgctatagctaaatttccagacatcttttaagtctcatactttgggcttttacaaaatttctccaattaaaagaatattatctgggccgggcgcggtggctcacgcctgtaatcccagcactttgggaggccgaggcaggcggatcacgaggtcaggagatcaagaccatcctggctaacacggtgaaacccagtctctactaaaaatataaaaaattagccgggcgtggtggcgggcgcctgtagtcccagctgctccggaggctgaggcaggagaatggcgtgaacccgggaggtggagcttgcagtgagccgagattgcaccactgcactccagcctgggcgacagagcgagactccgtctcaaaaaacaaaaaacaaaacaaaacaaaaaaaagaacattatcttaattctcatcattagcttagtttgatggactatttgctttatttaacggaccatttgctcatctgctctattttgctcacaaggcagaaaatatcagaagcaacaatattttgaagtttgctttctttccttcggttcaaataacaagagttaacctgagagagagaaagaaaaagtaggaaatttagaatttgaaaccaaagggaagggactgatatttaacttaccacagtttctccaacatgtatgcgataacaaaaatatctgatatttgaagacctcatttttaagccctaatctttgatattatttttataactcgagtgccgtgacaccatccctggggcaacacggtagtggggaaatggagatatgcgctatgcgtcagacatgaagggtaagggaagaatgccgtcaactcacaggcactgcttgggtgacaaaggctggcaagcgcgaggacatccgcaggcagccaaaggagcaaggacttccgtgaagcagccgaagcgcgggcgcggggacttccgggaggcagcttgaggcgcgtgtggaagcgcttccgggcggtagcacgctgtgttggcggcggctccccgcttgcctcagctgcagcagcgggaagctcggtggcaagcccttgtagtcctgtgcgatggcgtctcgatatgacagggcgatcactgtcttctccccagacggacacctttttcaagttgaatatgcccaggaagcggtgaa

SEQ ID NO: 19677 - DNA, 2300 bp, Homo sapien
gaatctacccagatgattcatttgacctgccagatttgctactcattgtttaaatttgaaaaactacggccaggcgtggtggctcacacctgtaatcccagcactttgggaggccgaggcaggtggatcacctgaggtcaggagtttgagaccagcctggccaacatggtgaaaccccatctctactaaaaaaaaaatacaaaaaattagctgttcctggtggtgtatgcatgtaatcccagctacttgggaggctgaggcaggagaattgcttgaacccaggaggcagaggttgcagtgagccaaggtcctgccattgcattccagcctgggcaacagagtgagactctgtctcaaaaagaaaaagaaaaaaagaaaagaaaagaaaaactgcaacattatgaactttcaagtaggtctgtgtggaatccttattgtgcatgggttgcttggctttatacgcttaaaggatttggccaaatatgatatacagtaaaaagtggcagatttcaaaatgtgatctgcaaatccctgacccattaggtaaaaactattttcctaataatactgagacaatatttcccattttcactgcatggacacatacactgatggcatagaagtgatcatggataaaattgctggtatcttggtacacaactgtgttagctctcatttttttctttaccaccatacatttgcaattaaaaactcaataaatttgactttaacatgagttctttttgatgaaaccataaagattgttagttttattaaatcttgactcaggtatacatctttttaacattctgtgtgatgaaatggaagtactcataaacatgtttgctgcaggtatggtgaatgtcttgaggaaaagcagttttgtgattgtttgaattgcaagctaaaacagcccatcttttacggaacttcatttttacttgacaaaacaataaataaccatggttattaggacttggagatttggcaggacatattctcaaggatgagcaaactgagcctgttactttaaggaaacaactgacagttgtttccaatgatttgttgccagtgataaaattcaagttttcaagcaaaaattataattttggaaaacatgtatttgccacaatgagcctgacagtttctttgcgaaaaattaataagcatgattatttaatgttttagaaatcacatgggtcaacatttagaagatctgcataattcagtaaaccagttttccaaatgagcaagcatgacattacaaaatcttgcaaaataaaatacctattcaaagcaaacattgtgtaggttttaccaatccctattgactattagaaattaaaactgagaaattttaaaatattaatgtataaaaagccaagagactaatataacagtaaaaaagtttatgtggttgcagattttaatttgcaattaactaccacctgttgagtggaatagccacacttttctgagaagggcattaaaatattcctcccttttctaactacatgtttgtgtaaggttatacttcagccataataacatattgcaatatgttgaatgcaaaacagataaaagaattcagctttctcttgtgaagccagagagtaaatatatttgcaagacaaatatattgtagacaggaagtatatttgtaccactcttctcaaaaaaatagtttttcttttagaaaatataattatttcataaaaacatgtttatattaacatgtgttatagatggaattgggtcccccaaaatgcatacattgaacccctaacccccaaaaatagggcctgtagggagataattaaagttaaatgaggtcgtaaggataggaccctaattccataggatcgatgtccttataaaaagagacagagacaccagagagctctctcttttgcatgaacatgtatgtgtgcacacaagaagaaaggccttgtgaggacacaatgagaaagcagccatctgcaagccaggaagagagccctcaccacaaaccaaaattgctagcaccttgagcttggactttagcctctagaactttgagaaaataaatttctgtggtttatgccacctggtctgtggtattttttttttttttttttattaacaagtgtaactctttattaagatggaattgttcttattaaagaaatagatgaaaatggttaagtacaattaaatggctccaaaagtcttacaatgaaaacaacagtcctgccagttgttctttccagaggcaaatacttttcattctcttagtttttccttccgttagttaccttcat

SEQ ID NO: 19678 - DNA, 2300 bp, Homo sapien
cctcacttgctggaaggggtgagggatctttctgaggtttctttttttaaaaaaattatttatttaatgtatttaactaacaaataataattgtatgtatttatgaggtatcatgttacatttgtatgtgtcgtgaaataattaaatcaagttaacatattcatcactttaacatgatttgtcctgaatggaatcccattcatgagggctccacccttatgatctaatcacctttcaaaggcccaaccttctaatattatcaactccagctttagcattttaacactcagttgggggtataatcctagcactttgggaggcccaggcgggagctcaggaattggagaccagcctggacaatataacgagatcccgtttttgctaggcatagtgccgctcccctgtggttccagctactcgggaatctgaggtaggagggtaggatgatcacttgagcccaggaggtggaggctgcaatgagccaatggtgccactgcactccagcctgggtgacagagttagatcctgtttccaaaacaaaacaaaacaaaacaaaacaaaacaaaacaccacaacattcagatcatagcatctgcctacttgtaaaatcgcctttcagtgcagtgttggttcctacaaacatacaatataatgactttagcttgaaattaaggcatcttctctgactgcattacaaacaggcaagttttttcatatcgattcactcaacaccttttatttatccagataatatctaggatcacgcttaatatctaagtgctagaatctaattatatagatatcaaaaggcattaagtttttcagaagacagacatacaattttaatgtttagaggtgatagagacacctatagcagcaccaaagaagaaacgattttccatttaagattttaggcagtttaactctaaaatatgaaaataggcacatctcacagactataaaactatacgccattttaatttttacaatgtcaattctaactgcgaattttagcaacgcttcagtgtgaagacagcagagaaaaacactgaaaatgcgtgattgaattcttattgagtcactcttctcggaaatcagtcctccccattttctccttaaaaaatagaatcctggagatagtctagtgctggcttttcgaggaacacactacaggggacacaaggagaggaacacggatgccgcagttttccaagtgcagcttgcccctcccacgtgataggtttctggcatcgcccctccttgctggcgattctggggaagattttaacgctccctggagccgtccccagtgacgtcacgggcgcggctccgctccttggccaatcacgcggccggatcccggggaaacccggggcggtggcggcggcctgggcgcgtgcgcgaggtctccgcgtggctatataaacatggctggcgtggccgcgcggcggggccgtgccaatcgcgcgtagggggctgtgggcactcggggttcgtagttttgaaatttctggcgggggagcagctgcgcagttaggctcgaggtgtgagcgacgaccttccgggagccgcaagtccaggctcccccgcagcgggacccgagcctgaggcgcagggctgaggcagcgcacgtgtgagcgccgctgaggaagctgcgagaggtcgggcgggtgtcgctccgggggcagcccaggctcgcgcggacgagaggaaggtccgggacgcgcgtgtcctgccgtgcagcgggcgcccgtcactgacttcgctgctgcggcccccgcgcctctccccagcgatgctgtggaacccgaaccgcaccggagtcggctgccgcgcgccaagcctcccctcacctctgctcccggaaccgcagcgccaaagctgccgctgagcccctgggggatgcccgccggcctcaccgaacccgccggcgccgctcccccggctgctgtgagcgcctcggggaccgtgaccatggccccggccggggcgctgccggtgcgggtggagagcactccggtggccctgggcgccgtgactaaggctcctgtcagcgtctgcgtggagcccacggcgtcccagcccctgcggtcccccgtggggaccctggtgaccaaagtggctccggtcagcgcccctcctaaagtcagcagcggccctaggctgcctgctcctcagatagtcgccgtgaaagcccccaacaccacgacaatccagtttcctgctaatttgcagcttcctccaggtatgttgataaccctttccagccttgtctgtcggtccagctggcggcgacggga

SEQ ID NO: 19679 - DNA, 2300 bp, Homo sapien
tccttgtcctcagaaagcttatggtctagtgggtatgtagtggtggcgggagcatatacaaattactatagtacaacgtaaggtaattgccacagtgagatttccttggatgaaggacaggtagacccatttgaaatgggtcttaaaagatgagtagattggcctagaatggcctctttgctaatctctgcctattggcagaggagccatgtggctgcagttaagatgtcttgtaaaggagcaatgggaagtgaggttagagcgaaggaagccagagtgatgggtttatacgtgatatggtggataatatagcacagtggttaagagtgcttactttatttttatttttatttttattattttcatttttttgagacagagtcttgctctgttgcccaggcaggaatgcagtggcgcgatctcagctcactgcaacctccgcctcctgggttcaattctcctgccttagcctccctggtagctgggattacaggcatgcgccaccacacccagctaatttttttatttttagtagagacggggtttcaccatgttggccaggctggtctcaaactcctgacctcaggtgatccacccacctcggcctcccaaagtgctgggattacagacgtgagctactgtgcccaaccagagcttactttaggtcaaattagaaactgagtcacagctcaactttgctgtgtgaccttgaacagattgcttaacctatctaagctcagtttcctcatttgataaatggggacagcgcttatataactggctgcaattttgtatgatagaaaagagataatatatgaaaagtgctcagcgtggttctcaagaacctgctctgagcaatgggaaccattgaagattttggaaccatggcctggtgggatctgaaccgtgaaaggccttcattgttattttttattattgacatacaaaagactgcatacatttaaagtctacatttgatagatttttatgtatgcatacagctttgaaatcatcaccacaatcaaagtgataaacaagtctttcactctcaaaagatttgtgtaagacctttaaagagggaaagtctggcctgcaatgcactggaaagaatggagcaaagtagagcctggaaatggagaaaccagttcagaggctattgccatgctgcaggtgagcaggaaagaatgaatgaggtcaggtgataggtttaatggccatttgagattggctgctggaggacagggttaggtcttcatcattacattatctccagtacctaacccagtgaccagagggtagtgggctctgacatgctagaattgacaggctttccctttatgaaagatttttatttcaaattgcttttccttttattatttttagggcttaaaagacaaccttcttgcttctgggacatccagcctgacagccaccaaacagttgcatcgtccaagaatcacgagaatctgcctcagggacttgatattttgtatggaacaggaacgggagatgaagtattctcgagctctatacctggcccttctgaagtgaccactccactcttccatccagatccttgctatttactgccaaagaagacacaaagcattgttgcactgtcctgaaatttcaatttctggaaaataatcaccaacatgaaagagcattgtttacagttagaaactttattaactcttacctatccatctcatgggactcttacagactcagattcatctttgtcttctgaaaatcagttatgaaatacactttgcacagaattaggcatctgcctatctgtgcattaaattaaagcaagttaaggccctatttgttactacctgcctcatttgccaaattgtagcaggtgaggtgtccttccctaatacagcatgcattgagatgcaggagaaaggaagaggcataagaaaatacaagaatgactatttcattctatattgaacctgtcccaaagtggtaggttttctgggctggaatcagaagttgcttagctaactatgacagtcaccctctgtacgtgacaggccactgtggtgactttggtcggctgagttccagtgttgtcaaaacaagacaaatggggatagattgtgcctggggttgctaattctctgcttcatatcaccatatgccgtttctggtaccaagtgaggggacatgcttgtcagggaaaccttaaaattgaatctactgatatatcttgttgaaaaaatggaaaaggtgcaaagtattagaaggaacgttagggcgttgctttcaaactgatgaggggaatgtga

SEQ ID NO: 19680 - DNA, 2300 bp, Homo sapien
ctaactgcacataggcagtcctgggtaaacattaactgatgacaataaccagcagagtcccaaagtgaggcccttgcattattgttttgaggaaattctgcctaatgagaatggattgctagtaaatcatagagcaattttattctcctttcagtaagacatggatgaccgagcagctggtgggagcagccctgtctgtccccatctgagagagtggtgtattagtctcaaatagggaaattacgcagcaatgtggaagcctggctagccgtcattaaagtaattcagtgtttgggctgcctgtgtttcaggcagtgataggagccattaacagctcacttttagtttcagaagccagagatattttcattactagtgtcctcaggcatacactttttaatttaaaaaaagaaagtaagttcaggatggaaataacccatcaccacaggaatatctctgcaccagaaacacattctagtttacctgtcaatcttaccagcatgccagatttattttgagtgtctggaatgaggaagaggagggaagaaaggtgggtgtagggccgatggaggaatcagggtcactaataccttggaaaagctgaggacttcattctaaagtgctgttgaaatctcaggttttttacttctctggctagtaataaaatgattgatagttctggctctgagatgttccctacttcttccaaagccataatgccctacttttaagatgctttggacaggtgttatggtagactgaagttggtcacaaatgctttgttactttccccaacaggaggttcttatttccccctcattgagtctgggctggccgtgtggctgttcaaccaacagaaagcagcagaagtgtactgtgcagtccggggcccaggcttttagagaactgtggctttctctgcctccttcttggaatccacttaccatgttgagaggggcccaagccacatagaggccaacagccaagtatttgcagccatctgggtgagccatctaggacattccacgccaatcagacccctggattggagcagtggagcagacatggagcagatgcagcccagcgaaggccagtatcacaggccagaacaaaatgttttaagccattaaattttggtgtgacttgctctgcagccagataactgaaataggtgtaaccgaaaagtccgtaagaaggaagatttaccttgctgaccaatgcagaataacaaagcacaggaaataacatttgctgggtcggaagacaactgtctggaacaggtgatgacatccttagcctttagtaggttttgacttcaaaactgaccccggctttcatgcctctttttgatgctcaacacggacaatttcaaaaagaaaaaatttcactttaatccagcctcacccccacatgtgtgtttcacacagaccttattttttaaacagagtttattgtatttaatacattataaaatttgaaaaattgtaggaaagcagcagacttgaactggagcaattctaacaaggaataattctggccccttggcaaaactgatcagttttaaaacaaagtaaagttcacatctgtgaggtggacaaaaaagtgtgacttctgtacaaactacatttaaaatttcatgtctaacatctttgcaatgtgctcatgagggtttttctgaagtcctgcctggtccctgcctaaagaaagacgtggaacctccatatacaaacaaacttgattcaaggtgttttgtttgttttgtttttttaaaaaaaaaggaaaaagaaagacaaaggaaaaaagaaatatggatggctgttgttggcaatggaaactgtaaggagactgtgtcctcaccactcatggcttgtttatttgtcagaggcctcggaaggcccaggacacttcacggccatcacagcaccaactgcggctgtcaccttttttttttttcttttttgcatttcctaccttttgacatatatatatatatttatatattttttacaccttgaggatatcactattccaattgttcccatatgaatacaggtgtggtctctattggatataaatgtgtcttttattcgattttacgtccaggacttggtttgctgtcccaactgcacataaatgtcccttttttgtttgagttattggttgtgtgtgttttcctttttgcataagaaatatgtccatttagtccagaggctcttgctttatccggatgacggagggtacacggggcgtccgcctcagttcccgccgaaggacgtattcgctgaactgggacgagtcta

SEQ ID NO: 19681 - DNA, 2300 bp, Homo sapien
ttgtcctgggagcacaaaactattttcttttctggaaataagttgacgtcaactgggagctgttttgggttgctttgtttcccggagcgtccaacccagcacaccgcctccggcaaactgcgagcaattcaaagcagctcgcccagtagggaggggagctggtgggaggggggtggaccccgccgcccgcagaggtggggagacctggggggcggctccgctcccaggctgcagcgtgggcctggtcccctgccaagccaggagcgcagcccggagccagcgcggcccccgggtccctgcgcttatggcgagggtcgcgggggaacagcccctggtaggtaacttgccgggcacccacctgagttctccgcaccgcggcccgaaaacctgggagcgtcccaggacaaagggccagccctctggaattagccgtgtgtgactagtgtgtgccagctcgtatgtgggggtcccagtgtgcaactaacttagctgctcaccgcagcctcggagaaacgagcacgcctttctgcacgtgtccagggcgggtgcggcgggcagtgcattgtgaacaaagccggccacctcccgcgccgcacctcggggacgattcccggacggttctccgcggagagccgggcggatgagagcgtggtgtgtgtgtgtgtgtgtgtgtgtgtgtgtgtgtgtgtgtctgtgtgtcttgtgtttccctaaggagccggaggcggcccgcgaggcagggacttgctctaacttgtttcacacctggcgcggtttccccgaagctcgggtggcgtccagggccgggcaggcacgcggaggaccagcagcgttcgctgcagaaaaagacatcgtcaactcccactcagaagcccacactgccctgagacctggtctttcattctttcttaaaaaaaaaaaatgcaaattgatggatgggtttcaattgatgcgtaaaatgcttcccttgagagcaagacaggagggccagggaagggggaaacaggcagttgacataactctcacagcctaactgccgagaattcggacttggaggtaaattcgaggacgcacccgaggagcaggcgaggctgcctcccagcaggacggcctggcaccggggcgcactgctggggacctgactccctcgtgtcccctcaccccagggactcgcagctggcccgcgcgccagggtacacacgggctgcgggagaaggtgaaagttaggatgcagcacgagctccgagagtggcctgggctgtgcctcctaagagaacagccgaggtccccggcggctctgggaagctgcccctgggccgggagagcgggaggcggcgacgcaaggacgcgcccggagcctgggcgcgccgggggcgggcgtttggctggaagtggggcagtgtctcctatgggaaagcgagacccggcgagctctttggctgcttttccagtttccgaggtgcccgcccccgcgcgcctgaggcagcgcagcccggagggcgaacgaatggcggttggcaaactttgagtgagagtgcgctccggatccgaattgccgaattgtggctgcggcagggtcggccgagacacaagttcgctttttccgcctgcccgatgggccttagggagacttcagctccagcttggtggagcgcctcgcccgagggagttgtgtcactttgctcaggggcagggagggcggcgccctgggcgggtggggaagggtccctgtggcccctggggtcccaagcgcctcttccctcgtctcccctcccaccggcccctcccagtcttctctgcctcgctccttcccggggctggctggaccggcgcggacttgccccagacctacggggagcgccccaggtctttaatgacagcttaaatgtggctgttggaaaagtcgaaagggatgtggctgacgtggggcgtgtttcgctcctttgcaagagtcggaaagggagttgggagccgcgcggctggccccaggcccccgcgcctcgccgccagcaagtaggtgggggagccgccgccgccgccagccccatcccgctcccaagcctcgcccgctgcgccctggccgcgggcgccgagagggtgcggggcctcgccgtgcctcctccaccctgctcattaacctgcctgctccgctccgctccgggcggccccagacacgggtttcccgcggcagcacccgcggcccgcccggcgcagccgccgccccgaccccccggctccggggggcaatgagggggcagtggaaggggcactgctcctcgggcattacttagagaaacgag

SEQ ID NO: 19682 - DNA, 2300 bp, Homo sapien
cctgctaaacttttgtattctctttttaattaattagagtctcatcaaccattgcttatttagtggaatattatcacaggacacgcccgagaggcaccgatttctgggaggggacaagtgtcattgcttccccaagtggacattttgcatccagggcagtggtcactcgctctaaggagagaagataagacatagagatgaggcaggattaggacattcacttccactgctgtggatttcctccaaagctcctgcactgattacaaagagttcctgggtcgagtctgtcacatccccacaaagaaagccaaaaaaacccacccagcattgcagtgatttaagatcaagcccaattccatagggcatggaaaagtgtcaggcagggaagaggggattaaatagagcaacatctagagagcactttgcatagtgcccggcatgtagtaagtgctcagaacatggtagtcattgtcatcagtgccattgtcagtataattattactggtcctcatcatataaatatacatatgcatatgtattgtacacatatgcatgtgtatatgagtgaagattccttctggctctaaatggaacctatgagtcttgaaggaacccaaggtgaaatggtgaagctcatctcgagatctgatacctgccattagagttgtctagaaggctggttgaaatgtcactttaggcactgattttgtgcctaaagaaggggcatggaacaggctctgcccacctaaccccatcagatcaatgaatacctacaaagagttaaacagctaggcaaatatggcatgccagacggactgcaccaggggttctaggatgggggttgtcataacttggggataagaggggtgggaggcttactgcaatggagaccagtggggaaatgaaaaaaggaaactgaacagaaggtgaaaattcactcttgggctgcctgtgaagagtagcaaaatgctagcccaacaggaaagaatatgccatgggaagcattcacaaagctgtgtctgagctaaaaagggcagaggagcttctggtgtctagagaaagaatactttaaaaaatccaaactatacaagtaaaatattacactctatgctgtgggttacaagcaaccaattaatcagcacctggttctgaggcaccgtggcgctacaagggaggcaaaggctctgcccccagatgtttggaatcttgggggaaacgtggtaaatgacagcggggcagggaacttgaacaaagtacaaggcccagtggccagtgggttgggaaagcttcctggaggaggtgagggtataaacaggccttacatacacacacagcaagccaggctgggacagtgagatgaactgcaggtaaaaacgattttaaaaggcaagtaagaaatcagtctggcagaaacaggagtttggggaggagaaacacaaattcagccccctttcctgttcctatccaccctgcttctgggatcttggctactctctcggatctagatcccacgataccatccaactctgccgtccttgtcctctctgtgtccccaagcttcctccgcagatgcctcctctttctattttgaccactcttcccagggaacctcatgttccttgactttagaacaaaccagtgcagctgactccattctgtttttctgcctgcgtgtgtctacctgcccagtgcacacccccacttgacagacagcacacactcttataaggtcccaaagtaaactcctcaccttcctcctgtcctgaacatttctccctcctataagtgctcaggtgctcagtacagaatccccatgattttcctgattcttttctttccctcaatccctcctggacacacacagacacgtgtatgtgcagatgcatcatggtgcctatgcatttgctcacacacagactcatcaaggtcattcctacttccatgcccccatcccctctcactgtcattcctttttgtttgtttgtttgtttttcagagacaagagtctcactctgtcacccaggctggaatgcaggggcaccatcacggctcactgcagcctgaatctcccaggttcagctcccaggaacctcagctaccccaccacctgcctcaccagtagctgggactacaggtgggaggcatcatgaatagatcatttttaaattttctggagggatgaggtctcactatgttttccggactggtctcgaactcctgggctcaagcaatcctcccacttcagcctccctaagtgcgaattacaggcatgagccactgcagccacactctcattctct

SEQ ID NO: 19683 - DNA, 2300 bp, Homo sapien
tagcaggaccccatccctataaaaaatgtttaaaagttagctgagtgtagtggtggcttgcctgtagttgcaagtactcaggaggctgagatgggaggattgcttgagcccaggaattcaaggctgcagtgaactaggattgtgccactgcaatccagcctaggtgacagagtgagactctgtctttaaaccaaaaaaagaaaaaggaagaagaaactgtcagctaatcaatgaacactacccctaaaaagatcaggcacatgtgaggaagaacagaacggcaatctcagggacccctgttgcactggtgtcattattcatagcacttccattcattctcaaaattatctcagcttggaccacaaattatgtgatcactctacacatgatccaccttcagaccctggttcagagtgagtgaagaattcaagaattcttgctgttccaccagcaagttgctgtgccatcaacaactgccctttacagacccagctgctctgactctagagaatccgttctaagtgtctcggcagaaaccactaccaaatacaataagcaagactctttgatcacccaagagttgcaattagttggaatgaggagggacacgctccagcttgagaatgctagaccatggcctggcgtggtggctcactcctgtaatcccagcattttgggaggctgaggcaggtggatcacctgaggtcaggagtttgagaccagcctgaccaacatggtaaaaccccatctctactaaaaaatacaaaatttagctgggcatggtggtaggcacctctaatcccagctactcaggaggctaaggcaggagaatcgcttgaacccaggaggtggaggttgcagtgagccaagatcacaccactgcactccagcctgagtgtcagagccagactctatctcaataaaaaataaaagagaatgctggacctagaatagtggtgcttaaaagaggactggccatgaggaaaggcaaccacacaagaaacagaagtacaggaagaacagagcagaacacccatatcaaagaagcttagggtcggccacagctgcgaccaaaggcaagggcagcagccaagctaccatggatgctgaggaagattaccaaatgccctaactctgcccccagaaagggaggggtcttgggaagttggagtcttagcgacccaggtacaatattggattagtacctgaatctagcgtgtagtaggtacctaacaaattatctttgtgaaacacaactctgatcactctatccttggtcctgttagcaaaccttactcatctgtgtacaaaacaccctgctggctcccagaggtaggttgcaagtgtggaagccagggagcaagacaactgtctggaacaccacccctttctagttcctcacatatataaagagctcatggctccagggctgaccttgatgcccatctctgagccctcttgcctggtgtttatcatgtgatctctgatatcagccttggatttctctagccaatgaacaggctggtcctttgcctcccagctcctccagtgcccagttgaagctccctgctcaagacagtttctttcagaagccgtaactcggtcagtgccacagataggcactcagtgacccttcaacaaatgaaggcatgtgcttggcaataatacttgtacctgattcctgaacctccttctaagcagagggggctgcaccagcattaacacgctttgcctgtctgcacattctcactccttgccagtaaagaaagactaaagtatctaattgggaaattcagggaaaataatttggtgatggtgactcagcacctccctttctgctaaatggtgaaagggtctacccaggggtggtggccaactttttccagagacacctgtgctgggtggttaagtcagccagatcctgagtttgtggatttgcaagctcacctggccccagaacaaataaagccatgctcttttcagaccagctttatctgtgtggccacgcctcctccttcgcaggcaaggagggcggggagtcctctaactccaccctaagaagcagagtggccaggaacatgtatacacctctgaagagttctttttcttcgtaacttcatggcaacatgacctacagttactcatttttcaggcctgagttgatcgttaatcatcttaattatgttcattctgaagccaacaggagaaccaagaccaaaactttattgtctctgctttcatttcttgatgaaacctctggactaagcacacatcttccttgtttatctctctcaaaggag

SEQ ID NO: 19684 - DNA, 2300 bp, Homo sapien
cacctatgatcgcattttgccccctttgccatcccggctacagccctgggctgccggtgagttcagaagtgactctcctaacttcttcaatatgtgacttttctgagtttaccgtctttgggaatatttttagtgtctcctccagggtgccctccctgccccattgcaaccatcgtttttgtctctttacattcttttcctctagagagtatgatgtcgttgtcatcccacctggggtttttcatacttctgagattcgcttcactggggcaggggatgcgtgggatgtggctggccacccccctgtggagccagctcttcctttatcctgccacccgggcctgggcaagaaagggtttttctctctccacctctaaagcaaagccccatagcaaactaagggctaggctgagctggaaattcccctcaccctttttggcactgcatttcctcactacccacgcagaaagcaggttcccgggaacattcagtgacatggggaaatgagggccccgcaatttgtcaaagggaaagccacaataatactaatctcttaaagtacttggctttcttgcctaaccccttacgtggtcctctgcaattagattctctggtaaatactctccatacttcttggctctcatgactatcacaggcaaaggacaagggcaaaagtcttagatgatagggtaactggggtaattgccccccccccccaaaaggggaatcctagccatttcctgccagaatgagcagttggcatcaatatcgtcaaaccaccccttctctgctccaaagatctaatgacagcaagagggatatagacgggaggagaaggcgtcctccctctcccagactccctgcccaccaccctccccagagaagctccacaaggtgagacacactgtcctataggcccatgtaacagaaagccatcaaaaagaccgtagagaaaagccgttttccatagagccttctgctcaggggcccacagtttccctaaccacacccgcttttcctgacttcccgagctctgcaccatgaaggcaggaaaggtaccggggcattgctggcacaccccagcctccaggctccctttggcaggtttatctgcattgtacggtcagggtcaaggggtgagagagggtcgggcacgaggagaggctgtccttcctcccctaaaagcatcccccactcccatctctccccacctccagcggccaggatgcaccgggccggcgggcaggcgggcgagctcgcggggccgcttctgcgtgtgcacctggccgccgcccgggagcctgccacgggccgggaatggccgctgctccgccctctgagaggtgctccaggctccctggggacggaggtttacacgtccccgtgccgcgctcccagatctgggcggtgcgcgtgtcccttgggcaggctcagctcccggactcctcccgctggcagcctgctcgttcctggcgcaaaggagagggagggagtgtcgctgtcccagctgaggccctgcctgttcccatcgcccttgctagtcaccagaagctcctctcccctcaatgagttcactttctcaaaagacagccttcagcaccctggtttcctagaaggcttccccctaatccagagtctggggggagggggagattttcagaatgccatttcaaagcaatcaaatgcaaagctagaaaagacgaccccccccccccacgcacaccttgttttaatgctttatgttcgaaatgtaagtagcatataaaatgtactcgaaacttaaaaacttgctctaagggaattaagtacaaggtaaatatattttattcttaatattttaaggaatttgatttagacatttttcctttctagggacagtttggataattttccgtgaaactggatgatctttgaatattaaatgaaaggagactagaataacagtctcttgactattcatgaaggagctttagcagaagcattctttcttggtgtgcaaatcacgcctggcagcccctgcccacagtacccgaagatggcaggccttgttcccttcacctaaattcataaacctgggtgtagtggcttctgatgctgatttgtttctcttttcagtaagtgtggacctttgtgtaccagagagaacatcatggtggctttcaaaggggtctggactcaagctttctggaaagcagtcacagcggaatttctggccatgcttatttttgttctcctcagcctgggatccaccatcaactggggtggaacagaaaagcctttaccggtcgacatggttctca

SEQ ID NO: 19685 - DNA, 2300 bp, Homo sapien
gggacagcgacactccctccctctcctttgcgccaggaacgagcaggctgccagcgggaggagtccgggagctgagcctgcccaagggacacgcgcaccgcccagatctgggagcgcggcacggggacgtgtaaacctccgtccccagggagcctggagcacctctcagagggcggagcagcggccattcccggcccgtggcaggctcccgggcggcggccaggtgcacacgcagaagcggccccgcgagctcgcccgcctgcccgccggcccggtgcatcctggccgctggaggtggggagagatgggagtgggggatgcttttaggggaggaaggacagcctctcctcgtgcccgaccctctctcaccccttgaccctgaccgtacaatgcagataaacctgccaaagggagcctggaggctggggtgtgccagcaatgccccggtacctttcctgccttcatggtgcagagctcgggaagtcaggaaaagcgggtgtggttagggaaactgtgggcccctgagcagaaggctctatggaaaacggcttttctctacggtctttttgatggctttctgttacatgggcctataggacagtgtgtctcaccttgtggagcttctctggggagggtggtgggcagggagtctgggagagggaggacgccttctcctcccgtctatatccctcttgctgtcattagatctttggagcagagaaggggtggtttgacgatattgatgccaactgctcattctggcaggaaatggctaggattccccttttggggggggggggcaattaccccagttaccctatcatctaagacttttgcccttgtcctttgcctgtgatagtcatgagagccaagaagtatggagagtatttaccagagaatctaattgcagaggaccacgtaaggggttaggcaagaaagccaagtactttaagagattagtattattgtggctttccctttgacaaattgcggggccctcatttccccatgtcactgaatgttcccgggaacctgctttctgcgtgggtagtgaggaaatgcagtgccaaaaagggtgaggggaatttccagctcagcctagcccttagtttgctatggggctttgctttagaggtggagagagaaaaaccctttcttgcccaggcccgggtggcaggataaaggaagagctggctccacaggggggtggccagccacatcccacgcatcccctgccccagtgaagcgaatctcagaagtatgaaaaaccccaggtgggatgacaacgacatcatactctctagaggaaaagaatgtaaagagacaaaaacgatggttgcaatggggcagggagggcaccctggaggagacactaaaaatattcccaaagacggtaaactcagaaaagtcacatattgaagaagttaggagagtcacttctgaactcaccggcagcccagggctgtagccgggatggcaaagggggcaaaatgcgatcataggtgctgtcgtttgtggtcagggttaggggagaaggaggaggacaaaacagtaggctaaggaagctaggtgggcaggaaacgtccttttcagccccgcaggagacaccagaagaggtgggacccagaaaaggccagccccgctgctcacccccttcacctctcacttctgccatttccggagttctctccctgcttggcctgtcatgcacctgtttacctctccagaggtagttgctctttcagcttcaaatattcatcaaccagagaaatttaaaacagtgcaaaacaccaacacaaaacataaacatgctctttaagaatgtttttagcttttttttttttttaaatccacaaaaatctgatcttcttccaaggcagatggaccagcctcacttggctgtgaaccgtgaagtttgctggcagcatatacatatctctggccttatgagggctcaccctagcgtcacccatagcaccctgcttttattgtcagtgttcccttatatgttcacagtcactggaaatgatcaacacaattagatttgcttcttttgccccagaacaaagcgggtttgttgatgtactgaatcggacacattactttctagctgaacactcagcttcatccactccaggacagctgagcgtctgggtgagtaatttttccgaagaaatgtactatagctagattcacctccatagggtaattttcctgggcttttgcagatctgaaacatatggaggatttggctaaaaagcatcccttttcttctaccttctctatgcctctcttctgaa

SEQ ID NO: 19686 - DNA, 2300 bp, Homo sapien
attagcaatacttaataagaaaaactacctctggcaggtgaagagttaatccctggtcaattttaagctactctgctgagagtactaataagtgtaggggttggagccaatgagggtgaccccttccttgatgggaacagtcatcccttaggaactgccctggaaagcatcagccagccagaaaacagggaaagaggctgagaaaccgtggtaaccaagttttgctggcactttgtaaaatggtaactgcaactgccgaggctgtgcagagaatgctaataagcctaggacaacctgtaaagagtggacctagaaaatgtccacccaccgaccagaccggtagccctaaagagccccactctgtagattcctgaggatctgcccaccgtactcattcacaaggaagcccctaaacatggctacattgtgccttagcttcacagccctcaaaatacttctgactcaaatgtcttagggtcagagtaatgacatttagcacatctgcctagaaactcacagttttccaatttgtaacaaacattttgcaccttttaaaaatctcattctaaaatccaaatggtaaacagctttaagaatcaatatgaaatgttttaagtgttctctgtggcttcatataaattctccctgcccctctcatcagaatttattctgactttcagggagcatattaaaggtagaaaccactgatgtacaataataagtgtgcaaccatattcttaagaatctaaattcaatcttggttagctgagaatgcttgaaacagtaataaagtgctcctctgaaagtcacactcaaattttgaattcctctttctaatgagagctcttcacccattcccatgtctcaagtacgcaaatgaaaacaaaacaaaaaaactgtaactgggatttaaaagtataacagtctttcttctctcatgtatttctttcttgtcatacttcattctggaaaaaaataatccaatctgaaatataaagtgggaaaagggaggcatccgtaggtaatgtgagttattatcattgttctagatgttgggttgagtggtgggttcatagatgttcattacattatttaaaagccattataattaactattagaaaataagagggccatacatgcacgagtgatgacagagtgtcataaatcaggaattctgattattccaatcccatgcacctaagatctgtttaaagaaaaaataataatgagatggtgatgcaggtagctaatggttagacccttctagagttcaccaaactccttcggcagggacgtcttcataagcatgcagcctgcgcagctgcacaaggtcctgcctttaggagcacccagcctttatttatgctctgctgtcgcaatcttgaaatttaaatagtgttttaccaaggtgtcctgcattcattttgcactgggaccagtaaattataaaatcagtcctgtccctaagtttccagaggttaaatttacctacagttccccataatttcgtccccatccaactttgatattttttaagtttgctacttcttatccccagattattaatgtaacagtcaggtgagcaccctagagcagtcttttttcctgtatttcctatgtttccttatttttattgtccaaatcagtgctgcctgtgctataaatggagctgcagttatatattgttcttataatgcttcttctcagatcaaaaacttcaaacagaattcattggctaaaaactaaatgcactgaagtctctatctaaattcatgttaactgctggattatacaaattcattttctaataattgcccaatttcaactacaacatataaccaaacaagacaaattctgaacaattcttcatggtagaaagaattcaaataaagatttaaggaaatcctcattttcaaaaattactgtctcaaaaaaaaaaaaattaagtaaatgtttttgcattcctgaaatgccctgtgtctacagtgatcaggtacagaaaagctacttcaagttcaaatataacttagcgattgccacatggtgcagaatctttccacccctaacactccaaaaacccaatcagacaagtggccgtaatctgactcccagcacacagggagctgcggggcaggcaatgagagctgcactctggctggggaaggcatgagtgacagacccacagcaaggcggtgggggtaagtccttctttgccttaagggaacaacgcttagggccaaaagatgaaactgtctcttttattatagatgtttgtgccttcttaggcagaatctggaag

SEQ ID NO: 19687 - DNA, 2300 bp, Homo sapien
gtttttttttctaatcaagaaatcattctaattacttaatacattcacttctaattctgaattcttacattatctttgaagctcatttgtttgagaactggttttttattttgtatttttttttgagacacgatcttgctgtgttgcccagggtggagtacattggcacagtcacagctcactgcagccacaacctttcaggctcaagggaaatgccagccagccttaaggactgtagaaacgcagggttgacaggagggctcccattgagtcatctcttgttctgatttctgaggtcattttttgagctcctttaagagatgaggaattctatcaccacaaagttaaatgtggtatcatggatatcagctacagtttttttgtttttgttttttatttatttatttatctatttatttgagacagagtctcgctctgttgcctaggctgaagcgcagtggcctgatcatggctcactgcagcctccaccattctgggctcaagtgatcctcctacctcaggctttccagtatctgggactagaggcccatggcaccacgctgggctaattttaaaatctattttattttttgtagagacagggtttcaccatgctgctcaggttggtcttgaactcttgaggtcaagcagtcctccagcctcagccttccaaagtgttaggattacaggcatgagccacctcgccagccctgaaaattggttttgccaagaatacctaaatattatcctttaaccagacaagcaatttcccacagcagtttttaacttttaactggcaccccataaaacacctcttaggcaaaatcaatattttccatcaaagactctcctcaaatattttgaggcaatggaatagaagagataactttttgatgcagcaatgtgcatgatatcttcacatttaagaaacatttattcggctcacccagaggggttgtgttctgtggccaaggaactgagccagggtttctggccagcgttagatacaaagccgtgaccttggccccattagccgggctgctaactaggtgagctcaccacacggcttactgcatacttgtgtggcagttcattgggaacagggattctttttgtttgtttgttttttctatttttatttttattttattttactttaagttctgggatacacgtgcagaacgtgcaggtttgttacataggtatacatgtgccatggtggtttgctgcacctatcaacccgtcatctaggatttaagctccgcatacattaggtatttgtcctaatgctctccctccccttgccccccatcccccaagaggccctggtgtgtgatgttcccctccctgcatccacgtgttctcactggggaacagggattcttaatgtgggtttcagtgaaggtacatgaacactttggcattttatgtaagattttgtaaatcttttctaaagagagggctcacattttcatcagattctcaaaaaaggatgcaatttttttaaaaaaaataaaaggttaaggttatattaaacgagattgttctaaaagaaaatctgttcagtatttttaaaaaaataaaatagctctttattactgaggtagatttctgtaatctgaggtagatttcagtaatttcatgttattgtgggaggggtccttgaaccctgaccttttattatttatctttttatgcctctgaaggattttaaatgtgctctttaaattggagaaatctgttactttatatgagagaaaaatgatattacaccttcaatttttgaactttatatattcttaagacaggaggtgatttttccttacattctacaagcatgtttttcaaaacccgtcctttaacaacccattctgttattcttcctacttgcaattattttaaggtatcccaaaccttactttacactttacaatacaggaggacttaagtctggccagactttgcctaactaaatgttaggatgttacttattaactgtaggataatacattccttagataagataaaagtatgcaatagaaaattgccattctaggaacacctactacagtcttttctgtcttcagagcattagtgtgcacattaagtcttcagccttgttgagatagtgaatatttatgccgtatttgagaattaatattagcagaaatgtacaatgtagatttctttttaaaattctaggttactttatggaattgggctcttagagaacaagaaaagactgaagttttacgggaaaacaaatcatgtggtcttcagattctgaaataaggagaaat

SEQ ID NO: 19688 - DNA, 2300 bp, Homo sapien
aaaaatttgcatgttttgcaacagcctagaagtagagttcatgtattatcaggttggcctgaatttcctcactgctgtgatataatggatagtaccaactccaagaattcatagaacatggatggatacacagggaaccaaaccaagagcgagtaagttaaatggttagttcattcaaggagcgctcatcaattgcctaccaggcatgtgtcagttaaatacagctcagggaacactagcttgtttctttcaactcaggaaacatttattctattggagaatgaggattttccccatatgaaggactgactctgggttaaaagttaataacaaatcagcaagttgtattacaatggtttgcttgtggaatgatttgtttactctttttcaattttccaaattttcaatagtgtgtttatatggcattgataactttaaaactcctttacaattaagctgaaataaaaagaaatctataaaacaaaaaaaccccagcaaatatacaaattttaaaaattaaactcttatgtctattcaagtcctttgcccatttgtatcaggttatttgactttttgttgctgagttataggagctctttatatattctggatattaatcatatcagagatctaacattgtcaaattcatagaagcaaaaggtaggatggtaattaccaagtgctagaggggagaggaaaagggggagctgtttgatggacaaagtttcaggtttgcaagatgaagaaattctgaagatctattttaaagcaatgtgactgtatgttaacactactgaactgtacattaaaaatgataaaaatgtggtgtttaccccaatttttaaaaatgcatgaaaataaaacacttgtgacagaataataaatcagcttctgtttaaaaagaaacctgcatcaggcaaacaagtcctataatggtaattcttcaaagaaccaaagttcactactaccagatgtgttattactaaaccattaataagaataagacctactggaagtgcataaggctaatatttcagtttcagcaaaagcaacaacaaaattctaatgtcgtaataaggtaggtttaactagttaatgcttttaaaaaaatagttgagtttttctttgttaatttatagaaatcatctgaatgcaaaataagcaatcaaggattcatttatttttatttgccctagtttggtcaaattgttgatagaataatgtttagaactaatttttaaacctgaatgaaccatttttattttttcttttctctctctttctttctttcaagacaaggtcttgctctgttgcccaggctggagggcagtggcaggatcagagctcactgcagccttttactcctagcttcaagtgatcctcccgcctgggcctcccaaagcctggtgtttcctttaatgatttaaaaatgttattctagtgttggtctttgcaaagccctttaaaaccgccaacttcagcttgttcgattttgaaatgcgtggcctgagaaatctcctaggtcttgaacattataaatgggtactatgctcattttgagggagccctggtttacacaaacctgctgctgaacttagccgtacttacaacaagcactttattgatctattataattgatgtattaaaataaacaaacgaacatcacctcctgtctgtaaagcaaaacacattttgactttggagttaacgtttgcgacagccttctaacctatggacgtgttcctcagaactgggtttctagaaaagctaggagaagaccccagcgcaggggagaggagagggcgaattgggaaagaactgctagggtaatcacttcctcgactgggcatggggtggcacctgagccctggcacgcggggctgggagggcgagtcgccagcggaggcgaggccagaaagtcagaggaaagaggggaccagagagccacaaaggcagagctggagaaggcagggcgggcagcgggggcgagggagagaaaaagagggaggcggagctgcccgggcgggcgggggcgggggcgcgggcgggagcgggcgcggaggcggcgccgcagccccagccgggccggacgcgggagggtcagggccagggtgagcgcccgactccgagctgtccccgctcccggcgcggcgctccgctctcagccacctcacggctgccaggagtgcgcgggagtttgccccggagcgcggggaagtttcctccgaagctgcgctcctggaacagcagcacctgcaagcgcccggcagcggcccgcgaggtaaccgcgctggggctg

SEQ ID NO: 19689 - DNA, 2300 bp, Homo sapien
accaaaaaacatccctattctatatccctttattgatctatggcttttattactaacaggtccagcagtcaatagatcaatgctgctcaggaagtttctatttctcacctattacaacagaaagaagcacagatagttaatgacagtataaatgatcactctcaataattactttcgtccaatacttcctggttaaatgtgcataaaaaataaattaaactggttagcttctgatgggatacatattccatagctgtaaattggttacattatttgtaatcctcaaagatgcaggagagaatactaaaacatttccaattaatggagaggtgtgagcccatgggaaaccttgtctttgaccaatgatctcttcattggaggcaaaataatctctttggtttcatgtactatggaaactacatttttccttacctcaaccaagaggtgaatatcaccaggatgatcatttaatttcatattttattaaaacacttaatgcaaagccatgttataactgaaggcaaagcacagagccaagtgtaagaagctcttcttcagaacatagtaatgagagaattaccacattaatctatgtaaaaaggccctttagagattttcatgcctcccgtggtttcattttccaaggaaatgtggagtaagaagagcttcaaacaaattattcatcattaaacattttacgtttacaggtacagctctgtgaagccattgcttctctggtgacatgtgatgtgacacttggtttcggctgagttctccatggcacccaccagcagtgccacaccttgatccagggcacacagagctgtcactcagccaacaaataggtcttggacaggctgagcctcctctgttatataaatgggcatcctccaagtagcgactcgtctgctatctgtctgataatttgtatccaattgatagatgctggcaaacaacaaaaaaaaactatgggtagtgttttcatagtgctatttataaatggtgaccacacatcctggactatcaatagcctgctcagctctctttgaaatttcaaaaagggggaaaatattagaagtgagactaaaactatttttgtaaatgtgtgtttgccccgtaggagtcttgcctgattttctatggttccagaatcacccaagcggataatgaagtgagttgcagttaagatggagcccactggggaagagatgaagcagtgttcacctgaagcaccatctgcattttcctagtcctgacagttacctctagctgaccagggtttctgtgcaggacttctggtatcaaatcaacgatcaagggtggttacacataaagatgaacagttccataggcaggtttaaaaaagaaagcctatgaagaaatgttaatacttagcagcactctgaagttaagggatatggtgctagaaaagctttaaatatccttataatagtctagaatattgtctcctcaataaaaacaggcagtaggctttctatcagctaaagccaaatgcaacctgccatccaagccagttaccaaatagtccttgctgctattaaaattatcaccagggagttcaaggactagggagtcatttgaaatggccttggaaaatgtgttgaaagaattgcctcaaaccgttgtccctggtgcttgttctttgtccctgtgctctaatatacagtacatgataaaatatatcctgtatatttataatgtgtccagaaaacgccaaagtgcttaaggctctgacattgttttcattagagattgatactttagggaatgcaaatgccaacttttcaaatttcctataggtggaaactccaaatgatgccagcttttaaaaacgttttgtactttgtgaagctctagagcagctgtgtgtgactagaatgaagaaagacgcttgtataaaatgccagcaaaacaaccccacctgctaacaggaatgctggcggtcataatagccaagacctgggaacttgattattcattcagctaacctcatcttttgtcagcctcaccagtggtaggtagtaaatctgagaaagataatttagactgaaatattagtggcctttcaagttgcaatacagctcattcctttgattctagtctaccagttgccacttctggtccatttgcatataacactggagaagtgttcctttatctttgtgaagcccttaacattcaaggagccactactgcttctatgctgctgaaaaatacaagacactgcctctacctctgcatctgtcctttgctttttgcttggaaactatcacatcaaa

SEQ ID NO: 19690 - DNA, 2300 bp, Homo sapien
atttataaatactctattgcaaagataacttttaggcggactagcaatagtgtgacaataatatctagcaaaaaaagaagagaaagggtaagaacaagcacttctgattactatattaagtgtttcatctcatcttttaaatttaattaacataacctttcttattcttttgaaaagaaagaaaatccaggaaaaattttgtttcataaaaaacttacaatattatgttttaattaaaattgaataagcctccctatgaatattaaatttttaaaagcctagccagcaacagtacattattaaaagctgtatcagttatgtcaagaaattagtagctggtttttaaaggttcatcatcagattcttaaatgatcggtatcttgaaactcaaataaagttaatatttcagtcacccaaagcagaaaagcaagcaataaaggcagaaaatattcattaactgcaatgaagttcaccgatctcccaagtgttgaaaagcttacataaaacggatatttctatttacttgtaaacctttcttaaaaaaggttccggaaaatttattacctcaccagaattagaaaaaacaaaaactgctccccatcccccgctccattccacaaatgcttgtgactcaaacttgtaaagtctctcactgtgttgcacttgaagttcatgccttaaaggaagccagcagaaatcctttacgtggtgagaattctgtatcagtcattttatcttttatataatcctattttctcaagttccggcttttagtttctctcttttttaaaaattgttgttaggggtggtaggagagggtaaaagtaccctgaaactgttggccccaaatgtgaacagtaccactaacaggtagtaatagaaatagaaaacgggagatttcaaataaaataacaaacatgcactctcaaactcccagaggggacaaaagaaaacaaaacaagaacacaaaaacttgggctgttccagtacatcctcaagggtgggagctgaaggtgcgagctccagagaggagccgcggcctccgccctcccccgcccgcaggtggctcccggcgagcgcctcagacaacaatagctaggatgagcttggcctgcgtccttagtttgctgtgtctgcccctgccaggaaagattacccatctccaaagaatgacaaaataaagaagcgtacgttaggctcccaaggagacaccgcccccccttccccaccattcttcatctccattagattccctaccgcggaccaaagatgaacctgctaccaatcaagttcctgcccaagttattttatttcccgcagcccctccacctgccggggcggtgctcggcgcactctaggcttccctccggcgaccccccgcgggctgcagcaaaatacggggcgcttcggcggggcgggggcgggcggctgccgcggatccggccggctacagccgcagcttggtggcctccgattggccacgacgcgggcggggaggctcggcggaggagggaggcgggggcgagggcggcggcggcggcgggaggaataggagaggggagcgggccgcgcagccaggcagcgcgtggggcgagcgcggggagagcggcggcggctcgcccaggtcgcgcagcggaggccgagcggggtgcgcggtcggcgacggagggcggcgcgcgcgagtgagcggcgcagggcgaggaccggcgggcgggtgccggtgcgcgggcagcaggggcggctgcggcagcagctgcgcgggacggagccgcggcgggagagaccgcgccggcccctcgcctcacccccttgcggccgaggccggagaacagtctccaactcgccgggggaccggaaagaggagccgagaagcgcccctcggcccccacgcagcggaggcgcggagtggcgggactgctgctctttgtgggtgcagcacgcacgacccggagcgccctccccgcggcgctgtccccggcgtcttcgtcgcgccgagcggccctggagcggggacccggaggaagcaaaaccacgagcccgaaacctcgcgtggcggagctcttggggagcgccatccgctccacttccacctccacatcctccaccggccaaggtccccgccgctgcatccctcgcggcttccgctgcgctccgggccggagccgagccgcctgcgctgccacagcagccgcctccacacactcgcagacgctcacacgctctccctccctgttcccccgccccctccccagctccttgatctctgggtctgttttattactcctggtgcgagtcccgcg

SEQ ID NO: 19691 - DNA, 2300 bp, Homo sapien
agttagaataaagacaaacacttcaaagtctttcattccctaggtattaaagaaagccatattacagcacaaatgggttcatatgtgcaaactcaccaaaagtgacaattttgtaacagtagttactaacccttttcacacattgaatggatggttctccatttctgtcaggatgaaattaaattcctcagcatggtttgtcatgaaccatctttctaaccgaattcccagccattgcatgtaaccattctgaaccaacccctttctgctttcttaccctggggcactctcacaaggctctccagagcttctcatgtcctgttgatgttgtgttatcttgaagcattctcctaccctttcccttttctttgctgggcttatcgcaacattttgcttcttcaaagctttcttcagctaagttagatcctctcctctaaaatgccttaacacctcaacccttcactctaacagtgaattcaaagtggtgagggagggagattggtgctagccatctcctttactcatctaagttcaagaaaaccattctacttgagtttctgagggctggggggctggaagtgactttgagaagctttctctgaggtcatgctggaggcacgtggaggatgggaggtgaaaaccctggagtggagagaagtttggagaactttctctgagactggaagagctcttacatacagagacctccactgacgggtgcctgggagattcacactgggaagctcaacttagagtgtctgagcccttaaagctgagcctcatgagtttcagggaagccccagacttcagggaatacatggcttagacgacgaggagtctattagacttgagccagagtgagatgaatgaaggtcataacaccctttcatgattaattggctgtctgaaattcccgaccttgcaacttttgaatggacttcgaggagtagcatctcatgtctgagagggatttcctcctgaatccagtagatgggaactcggggaacttaaaattcagtttagggagaaataagaggatgtccccctggtgttacaaacgacatctctattaaaaagtgtagcctactgggctaggaatgattgtctttcgtccctttctgactttgaattatttccgacaggaactagattttctgcatttcctttcttccatgccctcacacaaagcttggccgacttcgggccctgataaatagtcgttgcatgatgtagaatctgtaagcctcgttttagaaggttttgtgtggtagatattcctttgaccacctgaaaaatttcattttggtaccagtaagtagtaaaccaataattcacatctaagaacaaagtcgtttttagaaggttcatatgagtcccccaaactgacagttaatagagcgctgagtgtaatcactcatattttgggtgcgtaaaaatggttagattagaatttcttaaatttggttttaatttctgacatgccaaaaactgtttatcatgccatctgggataaattccttctgtcgtgtattttgtcatgttagtcaaatccggagagaatacagtacatgtattttgctttaatctgaaaacattggcagaatttgttcagacgtcgaaggggagatccgctgatccaatgacaagggtgttcctggcatccagcagagcccgtgtcgaggcagggatccctgcgggcggattggggttctgcattgagatgcaccgcgcagcgccggcgatggggccgccctgggacgatctgggctgccagggcctctctgcgggccgggcggggcggcagcgccgcggggcagccgaggggcgtgggagaactggcagagggtgcgccagagaccgctttcccgagcgcgaacgcccgggtggctgctggggagcagaggggcaggctcgggcagctcctcagccgcgccggcgatgataaaacttgagaaataacaaggagtggcctctccgcgtcctctgggtccaatccggtttcagaagtgaagttgctcccgggcaggcaagcctgagagaggccaaatacacttaaaaacaagcagcggcgagaaaagcacctcccgcgccctgcacctcggcaggtctcgctctcggcaccctcccggcgcccgcgttctcctggccctgcccggcatcccgatggccgccgctgggccccggcgctccgtgcgcggagccgtctgcctgcatctgctgctgaccctcgtggtaagccagatctcgccggatagggctggggtggggacgggggtggatccgccctggacgctgcacgg

SEQ ID NO: 19692 - DNA, 2300 bp, Homo sapien
gatgtcaattatagtctcatgctgatgactcaggcttattttactagcaaagggtcaatgataattttatggatatggagacagaacagctcattagtggcattcgttaataaaatagggcatgagcatagcacagacacagagaatgtaaggcatgcgctgtttgacattaatttttaatttaaatatacactcagtattgcagtaattctggctcggcatacaatggtgttaagatggtgaacattttcaagaatcgaaatggtgtgagtgtcagggttggcttttcacataggattctcaggacatccctgaggaaacttaaaccaaataaaagggagcagacaagtttctcttttgtggtcaggcttacctggtttaagtcagtaattgaaaagaggtgcaggaggatgagtcagatgccttgtcattgctttctgaagagctaaaagaaacagcatttatatcttaatcttccagattgtgtgctgcaataattcatttagtttaagtgcacttcaaataaaaatgtaaattatcccattcttattcatttctcaccatgaactctggttttgatggtagtaaagaaggtgagaactctccactggatgttcaggagtccggtataggaaataagttataactctatttgtgaccagggatgttcttggagaaaatcagtaaccacatgtagcccacgactaggacctcaatggatgcatttcttatagtaactcaccctcgattttattattttgcagtcgccttgattccctaactttacgtacgtatgtatgtatatatgtatttttgtctctaaattatggcgattgtcttgtatcattgtcatgccagtaaattcctaaaaacacaagaccccaaagaatggtgcctcagatgactatgatgtctgaactgcttgtgggtgtgtgtaggaaattcactccagtagagtgtgtaacagtctccctggagtcaactttctgtcaggtgggcctcaggcagctgtgacctaaaacccagcctctgcggctcagacctcgctctgtaattgaccccagggcagggaccacggccgtcgccgagggcagcgggcagggcggagccggggccgaccgcgcactcaggagtgagtctttgtgcagtcagggcttctgctgggcagggccggctgttaatctcgcctggcggagcggacaccggggcgtggtgggggagatgggccttataggtggcgtccgctggtgagaaacaccttgcgcaggtaaaagggtggcggcgagagggagttcccacccgtggctttcttagagaaatgaagtcttaagtcttaaatagacaacaaggaggggccgatcggtgtcttttggacgcgtctggagcccctccctccgccaaaggaaaagccccttggatgagaggcaggcgcttcagagaagctaagaaaagcacctctccgcgcgccccacctcctccgcctcgcgctcctcctgagcagcgggcccagactgcgctccggccgcggccctcgccccgcggagccctcctaccccggcccgacgctcggcccgcgacctgccccgagccctctccatggaggcagcccgcccctccggctcctggaacggagccctctgccggctgctcctgctgaccctcgcggtgagtgtagccgcggccaccgctccggggaagggggcgatcgcctagggtgcagaggaaaactaggggaacggggataggtgggggtggcgggaaaagctggggtgaaggggcctctgggtggctagaaaatggagttggcgggggtgggggagggcagataggaagaggatcgcgacctgagagttgggatccccaagggaagggaaggtgtctccggtagatgtaatcagcgcactcaaggagaggcgggagcgggccgctttcgcccagccaaaatcgtggcccctgggtacgcgccggggagcagggtgcgccggggcgggagtgcgccggggtcggagtgcgccggggcgggagtgcgccggggcgggagtgcgccggggccgtccagctggcctctggcaccttccccgggaacgtgcggctccctgtgcctcgggaacgtgcggctccctgtgcctcgggaacgtgcggctccctgtgcctcagcgcctgcccaggccacggaaaggggaaccgctgggcggccgggacggagagcgagtgtccttgggtgaaaaagggaactgctcgcctttctgggaattgtttactctgagagaagggcggggggaagtggcgggtgggggagg

SEQ ID NO: 19693 - DNA, 2300 bp, Homo sapien
aattgtgaagctaggctggatagatttggcctgtgggctttggattgcaaattgttcacttctttaaggattgctctggccctgactttctatgttatctctgaaatgaacatccatttccagccaagcttctcaaaaatctgtcataagcagtctaaatagtttaattttagatgtagaaagtaccatagatagcctccagtattaccttattattattgattatcttacttaacagatggacaaatgggagtgttgagacctgagagattacttaagcaacacaaaagaagttgcttcttactttcggtctggtgtactttttactataaaaagtatatttttattgggaaactagttcatgcagcagaatcatattcataagcaaaagtcattcttttaaaaaaagatcacatctactcacattccattttttttttaaatatatgccctttgtttcaaacctatgttttagagggatctatttcagtgaccatatagcctaacctaaatacattaaataaattgggtacttgctcagagaaagtactttatattccattcttttgttgaaagttttttttggaataaaacaaacaaatcaccattttaatagcctctatcaattaatgtgaaagaggaaaataaatatctaagatgaattctagtcaaattgctcttccgccctttcctggaatgaggaaaaacatgagctgcccttaaggcatcagagggtaaagagtaggcaagagtttggaaatgtcctatagtcaaagcctgtgatgatagtctgagtagatctccagaacctgaaacgcttatagctttctttttgtcctctgaaaagcttcatgctagagaccatgatgtcatctttaataggatgaggtgtgcttatggtatcattgatggaaaactatgagtgttaaaaaatatggaaacggaaggatgtcaattatagtctcatgctgatgactcaggcttattttactagcaaagggtcaatgataattttatggatatggagacagaacagctcattagtggcattcgttaataaaatagggcatgagcatagcacagacacagagaatgtaaggcatgcgctgtttgacattaatttttaatttaaatatacactcagtattgcagtaattctggctcggcatacaatggtgttaagatggtgaacattttcaagaatcgaaatggtgtgagtgtcagggttggcttttcacataggattctcaggacatccctgaggaaacttaaaccaaataaaagggagcagacaagtttctcttttgtggtcaggcttacctggtttaagtcagtaattgaaaagaggtgcaggaggatgagtcagatgccttgtcattgctttctgaagagctaaaagaaacagcatttatatcttaatcttccagattgtgtgctgcaataattcatttagtttaagtgcacttcaaataaaaatgtaaattatcccattcttattcatttctcaccatgaactctggttttgatggtagtaaagaaggtgagaactctccactggatgttcaggagtccggtataggaaataagttataactctatttgtgaccagggatgttcttggagaaaatcagtaaccacatgtagcccacgactaggacctcaatggatgcatttcttatagtaactcaccctcgattttattattttgcagtcgccttgattccctaactttacgtacgtatgtatgtatatatgtatttttgtctctaaattatggcgattgtcttgtatcattgtcatgccagtaaattcctaaaaacacaagaccccaaagaatggtgcctcagatgactatgatgtctgaactgcttgtgggtgtgtgtaggaaattcactccagtagagtgtgtaacagtctccctggagtcaactttctgtcaggtgggcctcaggcagctgtgacctaaaacccagcctctgcggctcagacctcgctctgtaattgaccccagggcagggaccacggccgtcgccgagggcagcgggcagggcggagccggggccgaccgcgcactcaggagtgagtctttgtgcagtcagggcttctgctgggcagggccggctgttaatctcgcctggcggagcggacaccggggcgtggtgggggagatgggccttataggtggcgtccgctggtgagaaacaccttgcgcaggtaaaagggtggcggcgagagggagttcccacccgtggctttcttagagaaatgaagtcttaagtcttaaatagacaacaaggagg

SEQ ID NO: 19694 - DNA, 2300 bp, Homo sapien
cctgagtagctgggattacagtcattcgccaccatgtccggctaatttcttatatttttagtagagtgggggtttctcatatacattctagtccctaattctgactgcccattttcttaaagtaactgtaaatttaggctgagtcttaagttctaatacagatggtaattcaatttctggcatattcaaggtgctagtctctgtatatcagagttgcagcctaatgcatcagggctagttgtccaaatgcttggagatggcaggtggcaaccacagataaggcaggcctatgtcaaactcaagagtgaatgtttttgctaaagtatttatatttttaaaatgttagtagtaaaccatgttgagcaaacgaaacatatttgtgagcataagtcaacccatggacctcagggctgcaattctttcatggaaatcttctcatgtaatcttcataaaatctctgcccctcaatttgctatgagcttgttctggtccttatctttccaagaaccctagaagttggagtgacctaacaacaaatccacatgggcagaggtccagggactgagctctgaaggatcctgaaagaaaacaatgctgggagcactgctctgaggagtacaaaagtgtaaaagagaaatgaacttaatcacaaaactgaagattgcactgaagaatacttaaaagtcctttttaaaccactcaggtggagagaatgcaattatctggcaccaactatgttctaagaacataattctccccaagattttgaagaacatatttaattcgtacatctacaatgcaaattcatctttcattggcctctataatacccagctttcccaaatgctcttccacagcacaaaaagtaacatcagtttgcaaataaaaggtgcaagaaggtgtacagtacagtcgtgaaaagggcaatatatacatgcatataaaagagaattaacaaacaaaaccttgatttctagagaacatggaagttataccagacaaggagaatgtaggggaatctcatatttatagtacccttacctatacatgacaaagtttacctccataaacaaaaacattagcagatgctgctaacattctgcaagtaataaattcctacttatgcatctgtggatattacactattaaaaggcacatttatttcttgatgcatgtctttgctaatgtcctaaatttgggttccaggtgatctagaaactccagtccctcttcttcctgccgatcgctgcagcaacctactgagccggccagagaacctttgccttcatagttatacgaacaaacgtagtcttcacaatgtttatgctcctcatcttgtccacacaaatacaccttctgtatcaaaaaagagcacattttattattttttaaaaaacacctaaacatattagcagaaaaatgatgtctttgatttaccttttactgtttaatttttaatcagagtgtgtcctctaatggattcctatatataaaaaatgcacaggattggtctgtattatagtcactcttaaaatatagcaaataaataaatgcttctagtgagcacatttaaaaaattaagactacgcatatatcacgcaacacatttataatttcccatttgaacacaaaacatgtatatttgaaatttacctttgtagcttcttcacgtatttgaggaaaaccaatataggctatgattcctatgtttatacactactatataactgtgatagtgtaatatattaaactggctaatatcaaacctatactgattaatctgaacataaaacaaaacaaggaactaaaactcaaaataaaagctcaacaatttatctggttgattttgatagccaggacttcataaccacacaaagaactcaagcacactgagaaatgtttataatttatgatccattcattcctgtataataaatatttcactccagctggttttcctgttaatttctagggaagaggctatgaaccttttatcctttgtaaacacatctacatatggcactcctagataaagttttgtaaactgtattttcaaaggtgaattttcaaagatcatttttatctttgggtttaaaccagacatccacatctatgataatccaacaggtaaaagatgttgaattccaggtatatgaggagtaaaacttttgggaaattctgatttataactagcatttaacttccatgtaatatgacctcaaagacagtggaacttacttcgccaagccgaggttgggtgaaactctgccagtccgtgtacgcatatctgccagtatctc

SEQ ID NO: 19695 - DNA, 2300 bp, Homo sapien
ccctgtctgtcttgtgcactggcttctgtcttctgccttccatcatgggatgaccctcatcagatgcccatgccatgctcttggactttccaggctcctgaaccatgaaccaaacaaatttctgtttttgttttgttttgttttttaataaattacccaggctatggtatttctttacagcagcagaaaacagactaagacagagctcttactgaatgatctaatgccagaaaattggaagaaatatgtcttgttttcatttaattttaaggtagattcacgtttaaggaagagtcaataatttgtaataataaattattttttcctataaagtgcctatattttatttttaggaaacctttgtgtgcaaatacaaaatatgggagaaatagtaatgtaacagatttgcaaaccaataatttggggttagcttttacacaagtttttctattacctttgagaaagatagataatgggaaaagagagcacgcagaaagtaggccaaaagaagtaggatcagaacatcaacttcccagaactgtggagagtattctggattcatttgaattgagcagtgcctggaatctcttcatccaaccaatatatgccattttttcagtaacaccaatttaattttgctcttctatatcttcctagttcagtggagaatatcatgttatagaaaaaggtaatgataacttcattagctgaaaaaaatgtgtttctattttctagggttggagaatttgtctttgaattatttaagctgtatgactatctatttatctgtctatctatctatctaaatatatacttagatgatgcttaaacatgcacagaattacacttggctgtacacatatacatctaagtaatttttctatttctatattcccattcttttctcccaaaacgccagatataaaaatattccattaaaatgactgtattttctgattgagaaatcaaattccaatgcagtcacaaaatatgtttattagtgggtataccactagcaataaaatactacaagatatcttttagttttttttctcctgggtcattcattttccaaatcttcctagcttctaattctaatgaagcagttacatttatttctgtctctacatacaaggagaaattgttcccattgtcaaataagctgaagaaaacctttctttcctcccttctcagcagcatgggtgttgggctctaccttaacatttgaaaatatttatccttctgtcctaacttccatcactgccattgagtgcaattggtatcactgagctcactaatttgggacaggaataatgatgctaaagctcttgttagaggaatcattagggtttaaaaaaatctacacttgatggcctgattgtactattaagctaggatatcctatgtgtaatgtacaagtaattagggtgaatagagtgattttagagagacttgctctcaaagattgtagttgtccttgaaaaaatataaaggtaaaaagcagtggcatcttgtacaacaaaaggaaagccacaagaaagattatatgctagctatttctttattctctttcttttatgaagtctttacattctgataagtttcctgtgacatctagagaaccaaccacagtgaatagtcaataacaggaagtagataccatgcctttatgaagttgctgctttaaactggaatgccagttctctagcagaactacagtgttctacaggaccgatgacacttaaatgcttagatgggagataacttctgatgagtgtgattacacacgcttaggtcctctgatttgccaatggcagttgaggaggcatcacttccttgcatggcgtttgtgcacaatttatgtttgtacccgagggcaagacaggttaataaggccaagaaggaggggaggctgtgggagtgggtaataactggggaggacttcacagcatcaacctgggggaaagggaggagggctgaggatgaagggtgttccctcctccttctgcctatgtgttaagtggcaagagaaattttgaaagctgctgtgaggaggagctactgactgggttttggggtgttttgtaccccaccctcctcacttgtaggaaagcctctttgcatttagacgtaattgaactggaaggaaggagactggccagggaatagggggaaagaaattctcccgttgctcctcctactgtttatcacttgcctccggactgtcttccaaaccaagctcagctgcatcaaggtggcagcagaataccctgtgcaagtgccagcgtcttcttagccgc

SEQ ID NO: 19696 - DNA, 2300 bp, Homo sapien
aaaaggcatagggtagattgagagaggtgagtttgtaaaaaccggaagttaaggtttggagtaagagagaagatagacaacaaaagcaatgatgtctgcactgtccaatatggtagccactagccacatgtggttatttaaatttaaattaagcaaagttaaatattctcttccttagtcataataaccatattttaaatcctcaatagtcacatattataaatggctaccatatctgacagcatagatagagaatatgttcgtattgcagaaagttctactggatagcactgttctgaggacgttaaaatgagtaagaaagagaaaaaggcagggaaggaggcaagggagagaaagtgattaacaaattccctctcccgctgtgtttaacatcgtattggctctcatgtaactgccaagacagacgctgctctgcagtattggagttctatcacacctcctctccagaaagatgtttgagagattgctgccttatgaatcccctagtcatataggattgttggagcaaggcattgagttaggggtggagccagggttaggtttaaggaaaggtaatttaatggatgaaggaggcccccatgcatgccctagcatcatgcccagaatccgagatgcataaaacattgactcgccactggaaagctgcaagagtaggtgcagttgtctctggtgcccagtgagtcttctgctattcatggtcagacaacatgatactaatatattgctcagactaagtcataggttaatacagtctattttatttgacatttctcattagagaaaatcggccagctcatctttctaaattttatttatttacatctgctatttacaatcataaacattcttattcactgcaaataaacatgggcagcctatctcctcccctccacactgtatgatggataatatggaaattcaaaccacacatcttctttgccacaaatctgtagtgaaatgacagccttctatagaccctctgaccctcagagattttcttccttttggagacattttgagtatctttttgaccataatcaacatcttatcaggtaggtctcttgttctaagtagccgtttcaaactctgagggtgtccagtgtctatgagcttcctgccactcacaatatttatactagacgttgccaggggaagagaagagagtccaaaaatatgtccaaatgctgccctgtgaaggttgctatttattttcacaaacctcagggctgcattcagtttcccgtctacctgtgtaggcagccatttcttcagtgtattccctatgttctaattggctcgctgtacagattcttggctctgtgcttaggaattgtcattgacttttaacccacctcacctgctgagcagctttctgtgttttcattagtatttcaggcaccgaatctcatttttaaagttattatcaggattttaattggtggttctcactattcacccttaagtttagtaatatttaaatttttattttgttgcatttaataaaagaatcataaagaaagaaaaataattagggagagaaaataatttctttagagggaaaatggaggattccttagactgaaggctggtcagttaatgggaattgtgacttatgcagaggatctaataattgtaagtatcatggttttacttgtttgaattaataactttaaaaaatctcagtcttgcattagcatattttctgtctcttaacaaccgaaaataactgaaactttcccaacatctactaaaatggaaagtttgtcattttctactatgacctgagggtttggctacaaacagataatggaatgaataagatgagcattcaagttatacctgcctgtttaatatggggagaaactaaaccacctgtaaagaaagcatggggtgagaagcccccatcacctgtataaccctcggtatttctgttcactttaagagcctgccactgaaaacattcagtaaaggagtgaatcttccttgccccatcaagagtcgcttttcagctggaggaagggtgtgtccccaagtttttacctgggagcaatgatgatcttgtcaagcatttcagtgagaccagcccaagtttttagggtggggatccagactggttatacgtaccttcagtccttctcccagaggaaggcagaaacacctcaaagcctgcatgtaagaacatctactgagaaattattttaatcagacaccagctgagtgggagaaagaaaaagaacagagaagaacaaacaaaactcccttggtcttggatgtaagag

SEQ ID NO: 19697 - DNA, 2300 bp, Homo sapien
tttaagcattaatgttttatgctctgtttctacaatgactgatactcttcaagagaaacggaagtagctactctttatctacacaagctcagaaccataaccaagttttgtctttgggaattccactgtaaaatcatccatcccctgtgggaaacagtagctcacacctgtaatctcagtactttaggagaccaaggcaggaggatcacttaagcccacgagtttgagaccagcctggacaatatagcaggaccttgtctctacaaaatatttttaaaattaaccaagtgtggtgacatgcacctgtaaacccaagtacttgagaggctgaggtgggaggatcacttgaactcaggaggcagaggttgccgtgagctgcactcagaccactactgcactccagcctgagaagcagagcaagactctgtctccaaaaaaaactttaaagcaaaagatcattcccacaaatctccaaggagtaaacagaaatgaaatgatggggcttcaggtagttcctccttagttactgaagaatcttttaaatatgttcataattataatctggattcaaattctggataccattgaaatcaggagtttcaaatggagaaagctagaggtacccacataaatgatctagtacctatttctattgcttcctgtttcttttctttaaaactcatcctataaatagcattcaagtagatagaaaatcttatatttagaagaaaatataagaaaaatcttatatgtagaagaaatcatctatagtgtaaacaaaagatagagacctttgtgaaatatctccttcaaacacaacaatagagaagaatgttgtttttcccttgtaaaaagcaatgtcacttaaagacctggagttgtttcattaattctcttaggcaaattaaattatctaattcaacatgacatgaaataatgcaaaagtaaattactttatctggcttccaaaaatactaaaactacttttctcaagaaactaagcaatacttagaatacattctattaccagggtcaaccttgtttctgaattacagtgatgggatagtgaagacaggaggcagtctccctttgaaattctccaaccaacatgtattatctatcaatcagagaacagttaactgcattttcttttaagtttattgatgttgctgccagcctgcaatgtttgcatcaggacactctataccctgtttcaaacccatactaacaaaggaaaagggagacacgaaaaagggaaataatattcaaaaatatccagatcccactctgggctttttttcattaaattctcacgtttccaacttcagtttctccttaataaatatttgtggtggtgtaaaatgtgttcctcacccacattatgtactttttatcagtggtaatactatgagaagtgagaatgttgtattgtagttactttaaaatgattttgtaaatatcatattgtagaggtttgactgaataatcaagaaagaaaatgccaaagtatggaaacaaacatactggtactagttaaatcagagttccttcatcttaactttgttatttcagaaaatctttaaaattgagagtgcggttcaaccacaagacattttaaagagagaagcaggactcaactgaattgaaatgagcgtcattattctatctttcttcctataccatacttgagtcctgatgactttcaacaatggcctctgctaaaagtatcattccttgaagtgggttctgcagtggacatgtgtgtgtatgtgttgtcagtatatgtaattttgcttttacaatgttggcagtaagaagaagccttctaattttattcagcatgatgataggccctagcattttaattattttttatgttgtgagtaatttattattcactggctatcttccctgtaaatcttgtcctcgctctgtaaggtttttctttggtgtccaacaaagggtttcattgcaataagaatcaaggtgtgtctaaattcttacccagagcccaaacaatgccagtcttccagaccagcctgggagtttggggtggggaaacagtcattatagaatatcttcatctctctgcccagagatcaccacagttatcacccatgccctcctaaaagggtgtctcaaagcatatctttctgtagagcagaattcggaactgagaagacgagggctcaaattgaatctcacaggatttgcgtgcaagagaaacccaaaggaatggattggctcttcttcagaaacatttgccttttgatcattctaatggtaagtagaatttaaag

SEQ ID NO: 19698 - DNA, 2300 bp, Homo sapien
taggtcctatctccaggtcctatagctgaatcctgtattcaatcctcttgataacatatattcatgatgcgtttaacttacatgtatgtgtgcatctgccccaaccagttcaagagtcttagactaaagacgaccttactttcctaatctgtcagcaaagaaattcaattacctgatcgcaaactccttgccatctagcgctaaagttctatgtgatttggtggtgctgtatttataaacttggatatgtatactcaatcccctaaaggaaaaaaatgagattttcttacatatatttgtatttttgttctaaatatactgccaccaaatgctccccagaatgattcatccagtgacttcctaaaccgagcaatgtgtgttaactcgacattgtcactttcttgggcagtggctccactcttgctgctcctgtgttgctgcaaacagagacagccagaaggcctgggaacaagatttgctcctgtgcctgagggcggagaaggagtgatgcagtcttggagaattgaaggggcccatcccgaggacagggtaagtggactgtcactctccagagaagtgtggagtttcagtggaaattgagcatgtcttaacaattacatgctgcacaaaaatgaacagatgtcagtttttaaatgtttaacataaagcgtttgtttttaaaatgtttatttttcttttcaggatgtgtcaaatatatgtgcacccatgacagcctcaaatacccaggatcggatggattcctctggtcagtagacaccaaaatctgtttttccttttaaatttttcaaaattattcaaccagaccaacttcatgtaaaagtaccttatggaaaagtctgtcagtctctttgggtgacagtataattagagggaatgtgacctgtttgaagtagccactttttttttctatctgaaactacagacagtgaagtatgacacagcagttaaaagagcaaactctggaagcagaatgcttgggtttgattcccagctctgccacttgcttaagggttgcatatcttttatccgaaatgcataggaccatgagtttgagtttggctcaaactttttgtaccatgatgatcaaaaagtttcagacttaggagcattttggattcttgattattggatttgggatgctcaacctgtagtaataagtccttagtcaagacatttaacctcactgggcctcagtttccttatctttaaaattgagcttatgatagtacctactttaaagtgttgctgtgaggagtaaataatacatattacatatgtaatatataatacatacatatattgtatagattattttattatatataacatacatgtgtatgtgtgtctatatatatacacacacacatatataagtgtgtatatatacatatatcacaaaatatacgttagagtagtgcctggcactgtagtaattatttataatacaagctgtttttttttaaagagctaaagaaaaggcagtaaatgtactctaataatacactgaataacttttcttaacttcagacaagcttttgcctcaaaagagtgtcgtaaactctcctatcttaccagccccacgcatatctaacaatactgaacacactacttagctatatggcaatgattgcaccaaacagagagggtgcttaattctgcagtgcacgtgagctttctctgatggttccttagtatcccaagcttggccctttgtatgcaaagaaactccgtgactgaacatccctgtgagcccagctccatcctgttccggagtgaaggaggactatgagctcagtttctgcaatcacgccgctggccttgctttggagggctcccggctggatcaagcccgcagcagccacggcgggaacgggcgcctgcttgtagttctcttggctagttctacacctttaagtctagggcgaagtctgtgcaaatgtgggaaggccacgtcccaccactgactccctctgtgtaattaatttacttttatttggtcaacaagcctggagatgtatcggtgtaacttgtatctctctttgtcagctttttagcgcctacgccttgccgggtggtggtggcaccgcagacggcggcggcagcgttttaggcagatgcgcgctgcaggcaactccagcgctgttaaaccaacatcctcccttttcagaaatctacaccaacacctatgcagccgggggcacggtggaaggaggtgtatcgggagtggagctcaacacaggtatggggacagccgttggcctcatggccgcaggggccgc

SEQ ID NO: 19699 - DNA, 2300 bp, Homo sapien
gttggaaaggattcagtagtagttcactttttgattttagtcaaaaagtgcataaaatatgatatatggaatttagtgggaactctacagagaacaccaaatttgatcttttgaaattttctttcctagtggaagcagattttaagggttctctaattatttctctattagcatcaacactcatcagatttgtcacaaatccatttaagatatatggtaaaactcagggatgagcaatttttctttttttctgtaaagaacaagaaaatatttttgactttgtggccatacagtctctatccatatcaactctgttgttacaacacaaaagcagccattcacaatgcatgaacaaatgggcatggctgtgttccaataaaactttatttacaaagtctttatttcaaaaccaagacttttctggaaatgaagagtggtaatggtcatggttgcacaacaatgtgaatatatttaatgccactgatttgtacacttaaaaatagttaaaatgatagattttatgttatgtatattttaccacaatttaaaaagaaacaaaaacaaaattttgttcacaagatgttttttctaactcctagactacacagtcctttctgcttaaaatactctgtgattggcctggcgcggtggctcacgcctgtaatcccagcactttgggagctgaggcaggaggatcacgaggtcaggagatcaaaaccatcctgactaacacgtgaaaccccatctctactaaaactacaaaaattagccgggcgagttggcgggagcctgtaatctcagctactcgggaagctgaggcaggagaatcacttgaacccggaaggcggagcttgcagtgagccgagatcgcgccattgcactccggcctgggcaacacaaagagacgcagtctcaagtaagtaagtaagtaaataaataaataaataaataagaataatgtttcattttctgtactactcgggagcctgaggcaggagacagcctcctcaattcaggagaattgcttgaacccgggaggcagaggttgcagtgagccgagatcgcgccactgctctccagtctgagcgacagagcgagaccccgattcaaaaaaaaaactgtgattaagtggtttctaaaacctaatgtgtaatacttgcaaagataaaattgctcttctaccaaacctttctttcaatatttctgaaactgtaaaaagtactttaaattctaatgttataagcaaagtagctaaaatggggctggtaatttttcccctctgctttatcttgggttagagtcgaagtatttaagcacttccgagtatgtaacagcaagcaggttcaccacactggggaaaatgtcttgagtaatgaaaagagcaccaagataatctaccttattaggcaatctaggcttttttgaaagttataaatgaaaagaaatacagtataaaagatgtcatttgagtattatcagagtaattttgcaacgcattatttatatatttcaaatattcaaggcaccatataactgttcaattttatttctttttttttttttattcaaagcctacattcatagttgcttaatgggatgtttttcttcttcatatttttagtgcctttcaataaaatatatcattgcttaacatctacattttgcttaactttagatctacccacacatactcaggctgaaaataaatgctcttttacaagttagattttgggggattttgtacgttttgctttgcttttcggttttcattgtaaccatagtcaactagattcagccataagacatcaacactgacaaagtgtagtccggactagcttttgcacttccacatcatgattaatttattattcatctggtaccttcctattaaactttgtctttagcctgtgaacttttctttcagcttccaacaaaggatttcattgctttaggaatcgaggtgtggctaagtttttacctgggagcaaaggtgatgcaagcgtttctggtgagacctacccttggtttagggtggggagggaccgcataacagaccatctgtagactccttcggaaagcagcagagacgctgcagagggcttttcttagacatcaactgcagacggctggcaggatagaagcagcggctcacttggactttttcaccagggaaatcagagacaatgatggggctcttccccagaactacaggggctctggccatcttcgtggtaagtcctggattttcctaataatcacaaacttccctgcttcctcccttgttaaagaatattatattt

SEQ ID NO: 19700 - DNA, 2300 bp, Homo sapien
aagctcttaatgatagtagcactggatgtatgttgttatcagatgaatttgctcagctatgtactgttgtgttgcaaatggaaaggcattagatatgcttactgcagcccaaggaggggtttgcaccttactgcactggatgttatgtgtatatccctgacaattctcacaatattactctccttgcaaagccatgatgggtgtgttattaattttgcttttaattctcctgtgcttaccctgtatctgtaatctctatcaactatgccttccccatgtatctgtaggggtattttcctgcgattgagtatcagattgaagccgaatgtggaggaaaacttaaatattaaatttgaactcaattgaacatggacacaaacaatggccaccaagtcccagaacaggtggtgtgagccccttgaggaattcatcgagcgctgtttcaaataaatctctatttaaattcctatttgttagttattgaaacacaacagacaatcgcaaacacaagttgacctttttgtgttccttgagtccagtcgggaagggcccttgtgactgggtctcatgccaaacaacttgttacgataagagctagggtcccagaccatgaggaaacttcatgagaatcctctgtagtctggtgagtgtagtgtccgactctggagcccaggctgttgcttcccggtgtggtggtgaatcctccacagtctggtgagtgtacctataaatatatcttttccttctccccttcccattgcaatttgcttattatatcatttgcttattatatccgcgttgccatttaattgggataaaggttgtttacccttaaaagtatggtgtgtgtgtcttttcttctccccttgcgcctttctcgcacagaacaataggctcgtccattactttcagtcgttacatttcttggaagtttcgtaatccggtgctgattctagtgtttggatgcccatactaagtttctgcttttcaagatgtcaatttaacatctcacctcgcaatcacgttgttctaattttaacaattatttattgaacccttaagttctagacactgcagaatgctttacctaagattttccaatttcgttctcaaaacttccccgtgcgttggtcgctattaactccatttgacagatctggaaactggggcccagagaggctagtccaggccactcagctagtcactcttggagcggggcctctgatctagctagtggtgtaatagaaattgtaaatcatttcaaagaatatatatatttcccgtaacaccctagagttttctcctagcccaagaattgtcctttttgacctctggtgattgtttctccttgagccagataagctgcaaacctgttggaagcagtgaagggccatagggaagagcagcctttggggagacagccacctgaaattctgctccacaacctccgctccaggagagcgggccgaacgcaccgcggtcgcagctttcctgaggacacgggtccccatgtcactagcgacacctgcgctccgggcccaaagcacaatcacaaagtgcgggacctttgggcggtgctgggcggcctggccccgcagccactgggccggttggtcccgcaggactctgctccgtggagcttttgtccttgggccggggccctgcgacccgcgctacccaggtcgagccccgccaggaggctccctcctcccgccattctccagagagtagggggtcgggaaggagagaacggcggggcggggcctgccacccacagtccccaacccaaggacgtcacggtcccaggtgcgagtgcgagcgggcgggagtccaccccgcgcctccctcctctgctgaactccccacctctgtaaaagcggcccgggccggcccccggctccattttctcgcggcggccacacctggagccgcgcctttgggttgggctgggctgggccgcgcaaccgccacgggaagacagccctcggggcggggagggagagggtggccgggccggggggaggccggggccagggaggagccgagtgcgcgctcggggcaggcggcggcgcggagcggtgcggcggcgggaggcggaggcgagggtgcgatggcgcggagcccgggacgcgcgtacgccctgctgcttctcctggtaagtgccgcaagcgggacaggggagccaccgccggggagggcgtcggtaggcgaggtctagacctcgcgaccagacttgcccgccgcccttgtgcgcgttacctgcccggcgctccttcctgctgcccgaggggggaaaaggg

SEQ ID NO: 19701 - DNA, 2300 bp, Homo sapien
gaggttgggggatcacctgagctcaggagtttgagaccagcctgggcaacatggtgaaaccctgactctactaaaacaaaaaattagccaggtttggtagtgcatgcctataattccagctgcttgggaggctgaagcaggagaattgcctgaacccgggaggcagaggttgctgtgagccagcatcacgtcacttcatcccagcctaagagacagagcaagactccatctcaaaaaaaaaaaaaaaaaaatttgctgattatgctatgtataaggagccagacacaaaatagtacatattacatgattccatttacttgaaatttctagaaaaggtgaaacaatggggatagaaagcagactgggattgcttggagtggtgagtctgagtggggactgactacaaacacatgtaaaggaacttttgggggtgatggagtgttctaaaactggaccatagtgatgattgcaaatccagaactcatcatgctgtacacttaaaatgggcaaattttattgtatataagttatacctgaatgaagctgtccaaaaaggataaaggagatgaacggatatttttaaatatggaaatagagatagtaaatagtcacatgagaaaaattcacagctttgttaacaaattaacaaataaacttacaatctttaatgttattaaaaaatagcaaaaatggaaatgataaaataagtttacagagttgtaaaaaatagaggtctattccctcacacagcgctcttgatactgaaaattttccatttgctttggagcattatggctatttatgactaacactatgaaacacttatggccccaatacctagcttttatttatttatttattttttcatggtcttggcctttggatactaatgacatctggctggaagattttatttctcatccggcatatatcatgccatcaaacaagcatgtcaagtgcaagagtgacttaaataaactaacaagctttcacaaagatattacaatcacaaaggatgtattttctctagtctttttctcctgtgtccttgtctcaacatcatagtgatccatatttttaaagggtgcagaagttgtgatccatccagagcccaatagagaggaaaactgactgacttattttggtgaaaataagtagtggtagctccaaaggaaggaaattcacaatgaattctccaaaacacaagtgaaaagctttgctgtaattcatgtaaacatgcctaatatatttaattttatactgaagaaacaagcaaaaatgtttagtgcatctaaatggtcagagatactggaaataaaaagcaacaggacctaagtaaactttaggtagttcttttagtaataggatataggtcaacagaggaaaaataatgtgtataaaaatgctgagagcagtattaattacatttagaaattgtgatagcccaaatgcctaattatagaatgactgtctatatctaagtagtagaatactatggaaatgtttataaaaagaaacattgaaaagttggaacataaaatatgtatacagtaatgaactgattatttcaaatggaaattgtgctattacaaagaactatttgaagaaaggttaatcttttatggaattaacagcaaaccagatattaataggtattatgctaaaaaagaggagagtggggttctttgtttaaacagatttgaaaatctctaggtttcttctttactccaggaattcaagtattttaatatgctaatgtgtaatatatagctatattagagggacagagctcacagagctaccactacttattttcactaaaataaacccatagaacacattttaaggaatactgatttatactgaatgcccactaattttttacattagaaaaaaaatcacttcagattgttaaatatatatacacatatctatagatatgtgtgtgtgtatgttttgagacagggtctcactttattgcccaggctgaagtgcagtggcatgatcatggctcactgcagcctcaaccctctgggctcaagcaatcctcccacctcagcctcctgagtagctaggaccacaggcacgagctatcatgcacagctaatttttgtatttttttgtacagatgggaactccctatgttgcccaggctggtctcaaacttctgggctcaagtgatctacctgccttggcttcccaaagtgctgggattacaggcatgagccaccatgcctgaacaaaatatatatatatatttacagtaatttcaacatttaggaaaataaattggtaatact

SEQ ID NO: 19702 - DNA, 2300 bp, Homo sapien
cacactgcagccttgaattcctgggctctagtgatcttcccatgtcagccgcccaagcagctgagaccgcaggtgtacaccaccatggccacctaatttcttaaaatttttgtaaagacgaggtctcactatgttgcccaggctggtctagaactcctgggctcaagcaatcctgctgccttggcctcccaaagtgatgggattacaggcatgaaccaccaagcccggctgcagattgtttacatgctcggattgcataacagttacatctaggctttttagtgtacccatcaccggaacagtgaacgttgtacccaagaggtaatttttcaatccttactttctcctcccttctcaccttttggagtccccagtgtctattattccactctgtatgcccacgtgtacccactgtttagcttccacttataagtgagaacatacggttttttttttttttttttttttgagacagagtttcactcttgttgcccaggctggagtgcaatggtgagatctcggctcaccgcaacctccgcctcccaggttcaagcgattctcctgcctcagcctcccgagtagctgggattacaggcatgcaccaccacacccggctaattttatatttttagtagagatggggcttctccatgttggtaaggctggtctcaaatgactttctgtttttgagttatttcacttaggttaatggcctccaattccatccatgttgctgcagaagacatgatttcattcttttttatggctgagtattatcccgtggtatatatgtaccacagttttttaatccagttgatggattaaattggacacttaagttgatggacacttaggttgattccatattcaagtactttatttttaaacgtaaggaattctttaagtaaatgactccatgttattttgattgactaattttgtaagtgtttttatgtaaacaaactcacaagttaggaaaaaaatctttcatcaaatgctgtcttctaattttgtttagggaaatgtttttctcataaccataccttgcctgtctgttgcctctgtgacctattgacataatatttaaaatttactttacagcaagaaaagggcactgaaaatgcacggaaaagtcaatgaaagtcagaagaaaaaaaggttaatatttaaggttgactttggttggagttaacttcaactttcccccaccctcttcctgcagaatctcctccttccagctgaggattctttctaaaacctggttataaggtgtcttgctcacaattgtctgtggctctttactgcataaagagtctggtcccacagccttagctgctgttccaagtcctccacagggtggcctgtacctgcctcttcacccacaccttctgctgtgctcaccgcctctaatcccttacccgctagccaccctcacctgtgtgaggtaagcttctgatctaggtggtccttcctcctgtttacttactctctggattagttcatttttgcattactataaagaaatacctgaggctggttatttatttatttatttattgagacggagtctcactctgtcgcccaggctggagtgcagtggcgcgcttggctcactgcaaccgctgcctcccaggttcaagcgattctcctgcctcagcctcctgagtagctgggattacagacgcccgccaccacgcccggctaatttttgtatttttagtagagacgggtttcgccatgttggtcaggctggtcttgaactcctgacctcaggtgatctgactgcctcagcctcccaaagtgctggcattacaggtgtgagccactacacctggcctgaggctggtagtttataaagaaaagaggtttaactggctcacggttctgcaggtgaaccagaggtgtggtgctggcatctgcttctggtgagggcctcaggaagcttccaattattggcggaaggcgaagtgggtgtatcacatggtgagaccaggatcaagagagaggggagagaggggctacgcttttaaaaaacaaccagatctcgcgtgaacgacctgagcgagaactggctcatcaccaaggggatggcacgaatccgttcctgcgggatcggttcccatcatccaatacctcccaccagactccacttccatcattggaggtcacatttcaactaagatttggaggggaccgtatcctaactatattaacttccaattttcatcgaaagcccacctgtctaagaagagctcctagacattccctttccccttcaacttggaggaattgggaatgac

SEQ ID NO: 19703 - DNA, 2300 bp, Homo sapien
atgattcttagtttcaacagggtgcagtgctgaaacgcgtgcacagtagattttgcttcggttatgaaagaacttccaaatatttatgattcatagccagagaaaaggctctctatccaggttctgaacaataggaaatcatcaagaggatattggatgacaatatatgaaagatgttatttgagaaaggattctctcctgaggcatagatgttgaaccaaattctattagttatgcttttacagcaagatagtggtttacagcttacaaaaggcttgtacatcctctcatattaaaagttattagaacagtcctttgaagtagaaaagtaggcatttctattttacaaacgagttggccgagtatctgagatagtagataactcatagaaggtcatccgggaaacggggcagcagaactgggatcgaatgactctggtcatccaactccaaatgcaaaagtctttctgctgctgcttcctagttaaactctaagggtctaagactccattcctagttatggtctcaactacatttgctcattgctgtgaggggtcaacccacctcccggagtcctctcctgcacattctcatgttcctgaaaggcttttctgtcccttccactactccctgtaagctcctgtgcttcacaatttcttgttgaattttttctaatctgactctatcagttatgggaatgttccctcaattcttagtgctccaaaccggacttgctcttggcttgtatttgtccaaaatatttgtcttctctatgttttctacatgtttgtcttataaggacaaaaacctgccttagtttatccatgaacaaagccacgcatgctagtggacacacacacacatgcgcgtgcgcgcgcacacacacacacacacacatacacacagagactttgtatgtgagtaatgaatcatcaaatcatcataatttctggacttgtattaataagtcggccaggaggaaaagaatctgctgtcaatcatggcttctggttctcacagtcatctctactttcttccagcaagtttggttctgtcaaaaaccagctgtcagccttgttcctgcatgcccaatgcagaagagtcagtaaagaagatttggttctctgtatttcaggggcatcaatgccaggttgaaatatgccattctggcccagctcagtggctcacacgtgtaatcccagcactttggaaggccaaagcgggtggattgcttgagctcaggagttcgagaccagcctgggcaagaggctgaggtgggaggatgacctgagcccgggaggtcaaggctgcagcgagctgtgatcgtgccactgcactcgagccagggcgttggagtgagaccctgtcaaaaaaaaaaaaaaaaaggaaggaaaaaaggaaggaaggaagggagggagggaagatgccattcttagattgaagtggactttatctgggcagaacacacacacacatacacacatgcacacacacattgtggagaaattgctgactaagcaaagcttccaaatgacttagtttggctaaaatgtaggcttttaaaaatgtgagcactgccaagggtttttccttgttgacccatggatccatcaagtgcaaacattttctaatgcactatatttaagcctgtgcagctagatgtcattcaacatgaaatacattattacaacttgcatctgtctaaaatcttgcatctaaaatgagagacaaaaaatctataaaaatggaaaacatgcatagaaatatgtgagggaggaaaaaattacccccaagaatgttagtgcacgcagtcacacagggagaagactatttttgttttgttttgattgttttgttttgttttggttgttttgttttggtgacctaactggtcaaatgacctattaagaatatttcatagaacgaatgttccgatgctctaatctctctagacaaggttcatatttgtatgggttacttattctctctttgttgactaagtcaataatcagaatcagcaggtttgcagtcagattggcagggataagcagcctagctcaggagaagtgagtataaaagccccaggctgggagcagccatcacagaagtccactcattcttggcaggatggcttctcatcgtctgctcctcctctgccttgctggactggtatttgtgtctgaggctggccctacggtgagtgtttctgtgacatcccattcctacatttaagattcacgctaaatgaagtagaagtgactccttccagctttgccaaccagcttttattactagggcaag

SEQ ID NO: 19704 - DNA, 2300 bp, Homo sapien
aaataaagataaatgaacagtgggattggagaggggaaaatcacaatttttgcttcctcagcattcatgacttctttggcttgcatagattttgtttttctttattttacaaatgagtttccttttaatgttgttccactttgcatttcaaatttcccttaagcatctaaaaatgttacaaaatagtgtcattacctttcaaattaaacatcaaattagccagagaagttgagttgtgagtactccaacaagcaaaatattaaaaaatgaatttcaacttggtgatcccacctagtgaactaatgggatataaggaacctcttacgtcccagacaccatgcttagcattatgcacagttatccatttaatctcacagccttgcaagggggtattatatccactgtttgagggcggagaaaacaggctcacacaaagtagtagcttccaggggtctcacagttaatattaatgaaaggcttgggcttatacataggtgtttcaggttccacattgcaaagcattatctcagggacgatctatggcatgcgcatcccgataaaaacgtaccaaatttattggctatcaactacagttccatctggaaatactcagcaaataatggcagtaaggcatcccgccacttcctgcatgattagttgaaaaagaaacacctgcgcacacacatttgaacaatgtgatacagctaaggacctggacagtcagctagcaggaagaaacatttgaacgaagggtagaccacggcctaggaggtggatgaagacacccgtccgtttgcctactgaagcaagatggggctgaggcgctcaagggcctattggctgcccagaagcctttgcagcgccgcctgaatacagcgaggatgacccagggttcaccttcagcgttgaaggcaagtcctggtataagggacgcacataggtccgcgccacatcctgacactgtttccacaggaagtgcgggataggaggggggattcattaatccaggtcggaaatacaccttgttcctcgaggattttggaaggaaattccacccgcgaagtccccttttggagatgcccttttcctttcaggtacagcatccttcattatgtacccccagggtacaatgtatccggggctcgcaacgcgtccctcaacccccagcagcgcggtcaccgcggggtccccgggcgggcgggggcggcggtgacgcaggaggcggtggggccccggtgcggcgggcgcggggagggggctgctgggcgcgggcctatcaggacgcgcggtgtttcgggcgcggggagggcggggacctccaggtttcctcggggcccggcgcagcgccgcctgccgagttccgagcgagcgcgcgaagcgcgcaggggtctcgagacgttcccgccggtcccggttttcctccgcggctcccccgccccttcacgtccgcctctttctccaaccagacgcggctccgacggcgctcggcctctgctcttccggctccccggctctgcccgcagcgcgcgtcgcccggttgctcttcgcctggtgtccgcgggcccggcgggggcgcctcaccccgggcgcgcggcggtaatgccgctgccgcccttgcggccaggcaggcagctggcggcggccggagtcggagcgcgttcgtcgctggccgggacgccgccctggcctgtgctcagctcccgcggcggccgcggggcgccggggcccggcgcggcatgaggaggcggctcggtgcaggcgagcgcccagctcctcggccccgagggcccccgcgggcccccgcgcgtggcgcgcgctggttgcggccccggcgcccacgctagccccgcgcaggcaggagacgccgcggcccggagtaggaggcggcgcagggcctgccgagcggacgcgggcggcccggaccttaagcacggggcttcgcggcgggaccccgccgggcgcgggcagcggagccgggcgtgctgcagttagctgcccctctccgcaggggcgccgcggcgcgcagcctgcgcctcctcccacctgcagcccctcctcccgccgctgcttggcggagaaaacgctcctcctcgcccttccccggctttcttccgtcctgccgtccccgggcccctagcccccagtcccctctcccccctccacctcttgtccctcggcctccgcgcctcccctcccccgactctctggcctcccattcattccgtccgctccctcccatttcctcttttccgctcgggccctctccccagagcctccccgcgcggaccccgctgcagtct

SEQ ID NO: 19705 - DNA, 2300 bp, Homo sapien
caaaggtcttgatatattttctctaagtttctcttttgattgaaaatatgcactgttgtcagatcatgctaacctttatagataaaagatgggggaaatttttcataatacagaaagatattgggcaggttagtttttcttctgaagattttactgagctacttgagtttgtttttgacacttaaaaatttgttttatatgagtagtgtatagatttcttttaaaatattttgtagaaagcaagggaagatgtgatgcacagcattaattatttaaaaatttacatgattttgagagctttatttctgactttatgatttttgtaatgataacaaattttttttgttatattttttcttacggcttagttgtactatttaaaagtcattctttatattatttaaaataaagtatttttctccatttcctggtttataccgattttcaaattactaatacaggtaccaaaacaaatattaactcaagctcattaattttggggctgggggatgttactgctgttttatcttagacatttacctatactgaaagataaaggattttaacattctgctttttttttttctttagcagtatggtagtattagcactgttttctgttgcattctgagagtaaaagaaataatctctttttcagtagatggcttaccaaataactttagagctcacccacttcagttggagcaatccagtgacccttctaacagtattgatggcccagatcatctaagatctgcttcatcgttacatgaaacaaagaaaggaaatactggaataattcatggtgcatgtttaacacttactgatcatgatagaattcgacagtttatacaagagttcacatttcggggccttttgccacatatagagaaaacaattaggcaattaaacgatcaggtaaggtttgattttttggattagtattttaaaaatttaagtaaatagtaaatttaagaattattaaacgtatttgaagttttgttttattttcgttttaagataggccaatattaagacttcccaaaattactatcaatgatgaaattctgttcaactctagaagaggcttattcattttcaataggattttgccagcatattggacagttttctttaaatcagttttattaaaatgaacatttgctattaaagctttttagttaaaatttttttatgtaaaggaaaaatactaaattctttgtttgtcaacatatttaatctcttttttaaagctaatatcaagaaaaggtttgagtcgatctctattttctgcaactaaaaaatggtttagtggcagtaaagttccagaaaagagcattaatgacctgaaaaatacatctggcttgctgtgagtaaagtgttatcatttttgtttttcctctgtttaactctctgactagtgtttgattgtatatcctgcagaagataactatctctttaatttcttagtttcttattggtgaaaattcaggtggataagaagagtgactcaagtaaatcatattaattttttaaaaactaagtaattggacatctaaaaacaaatgggaaagtcacttttggtctgtttccttatttgtaaaacaatgaagttagactaggtattcattagtaaccattctatatctaaaatgtaatggcctgatgattctaagacaagggacacatttaataaattttgctttacacaaaaaaccattttaaggaaaaaatataattaatccattttggattttaatctttctcctggttgtatataaatgtgagtcacttggaattaaccatttacttcattatttgaccatggagaaaatgtttgcctgccattcagacattctcagggctataaataataaaacaaggaactttctgtttccaggtatttttgagaactgacactcttgttggaggtagaatttctttgaaacagcattagttttcttcatattctagaagaacatggcagcttgttaatgtattttataattttaatggtttggggggtaataaattataaattattttcttttgtatttacaggtatccgccggaagcaccagaacttcaaatcaggaaaatggctgacttatgttttttggtgcagcattatgatttggcttacagttgctatcatactgcaaagaaagattttcttaatgatcaagcaatgctttatgcagctggtgccttggttggtattctatggtattataattccttaattctgctaccataaattatttagaaatttctcttggtggcaaacagaatccttaggg

SEQ ID NO: 19706 - DNA, 2300 bp, Homo sapien
gtaatggttgcacaacttttggaataaactgaaaaccaatgaattgtacactcatctgaaggggtaaatattatggcatgtgaattatatctcagaaaaatctattttggctaaattaccattgaaagtccttttcaaagagtctaattcagctgtttttactttcagcataaaaataaatggcctttgaaactttttagagtactagataaatagtatgtttgcatttgggagtcctgttataaaaaatgtatcttataacttgagtcacactaaattatgtgagattctcacattataaagggtaaggaagtgaatcagaagcattgaaaagggattgtgtgtaacatgttatctcttgcaaaaggaaattaaattttgggaccccaaactgatttagccaaagggaaaagtcacgctgggactggtcacgcaaatctgcctcccccttttggttcctaaataagattgctgcaagatgaaaagctacatctctcccccgtattttgcccacaaggaaattcttagtgtgctgttaaaacttcatggcaatgcaaattgatagcttatctttacaggtggccaccccagcccgccagacacaaatgcctatctgattgttcccctaccccattttgtctgttatcttatgaaaaatgcagactcccacattcttcctctgcccattttatgtcatcttatgtaaaaaatgcagattcactgagccagagaaaggcaagaattactattttctcctaccgcccccttacatgaaaacggtgtgcttctcaatatcccgccctttcccctttaaatttggagcactcaaaatcatcttcgaagaaaggcatagacctgtttcctgggctcgtacttaacttcggcaaataaatctcctaaagtgatggactctcttataaattaatctgtagccaaggcatgtcatcaatatgtcctactgtgccttcctacctcccatttatcaacttacatgagaagcacacatcttacttgtcataaattattaccttagtgaaaacctgagggtgtcaagaagtcgaaaaatttgagacattgacgttggggaagacacctttaattagagcaccataaaatcatgatagaatgatacatttttccttgccttatatttttggcatgcaaaacagaaggagctcaaacaattgagtgacacattagtaaaattcctttcattcatttctacttacaaggcacacaccattgacctcaccccgtccccccctttaaaacaatatttgacccgcgcccccccccctttaaagcaatctttgaaaagttaggaatgaaagccggttcaggacagtacacagtacacaaatactggcttcccctacctccaccacaagcaagtaaacatcctagcacagtgtaaaaaggaagaggctgaggacgaaccacgcggacatttgcaggcacaccccttccctgcgaccaacaaaaatgcagtagcgcaattacacttgaaggaattgcagcactcacaaaagcacacattctgttcaatggttgagtccacataaagtgacagtccgtttctaaaagcatggctgtatttaaaggacacatggtctgttcaggtccgcttcagcgaaaccccaagcacttccgagagatccactccctctctccgagcaggtgccactagctgctccgccggcgagcgtaggaagcagcgcgaccaaccaaatcggttgcccacaacagccagggacgtcaaaaaggccaaactgcgtgggaagcgagcgtgcgcctccatcaccacgacagcacccgtctcgaggctccacctgccgctagtaggtggctctcagctctgctctgctaagggcgagcttgagaacccggcctacagttgtgcacctccccccgcccccgcccccgcccccgcccccgcccaccgcacttgtagccccgccccgcccagggagcttccgtcacaacacttccggctccagcctcccaaccggcctccgtcgtttttcacttccctctcctcagctctcttcccttgcccctaccgtctcctttaacacagtcacgtgagggacgcgcgcgggggcagctgggagtagtactgccggttggtcagggttcggcctcaacatggcggttccggccgggcagtgaccaaggttttgccgtccgaaggactaagtggtgactgtcggcgtctccacctatcggggtggaatgcgagcacgcggggacgagcgctgagaagcggcggtgacgggaaggggggggtcagtggattgtgc

SEQ ID NO: 19707 - DNA, 2300 bp, Homo sapien
ttagttacatgaacgtcaccagtgacactgataataaagcagtttttggacagatggaggtggagaggttggttcagaacccagactggactgaataagaagtgaataattaagaaatgatgacaaaatgtagaggatcagatcaagagatttggccttgaagcggatatggggcaggagttgaggcataagtgggatgaaagggaggtttttgttttccttttgaagatgggaataactaccttttcatcttatttccccccccccaccgcctgccccccaccacccatgctccagctccataggtctttcctttctttggttctgcctcattcactgttcccagtccacgctttttcctaaatctttgaatggctcacttcttttcattattcatggctctgctcaaatgtcacttcatccaaaaattcttctctgagcttattcttctcctcattgccatttactgttttatcttcttcatggctctgattatctgaaatgattttgttcatttgtttatggattgattacatgtatcttccttttgtttgttgtttgtttttgagacagagtctcgctctgttacccacgatggagtgtagtggcatggtctcggctcactgcaacctccacctcttgggtgcaagtggttctcctgcctcagcctcccaagtagctgggactacacgcatgtgccaccacacctggctaatttttgtatttttagtacaaaaatttttactaaagaaatgtatttctagtagagacggggtttcactatgttggccaggctggtcttgaactcctgaccttgtgatccacctgcctcggcctcccaaattgctgggatttcaggcgtgagccactgcacccagcctgttttggttttttgagacagggtctccctctgttgcccaggctggagtgcagtggcatgatctcggctcactgcagcctccacctttccggttcaagcgattcttgtgcctcagcctcccaagtagctcacacccagctaagttttgtatttttagtagagacagggtttcaccatgttggccaggctggtctcaaactcctgacctcaggtgatctgtccttcttgcctcccaaagtgctgggattacaggcgtgagccactgccccggcttggtttgttttttgagacatggtctcactctgtcgcacaggacggagtgcagtagtgtgatcttggctcccgtgctcaagtgatcctcccacctcagcctcccaaagtgctgaaattacaggcgtgagccacggtacccggcctatatctcctaattaaaagtaaagcctgggtgaagtttatggcctgctaaatacgtacatgtattatatgcgttattatatcccatgtgttatattatatattattgtatatgtgtattatatactatgtactattcttacaactgtatgtgaatctataattatctcaaagttttgtttttgttttttaaagtaagttctgtgagaactgggattttgtttgcttgttgacgattgtgtcttcatcactagaaccgagtctggcgtgcagtgggcactaaataagtcttcgtaaaaagtgtaaattaacgcccggctaatttttgtattattagcagcgacggggtttcaccatgttggccaggctggtctcgaactcctgccctcaagcaggagtttcaagcccgcctcggcctcccaaagtgttggaattacaggcgtgggccaccgcgcctggctgatcatgtttaaagggcggggtggggagcgtacaaacaacagaggaaatcctgagccgcagaggaaactggagatggcagggtttagcactagaatctctgtaggagaggtaagattggaatcctaatctccaggactctttccactacccaggctatctctccattaatggactattgattggatgacagagtagcgatagcaccgtcttaggagacgcccaatcataggtcataggtcatttttgcagcttattgtgatgacaacagtggaggatggtcttccacttcaccttaaaagcggctgttctctgattatcattaagcatggccacgcccgcacttaacttctgacagtggggaaagcagctgtgtgtgatagcttggaaggtttactgctgcctcaagtcctcttctctgcagttgaggtttcaggtttcaatcctcccaataccacaagacagagcacggggcggctgccgcctccgcctccgcgccttaacctaggcggcttgccgaagatctcagccccgcggccgcgcgctc

SEQ ID NO: 19708 - DNA, 2300 bp, Homo sapien
ggattagacataagtaaagctgccgttgcagagaaagaatgaagcaaataaaattagggtcacaaaattaatgttatggttagatattcccaatgaataatgggaaacactattatacagaaaatacaccttacttcctaaatggtcagaatgaatgaaatgagtggaattatcaaaaaagtaaaatgtaggccaggcacagtggctcaggcctgtaattccagcactttgggaggccaaggtgggcggatcgctggaggccaggagttcgagactagcctggccaacatggcaaaaccctgtctctactaaaaatgcaaaaattagtttggcatggtggtgcatgcctgtaatctcagctacttgggaggctgaggcaggagagttgcttcaacctggaaggcgcaggttgaagtgagctgagatcattccactgcaccccagcctgggtgacagagtgagattctgtctcaaaagaaaaaagaaaaaaagtgagttttcttctctgggctgttaaaaatttgaactcaaagaaccattttataagtgaatgtgaaaagcacctgaactactgctattagctgcccctctcgtcacgtgctcttcctccttccaggaaatctgaagctagtattagctttcttgtcttgcttccactgcgcttgctgctaaggaggaaaagcaacaaaaatacaaaatatagtttggtagagggaattagctattcattggacaaattattattattctaggaatcaatgcttttgagatgtacattaaaacccatttcctccataaagttttctgttaactctatatatttctaatcattccatttcctatcctcattatagccatcgtttaatgcaaaatttaatactttggcaaataccattttttctctctcattctgatagatatgtaataatgtaaacaggttgagagcaaagttcatgacatctgcataacacctaacaatgccaatgtcaacatagacaataaatggcagaattgatttaaatagtcccttaaatggcttctgtttattcatttagaccatgggggagggttttaacaaaggatggtaataaaacctttcttttctctgaagctaattgtagatgctgtataatgttccagattttccttagcttctttcacgtcattgtggatcccatcttatcgatttatcctttttttgttcttctttttttttgagagtctcactctgtcgccagggctggagtgcagcggcgcgatcgcggctcactgcaacctctgcctcccgggtacaagcgattctcgtgcctcagcctcccgagtacctgggattacaggctcccaccaccatgtccggttaatttttgtatttttagtagagatgggatttcatcacgttggccaggctggtcttgaactcctgacctcaagtgatccaaccgccttcgcttaccaaagggctgggattacaggtgtgagccaccgcgcccggccttttttctttcttttttttttttttttttgagacggaatctcactctgttacgcaggttggaccatcttatagattatcaattgtacagataattgcactccggcctgggagacagagtgagtacctgtctcaaaaaataaaataaaataaaataaaattaaaaaaaacacttaaattagtgaataaccttggtgaaaagccacgtccatgcttctacggcatttctcttcaaagctaaaaaaaaaaagaaaaaatcaaaaatcaacccaaaggtgtagtagaagactgcatctgcgaccgtatttaagcatcggtcatgctgttaaaggagaaagtggacatcctctcaaggaaactttaatcctgcccccaaaggattaaaatcccgtaacaaatatttgtttataacacatcttgacaagatcaaaacattctggtagggcaaatagtaaagactaaatcttgaacattgacgaaaacttcctgaaaggcccaatgtatttgacaggagaggtaactggggtcccgggcctagcgaggcggggcggggaggcgcaggtgtcaccgcgggcgcccagctgcttacgtcacaacccgcggaaggcgccgtgcgccggttgctatacaggccgcacttcacaccccgtgcctccccgcctctcctggctcctccgcccagatccccggcgctcccgcgttcggtgacggccgggtaggctgtaggcagcgcaatgccaagacagagctgctggcggcggcgggcgaatctccctgcaccatgagcctcggctccggccccgttagg

SEQ ID NO: 19709 - DNA, 2300 bp, Homo sapien
actctatatatttctaatcattccatttcctatcctcattatagccatcgtttaatgcaaaatttaatactttggcaaataccattttttctctctcattctgatagatatgtaataatgtaaacaggttgagagcaaagttcatgacatctgcataacacctaacaatgccaatgtcaacatagacaataaatggcagaattgatttaaatagtcccttaaatggcttctgtttattcatttagaccatgggggagggttttaacaaaggatggtaataaaacctttcttttctctgaagctaattgtagatgctgtataatgttccagattttccttagcttctttcacgtcattgtggatcccatcttatcgatttatcctttttttgttcttctttttttttgagagtctcactctgtcgccagggctggagtgcagcggcgcgatcgcggctcactgcaacctctgcctcccgggtacaagcgattctcgtgcctcagcctcccgagtacctgggattacaggctcccaccaccatgtccggttaatttttgtatttttagtagagatgggatttcatcacgttggccaggctggtcttgaactcctgacctcaagtgatccaaccgccttcgcttaccaaagggctgggattacaggtgtgagccaccgcgcccggccttttttctttcttttttttttttttttttgagacggaatctcactctgttacgcaggttggaccatcttatagattatcaattgtacagataattgcactccggcctgggagacagagtgagtacctgtctcaaaaaataaaataaaataaaataaaattaaaaaaaacacttaaattagtgaataaccttggtgaaaagccacgtccatgcttctacggcatttctcttcaaagctaaaaaaaaaaagaaaaaatcaaaaatcaacccaaaggtgtagtagaagactgcatctgcgaccgtatttaagcatcggtcatgctgttaaaggagaaagtggacatcctctcaaggaaactttaatcctgcccccaaaggattaaaatcccgtaacaaatatttgtttataacacatcttgacaagatcaaaacattctggtagggcaaatagtaaagactaaatcttgaacattgacgaaaacttcctgaaaggcccaatgtatttgacaggagaggtaactggggtcccgggcctagcgaggcggggcggggaggcgcaggtgtcaccgcgggcgcccagctgcttacgtcacaacccgcggaaggcgccgtgcgccggttgctatacaggccgcacttcacaccccgtgcctccccgcctctcctggctcctccgcccagatccccggcgctcccgcgttcggtgacggccgggtaggctgtaggcagcgcaatgccaagacagagctgctggcggcggcgggcgaatctccctgcaccatgagcctcggctccggccccgttaggggccgataagcacagcgcacgccgccctccatttgccccggggcctcggctgcgaagatagcggcggccggacaggaagctcgaggaaagcgctgggccgggtctctacgaacacgtgaaggaaaagcagctccgtccacaacgccgcttcggggctcctaggtgagagtctccccggcggaagcgtggaggggccggggtgccgggaagcggggcggggaggaagccgcggacacgggctgggcactcggggctcggggtcggggtgagtagaggcggaaaagcagtgaaaagggaggccttgggcgaagacgggggctgagggcggggcgcgagcccgcgcctggagcccggtgagggcgtggcctagagcgtgaggccgcgtcctggggcggggtgaggggcgagcggggcgggcccacggcatgctgcgagcccagcctcccgccaagcaccgtcccccatccagccccctgtgggaggagccgtgggaggggtcgcctcttgcccggcgcgtgcggcagtagcgtctctgcgttcggccccgccctacccagggccccgcccccttcctggcgcgcgctgtatcctgatgcgatccccctcccccctccgggttcatgtagggagtcgggccccgggccgccaccgtcacctcggccgctgccgctgtcgccatcgccttgtttccccatcccccgccatggccgaggacctctctgcggccacgtcctacaccgaagatgatttctactgccccgtctgtcaggaggtgctcaaaacgcccgtgcggaccacggcctgtcagca

SEQ ID NO: 19710 - DNA, 2300 bp, Homo sapien
tctcggctcactgcaacctccgcctcctggattccagcaattctccagcctcggcctccagagtagctgggattacagctatgcaccagtgcagtgcaccaccatgcccagcttatttttgtatttgtagtacagacagggtttcaccatgttggccaggctggttgcgaactcctgaccttgtgatccgcttgcctcggcctcccaaagtgctgggattccaggtgtgagccaccgtgcccagccacatttaaatctttaatccattttgggttgatttttgtatatgatgaaagacagagatctatttttattcttccgtatatggatatccagtttctcagcgccatttattaagagactgtcctttccccagtgtaagttcttggcatctggtttctctgggttctctactctgttccattggtctgttataataattgatattttaggttcccattcacatagatgtcaaaaatttaattgcggctaattcaggattcacattttacctttaggcttgtgcctaaccttaattaacagtcccaatgcattgggaaggtcccttatgatccctgatgtcatctatcctcacaggcatcctctaaaatatcagtccctctgtctggtccttatttgtgattctgtgcagcctgcaatggagacatccttattcctatccacatggctcttcaggcatgacagctttttctgatacttctatgcttcccttggccccaggagttattctcctcttcccaagatgtgccttcttctgtagagtccctttgcttccttgtagctctagccaagaaacaggaccatttgattttggatcctataatatatctaggggatctcagggatcaagtgaagaactgactataactacagttttcagttttcccatttaattctcatcctaccctcatagggtgggaagtgctggcttgtactcaggaagcaacctctcaaactccttgtctatgctacatgtctcttgatagtcttcctattagcacaaaatggggtgaaggctaagctggagaggggaaggggaaactagaaaaaaattaggttttttttttttttttgagatggagtgtcattctgttgcccaggttggagtgcagtggtgtgatctcggctcaccgcaacctctgcctcccaggttcaagtaattctcctgcctcagcctctcaagtagctgggattacagacatgcaccaccacacctggctaatttttgtatttctagtagagatggggtttcactgtgttggccaggttgggcttgaactcccgacctcaggtggtccacccaccttgacctcccaaactgctgggattacacatgtgagccaccatggccaaaaattagtattcaaaaaatattatcctgcatcttaagtaagttgaatatgaagccatgggaactgagagaacaggttgtttctaaagagaaattatcccaagaaaagaaggaaaaagtgagaaagaattaagagatggattgggaacattattttattagaaaatcagtgaccattcctacttttatgacccatgtcccaccagtgtttgcttgatgggaatttttagggatgagatacattgctatgttactactctatatgtgaataaccggtgtgcctgatttctagcacattaatggattttataactcaataaattataggcactcaataatttttattaaatgagtgaatgataaaaagcagtggacataactggatatattaaagcagcatggggctatatgagaggaggagtttcataagatcaagattaaaaattaatttgatatatatattttttgcttaagtggtgtttactagtctaaggaccagtacacatacattagagaatgtattcattaagaagtctcagccaggcacttaattgttgacacaggaaaaaaaaaaaaaagccaacaaaccaactccgcagagctgtgttaaaaatactggactttcatcccttgattggaggtattattacagcatcaagctgacctgcaatatggatcattgagatcaaaggctataaattataatgtttgcctttaaagaagtcaattcaaccctgaatgtcatagttagctactttcaactggaagctacaacatggatttatggaatctgtcttggtttctgttcttggatgctcttctcgtgatttctggcttggtaaggaaacagtatatagaagataatttaaaaattttggggcagttgatattgattgttaaagaacaagtgttttttttttgtttgttt

SEQ ID NO: 19711 - DNA, 2300 bp, Homo sapien
agtgggtatagtcacccctggttcagaatcatgaatctatatcatctcagctagaagcatagcacccaagaatgaaatcacaaaggaaaattttgaaaatattgactacattttaaaaaaaacaactttaatagttaagctataaaattgcaattcaaacaacaaatggaagaatacatagcacaaatgacattttcatttacacaaaaagtaatcagtaagagatctaaataattagataaatactgaaaaatgaatataccaataaatatatttaaaatatattcagcatgcatgctttacctctcatgctggtaagcatgaaataaacttcagtgtgagtgtagggagacataatttcataaagtgataaaagtataaataagtataacattgatgaaaacacagtgggcagtgcatattagacctttcaaatatatgcatattagccaggtgtggtggctcacacctgtagtctcagatacttgggagggttaggtgggaggattccttaagcttgggaggtcaaggctgcagtgagctgtgatcatgctgctgcactccagcctgggcagcaagatcctgtcttcaaaaacaaaacaaaacaaaacaaaaaaacaaatatatgcgtagcttttgtccctgcagtttttctagtactttatcctaaggaaataattgagctgtaaaaaagttcattgcagtactatttataattgctagacattggaaaaatccatctatatttttattttacagtaaggaactagtcaaataatgcacattcatacaaaatggaatacattaggttagtattactattgatgaaggatatgcccgggggaaatggatacagttagaaactcaggtaacagaattgtgtatatatgtatctatttgtatctctgagatagatggatcaattctgtttcttttttctatttatatttgacagattatctttagtgataagatagtatagaagttcttcatttttatatttgtatttttaatatttcttccaattaaataatggatgtataattttttaaaaaattgagaaataccacatttttaagttctttttctcaatttcaaattttaaaaatttaataaaattttaaaaagtaaaaaattaaaatttaaataataaaaaacaaggaattttctacatcagcattcatgaaaacatttataactgcaaaagaaaaaatgacaatatccctgttagtatccatatgatagattactctgcatatatagagaaaagagatgtttataagattctaaactaatatcatcttgaacaaatagtagttattgttaatcacgtaagtataataaaagaaatgaggtgtctaaatttagtattaaagaaaagcgcagcattttcctctgtgtgtgtatttgtgtgtgtcttaataggaagttctttgcgtgaatagatcaaaggaaatgaacgtaaaatgtgatttattatattgtaggttgcttcaggtgaatgcaatgaagacactgaagtttacaacatcaccctgtgtactggggatgaactcactctaatggggcaggcagaaatcctttatgcaaagacattcaaggaaaagtcacgactcaacacaatcttcaaaaagattgggaagctcaattccatcagcaagctgggaaaaggcaaaatgccgtgcctcatttgtatgaatcaccggaccaacgaaagcattagccttccattccagtgcaagggcagatttagcacccgaagtcccctggaacttcagatgcaagagggcgaacacaccatccgcaacattgtggagaaaaccaggcttcctgtgaatgtgactgtgccaagccctccaccgagaaacccatacgacctccacttcatccgtgaggggcaccgctataagtttgtgaacatccagaccaagacggtggtggtttgctgtgtgctgcggaacaacaagatcctccccatgcactttcctttgcacttgactgtccccaagttcagcctcccagaacacctggtgaagggagagagctggcccgaaaccctggtccatcactggctaggtatctgccaagaacagttcgacatcgatgagtattcacgggctgtccgtgatgtgaaaaccgactggaatgaagaatgcaagagccccaagaagggtcggtgctctggccacaaccacgtgcccaattcgctcagctacgcccgcgatgagctcacccagtccttccaccgactctcggtctgtgtgtatggcaacaatctccatggcaacagtgaggtgaac

SEQ ID NO: 19712 - DNA, 2300 bp, Homo sapien
attcatgagaggaatcagatcacctggcttcttggatgcatccctcttggttttcctctcactcccctggccggtccttctcagtctcccaggactcaaaccttagacctcttctctgttcacactcaggcccatggtcatcatcatcaaaatgtcatggcttcaaataacatctgttagccgatgactgccagatttattctttccagccagacttctctcctgacctccacacttcggtgtctaagaactttttgaacatctctgtttgcgtgtccaatagacatctcagacttacctgtccagactgaactcctgatcctcccttcaccctccaaagctgtcctgtctcagtcaatgtcagctctgttcagagttgttcaggccagggtcctcacactttaaccacttcccagcccctgccatgtcatacctgaattattgtaggagccttctacctggtgtcacttgcctctgtgccttgcacctttatggtcttctcaacatgccagctagagggatccttctgtagcattggttagatcaccagctctccgctcaaatccccattccactcaggtgaagagtgcaactccttaaaaggcatatacagtctgaccacctgctactgctctaactttctttcccctcttcccttatcccactccagccatagtggcagcatgccaggcaggcagcccacccacctgagagtctttgggcagactgttgcctagtcttagaattccgagacctctaactgcaactaccaagcacgaccctccctcacctacaccaaaggtcaccatctcagcaatactgattggtctccctgcactctccatcccccacaccctgccctaaatttaatagcatttctcaccttctaccatggtatactcttactcatgtattatagtatccatctcctgctggaatgtaagctttggaagaacagagatttgtgttaattccattaattgatggatctccagcatctagaataatgtctccacctagtagatgctaaaaaattgtgttgagaatatgaatgaaagttttcctatttctgcctgagagattttcccatgatagcttttaattccttttaagtttctggagtattatattatagccaggattcagaaaataactactaagaaacactgtatccctgatatgattgcatatggtcttttattccaaactgaaaacagttcttctcaaatgttgtagcagggtcacagatactgaaaatgtaaacaacaacatgatagatccttgatattttaggaatatgttcaaagttcttcataaatcctgtaaattgtggagaccatgatatggcctactcgcatgaatttcatatatagcagtaaaaggaaagaaaggagccacatggagctctggaggctgagtggccggcaggctcagtggttgagaggaagctcaccagacagctgtctgctgctgctccatgcttctgcctcagcagcatcacacattacagcagctcatgagccctagacattacctgcatattgttctaaccaggaatatgagttatgtgaaagccaggaatccattatatcattttgttctatttgcaaaaaaaaaaaatttaatactaatttttaaaagttagctctcccaggcttctaagactcggttctagaatgtaaatgtgtggttcgtacaacaactgatgggcaaggtaacttcaatgtttaacttactgttaaaaacaaccatttatagcaaagtgagttttcactttgagatcaaacagcaagtaagcattcattcagtttgattttggacatctgggaataaactctcaatgtaaacaaaaagaatgcagtttattttcatttttaagctgattttaaaatctatctatcttctagtttaatggaacctcccataatgcctttttaaaaagattaatgatgaacaggaatctttgacaaaaaaagggctggggtaaagagagaggatgttgttgccatggtaacagcagtccagcataaacatcttagatctcttctgtttatcctgtgttttagggcaattcaagctgctggaacaagaccgagatataaaggagccagtgcaatatttcaacagtgtggaggaggtggctaaggcatttcctgaacgcgtgtacgtcatggaggatatcacattcaacgtgaaggtagtagctcttgaagcaccaaatatttatactcactaaagataatttaactttcaagtctggatgtacacagtaagtgttcatctgtgtctcctaggagggt

SEQ ID NO: 19713 - DNA, 2300 bp, Homo sapien
cctcttcctctattttttttcagaacagtttgagtatgattggtattagtttttctttaaatgcttgttagaattcaacagtgaagccatcaggtccagggcttttatttactagaagacttttattatggctttgatctcgttacttgttattagtctgttcttgttttgatttcttcttaattcactcttggtagattgtatatgtctgggaatatatccatttattctggattttccaatttattggcatataagttgctcatagtagccactaatgatcctttgaatttctgtggtatcagttgtaatatctcctttttttatttcaaattttatttatttgagtcttctccctttttttcttagtctgctaaaggtttgtcagttttgtttatcttttcaaaaagccaacttttcgtttaattggtattttgtattgtgttctatatttcaaattcatttatttctgctctgatttttatttcttatactaattttgggttttgtttgcccatgcttttctagttctttaagatgcatcactgggttatttgaaggtttttttcctttttgatataggcatttatagctattaacttcccttttaacactgcttttgctgtatcccgtaggttttagtatgttgtgtttccattgtcgtttgtttcaatacatttttacattttcttcttaatttcttcattgacccattggtcactcaggagcatgttgtttcatttccatgtgtttatatggtttccaaaatttttcttgttattgatttgtaggtttattcagttgtggtcagaagaaggtgcttgatattatttcagtttttttgcatgttttaagacttgttttgtgacctaacctttttttttatgtaaccacatacttcaggtaaacttcttcaattagattgcccttgtctgaaaaaaataactcatatgtttatatatgcttaatgatattccaactgtctctctttcttcggtctgtatactcatctatctgtctgtctgagaaagtttagaaaatagtcactggatcaagttgacacagtgatttgctgatggatcttggtgaaggagagtccttacatttattgagccaagctgtactgatcccttattttgtcattgtctgtgaaaaccttaaaatgttattccaatttaatgtaatttaaactttgcaaatagcgaccttttatctataattttttgtatactttcagtcattaaaatagatttttcatttaaaaaaagtatatgtgtgtacaatacacttgtgaactctcatggctatagcttgcctcccctcaagccagataaatattccatgtctcagatgacaagtttaggaaatattcctatgtaagtatgactaagtgtcaaagtgattttcttttgttacattttgccccagaaaattatactagtaatttattcataagcaatataattgcttgggagtgtaactaaccacagtaccaatttaattgatgatatctttcagtcaatatctgtaaactcctggggtttgttttggtgggttttttttcctcattatctttagagttttaaaaagaaatgatagctgttttgttttccagttcaattttaagaagttgcaccctacttaacagagacacttttttacttcttttaggcctattatatctttatagacctatctataaaacttaatgatctggttttttagtgtttgcttatttccattattttgatatagtgtcctttcatgttgaacttttttattgtgtgtattttgaagtcatagatgtagaatgtcacctagccactgtcttcagggcaacccacctggcaaaataaaataatcttcatttttcttattaaccctctgttatgtgtacagagaatattaaaattcagtggttttatatattgataatggaaacatcattaggttttcagcattgacatttgtatgagtctttgtttctttcaagttttatgtggttttgtttttaaggctaagcggtatttttggaaatctacttaatgtgagtgactcccccaaactgtcaaatatgtagttgaaatatttttctggcctttctgcccgtggacgccgccgaagaagcatcgttaaagtctctcttcaccctgccgtcatgtctaagtcagagtctcctaaagagcccgaacagctgaggaagctcttcattggagggttgagctttgaaacaactgatgagagcctgaggagccattttgagcaatggggaacgctcacggactgtgtggtaatgagag

SEQ ID NO: 19714 - DNA, 2300 bp, Homo sapien
tctcctgcctcagcctcctgagtagctgggattacaggcacctgcccccacgcccggctaactttctgtatttttagtagagacgggagacggggtttcaccacgttggccaagctggtctcaaactcctgacctcaggtgatccgcccgcctcggcctcccaaagtgctgggattacaggcgtgagccaccgcgcccggccgaaacactctatgtgagcaattcttagaactttatggacttctgattctgcatacactctatagtaaaatacttcccacttttttccaagactttttcaaaaaatcaatgtgaatgacccaaaggtcaaaactttcagatgaattttgtgaaaattatcgctaatgcttcaaagtgagaggatcaggaaggtgggtgtagaagaatctgtgtttttcttcaaatgttaatggagtggtttattagcacagaccttttaagccaggccacgaaaaggcagcgggatgttttcaagtccccttgggctggcgaagcgggtacttgctgtaccttatcaagcactgaacattgaatacgtgttgaaaacagagcagatacgcaaccttagcaaccactcacctctgctattttaacaaaatgttaagcaagcgaaagaaagagaaagaaagacagaaagaaagaaagcagattagcatacaaggcaggacatgccacctttatattctgagctctgtccacagtgagcaggccgtgtcaaacatcgggagagacagagaatgattgatcatgcaaagcaaactgtaggtttgaatcccagcacggccatctacgagttataaaatcttgccaaactacctaatgtcttggtacatatacctagaaaacgagaatgatcccaacctttaagatgagaagagaactgaatgggaaaagcgggtgagaacagctgaccccagcagcctcccagtaacctagttttcccttcccatctccgtgtctacggtgtttggtggcctcatcaactcccgtcgcctccagcagctcgttcactcagtgaaggtcctagaccgaatggccaccttcctgtatgtgggtactcatcacccaccacctttccgcttttcggtgctttgccctttttatcttatctagtagccaaagctgagactgttgggagtcatttccagctccgatggtagaggagtagggttgaggggaaacgccaaggcgtgctccacgcctgccgtccgcagccccgttgggctgtggtactcttctgaccaaagtctgggtcaccgggaagcaagagggagcgccactaaaggtatcttttgtgccttgtatttagccaccgcattgccaggatgggagtggaggcggacggtgcccgacaccacgactcagggagcgatacctgagctcgctcggcaattcccgggctccggggacgggcctgggcggggaaggagccggggcgcgcagcagcacccggcgagactgcagggcgcccgagtggtcggacgggggagcgagagctaaagcttgcggagcgcgccgagccgcgggcgctggcggccccggccggggagctgacgcgagcctgccgggccgcgggagctgcgggaggcggaggccgagctgggggcggagcgggcggcgcctgggaggcggaggcggtgtctcccagagctgcgcaggcgttgctcgcaccttgttgattagtcagtgctgggagcgctgctatggcgtttctcagacccgcggctcctcctcacacgctcgaggcggagggaaggaggggtaagaggaggaggaggcgagcgggcggccgccgcagctgcagacccagggccagaggaggaggcggagcgggagccgccgcagccacccgggccgccgccgccgcccgcagccgcgcggctgctctgagtcttctccgggcgtgagggcacgcggggcgccccagccatgccccgcagcggcagctgagccgggcgccggccccctccctccgggccgccccagtcgccgcgcccccccggctgcccgcggccggagctgcccggcgcctcccgcgcgccccagaccgcgagcgcgagcagcggcggccgccgaggcgcgggtggtgccggtggcggcggcgggggagcgcgggacaggaggcttcggggaagatggacccggcgccctcgctgggctgcagcctcaaggatgtgaagtggagctcggtggccgtgccgctcgacctcctggtcagcacttaccggctgccccagatcgcgcgcctggacaacggtgagtcccagctggggcgcggg

SEQ ID NO: 19715 - DNA, 2300 bp, Homo sapien
gaatttctgaactgccatgatacactggagacccatagtaacttaattattcctccaattccagctaaactctcaagaaatctctgagtaaataaattatcagattagggttttaagcccacacttattttaagatgcaacaaattaattaaaaattaatttgatcaaaatccagaatgtatacaagataagcaaatagaaccgtgcataccatcatatattgtccacgagttaagctagtctgctgcttttaacactctaaaactggatagaaagcaataactgacttaggccaaaatataggtaggcagcaagtataaattgatactcttttatgctataaaacctaatatacatacagaaaaaaaaaacctccacaaataggcttaatttttagttcaggttatagtagccaatagagctagaattgagggtttcttataattggtttgtatgagccatgctgctctgtggccccagactgtgccacaaaaatatctgctgcaaaatgaatgtctgctttttatataaaaaagtgctgcaaattataatatgtgtgttcggatacaaagaaaattagcatatcttttctatctctttttatacaaaaaaacataaacaggaccaaaaaacaatagatacagtgtctaagagctctttttaataatgatttttcaattttctctttggagaagcttctgagttcctcccttgtacttcaatgggcaagagtaggaaagaagcagaacagattattcatcttatgtgacttggagtttgtaggcttcaccataagctcatattggcttttagtcgaaatactgaatataagagcaaatatacttgcactagcatcttttgtcttattttcatgtgatctggacaaaagtgaagaagactggattgcttgctggaattcaggggaaaaatgtcaatttagcccagtgcaatcattcagcatgaattctgtattgaaagagcaacataacctactccactgttcaattccaaataatatttaattgctttctgaacctcttccaacttcaattagtgttaatttagtgtgtaactaaatacattaccctaaaataattaggaatggtacagtgtcctccataacatatgtgatttgtattagcagccttggttcagaaaagtcttaagctgggaaacagacacaaactactcaaaatgatctctcaacctcccccctctcccggctccgccaacccaacccacaagacaaacacagggacttaattagcaacagagtattttagtcatttatggggcacaggctcttattggttatataggatatggtccaaatgccttggcgtgatatactaggcccttcatgatctgacttctacttcatcctacactccaattccagcaatgtgacatggttttctcccacacctctgtatttttgtttttgtagtgctatctccctaaaatgccctcaccatctaactgaaccacttggcctccacctcctcacaccttcatccctgctggactgtggtttagcagtggctttgctcctttgaccaacgccacagctcccatggctacagctttcgcttgacactggaaacaaacctccgcatccttttcagcctgggggtgttaacttattccccttcctgttcatccttgggaccttcaccatccctgtgagctcctttaaccctgacctgtctcgttaaatagtccttccagtaaacccttgtcatgtagcctttgagtgtgctatttctctcttgctgggacgatgactaatacagttaggttctttatgacaccacctctttgggtagaatggaagttttgtgctctcactgaacccactgcagacttatatcatgcaaccaggcatatttgattgcaccatttattaagaagtttatgttcggccggatgcagtggctcacacctgaaatctcagcactttgggaggccgaggtgggcagatcacttgaggccagcagtttgaaatcagcctggccaaaatggcgagaccctatctctattaaaaatgcaaagactggagagacagcgggacggaggaatgggaaatgacgtaaggattgcagaggggcgtgaggtttcaagatggcggggctgaagggttgaccgccaggctgaattgaaggcccttacaaagtgaaagagggcaggaatcgcacctcttggctgctcgcagtcctgggagcacagcagaagtgtttttcttttcttttctttttctttttttttaaatgaacaagtaaaccatacaaattgtcaacatg

SEQ ID NO: 19716 - DNA, 2300 bp, Homo sapien
cctttgggcttagttccaaatacttcatgagaagttcataaaagatcaacatcaaaatcataatataaaaattgcactttacatgtatgagagttttgtgacactccacatacttgatagctttaattgctagtgacacagaactccaaaaatgttctatcttagagtcacatgatcttcctgttcaacacccaaataagggaaatttaaacaaaaatcaaaacaataatagggccaggagaattgtataatctgttgtctttctctcctctgccctaaacaacaacaacagcaaaattcttttctatgatttaatcatgtattggggcatttccactataaacataaatatgagaatgcagcatctcaacaggatctgaataaagaagtcttactctcagataatctagaaccttgacaaaaaaagtgggggggctttgtgagggttaaatgcttcagtttgatccttcttaattcatttaagtgtgactatcccatgtgcacgttaatgttatcattgtaaatggggaatccctatttctgaacctcagaatttttaattttcctccctttcctaagcaggtgtctttccatctctcacaaatcaaagaggatgatggggggtctgaatagatgtcttgcaatggtgccctgatacgtattttaataagtttactaatcagagcacatataaattagaatgaatcatagtcatatagttaatagcaaacaaagctcaatttagttcatgtccagctttcttcgtgttcattttactcaagggcataccttcctttttctgcttcttttttttctttctttcttggacacctccaacccccattgacaaccgaaatgcagggctataaacataagggtgcaatacatcatgagataagtctggagaacatgtcctctaccaaaatgcacatgaatctctggtacagctaaaattccagaaacatgctggggttccttttgcatgctaagcagggtcaaaaatgtgagcactatgtggttgcccttatatatcagatgagctctaaagttgaaaggttacatttgtgaaattgcggctgggtttcctagcacttgattctagctcctgcaaatcaaagactcctaattgaaatacaaatccaacaatatgataatctttcagtaaaaaaaaaaaaaaaaaaaaaacgtgacttctgcacccttatctgttgaagagctgacagagaagttcagaggcagttgtttaaccagacaaaatgatagagaaaatatgttttcaaataagatcataaaccttgaacagtgccttgtgggaagcaaatgtaaagcaaagggctgtcctctattctgtctaccagctctactcccccaccccggtgtgtatcctcagccactcaccttttaggcaagggctagtgtctttcaggacagacccaaaccccaaataccaaaacagaataaagtagtgtcttagcatactttgagatcagactgtttctgcatttcacagtgctgggggtgggggggaggtgtggggggaagggaaaagcagcataccaatgtagtgaaatctggaaacaacagcatatatacagacacaaaaaaagtttgcatattgcacagagcacttgaagatcataaatctatgcatgagaaagatgtagtggaaattttgggggggattagagtttatttttgtcatctctgtgagacagctactcattcatccagatcacagctaagaaaaaagctggtcacagaaattagcagtttcagctcagcagcgaagtcgccagcctgtgaaggcagagagaaattgactaattagcaatgcgcactaaaacttgacggttctttatagagagagagaagagagagggagagagagggagagggagggagggggggctcgctttttccccttctttcttccaaagatgtttgaaatcgcagtcatttacgctcgacaatttttacaatagccttgagccataattttgcgagtctctccagcatccatccccctgtatggtctctctctactggccaagcacgaccgtttctctccccaaccgtggatttcctattactctcgttacgactcactgagccccaggcccaaggataatgatgtgttgtttcttggtagcataatttgtcacacgtacattttttcttcttcttctcttgcagaaagctctgctccctctctctctccctctctctttctctcttttctccctctcctacattttcttgctgttgctaattcatggtgatcaaatgatgtacgacaaaat

SEQ ID NO: 19717 - DNA, 2300 bp, Homo sapien
ataacagagcataacatttatacaccaaggcttcacatttaccaataatgtttggtggatgtaaatgacaatacctttatacctttcacataaatttcccccttttgaactcatgtgagactaggttaggcattattattttcatattatagatgtgcaacttcaaattccttgagattaagcgacttgcataaaaaataaatggctaaagaatatatcctaaatgttcgccttgtccactttccattacactattgaattacagagccattcaatagtagccttacataggaaaaaagccttggagcaaaatacaggggacctatgctctggatatggcttccactaattgcccgtgtgattgtgtcttccaagtcttgcaccttctatttggccagtagctatgtctgtgatggtaacactcttaatttagcttatgtataaacagggatgcagaaactaaatccacctgatttgctatggagattggttgtctaaagtagaaaccacatatccattgagaagaagtccagtaaattagttgatgcctggaaataattgcttttctagatgggcttataatggatttatgaagtataaatagaacataaaacaaagttacttagataaaacctgggaaggctttgaatctttgcagacatagaacaaacgtcagctcagactaggttctcttcaaagagtagaactaatagttgtagaaatttataatggtgtaaatacacaattgctaaaataaaaatttacattactattaatattaacctatttaagggtattcttttttacttaattccttatacaatcatttgttatgccttagactatattttatgaaatcagtttaaactatagaaaaacaatatattacttgctttttaaaaagtgtttgcatgacaatgacaatgcataatagatgcttaatgaatgcttgtgaatgaactgaataaattaatgaaatgtgttccaatgagagactaacattttgatttctttcatcatttgtttgcattggagtggaagtaggaatatttcaaacttccagattgatctctttgtctttcttctctctggctctcactctcttaactctttctttctgatttaaattgacccaagcaaaagtatgttactttaattatgcctcttaaattatatttacattgatatgggatcagggatattgcctgtttgttcacttgctcaccactatggcctcaacccctaagagatagcttggcacctaataggtgcttaacaattatgtattaatgaataaatagatcacatagataatttttaaaatttatttccattttttcactggcctcttgactcttctacaacaaattatatgaaatagagtgaaaaatgttcttcaataatataggtcttcaagattattgagaccaagttattttcagaaaaaataggatagcaccaaataaaaaatgtaaaattaaattttactgaacttgaaatttgtaaattgagttaaacagtgtggcttgtttccaaaatgaggtcaaacttcttttaacagtcaaatcatatgaccccaagtcttcatcctgtgggccacacatatattattcttctgtccctagggtccctgttgctctattgctaagtccaatattgacccttgttcccaaaagctttgtacttaggccaaataatcaactctagttattctaaccctgcagagaggaaattagaagtctgattcattccctggagagctctccagtgcttctgctacctcatagtgtcattatggaaaataagcattcctgaagtcagaggtagacatcttctaactccatacttatcaaggcagtcaccaatacttggtctgatgatctgctattcttgtagtagtttttcaaggtacgtggggagaaagggaacatgtcatttcaccatattaagccccattacatttgttccacactacagtaggtcagttctctgccaacattcagttctctggcttctcagctctttttgtttaagctctacacagtcatttcccctctgcctgctcaaggtcccacggaggctgggtcagcctctgccttgaacttgctctgcaaaataacaacccaggatcagattttccccttcctcatggtgagttttctgatcttatttgctagatttataaaacagtcatttgtacagactggtataaaaattctaaagggatctttcaagtttgctgtaatagacaacaaaaatcagttacattggatcacaggctctgtaaacaagaatctgtg

SEQ ID NO: 19718 - DNA, 2300 bp, Homo sapien
ttttttgagaacgaggctttgaatgcattctagcctgattctactctctctggtggctgccagaaggctgcttttgacaataaattattctttgaggcttctgtggagctgaagtgataggactagaaggtgaaacaccacaaagtgcactcttcttactaagtttagactgtttttattaaatcagtgctccctagattgttgcaagcctttggctaatttcgaatgttgacaaggctgatttgacatttttttatcagttttttttattacatttatataagagggagttttcagagactcctgcttcactattttcattgatgtctctgcaaggacataatctgggaatgttggctttttattttacatttttttcatggtcgtcttatttaatttacattttgtttatggtggtattttttgacacatacttttataaaatgtgctgtcaaacccatcaacagatctcttggtttactcggcaaggtgacactctcctttagcccaagattatgcaagtgaaatcttattgattactctaatttgaacatgttctgtgtttgcatttagatttttattcgtctgaaacattacttttgttattatatgagttagatgtgaggtatagagaccactttgaatttttttaaacagagatttcacattatttcagtaccattaattaaacaacttctctctcactgaattcagatatcattttctgaaaatattgattcagatttatttctggcctttaatttttccctctgatctttactatgattaggaaaataaatgttgccttaatatagaagtattataggatgttttagtatctggtagcaaatttccaatattttatttttcagataccttttgggtagtctcagataccttttttccatgtgaacttcatttaatgcagttcaaaaaagactactccattttgctatatttttacagtaatgttgggagaacacacattatagtctattaaaccattttgtaacaaatcatccttttcatgtgaaacttgatttaggatttttaataagagtttttgtttactttatataggtcctcttctttttgtcaaattttttcccaaataatttatatttttgagaaaactttacaattatttcttctgtattttaaagaccgattattattcttatagataaaagctattcatttcctaatccttatatccagccattttaccaaaattgtttattgttgttttaaatagaattcttctatttttctaggtatttaattatgttatctaaagttgaagatatattacctattcattttcagtattataatagtaatatttgattttattatgtaattgtttacctagtctttcctaaagcatgattaataatgtaataaaagataatatgatcttattcttgagtctaatgaggatacattcagtattttataattcactttggtatttgctattgtttctttatattatatttgaatcatttttttcttgtactagtttttttaagatacgaaaactagacagtgagtgaatttattaaatgactgttttgcaaagtgttagcatgcttattttctcctttaacttgttgatgtgatgaattatgattccgaattttctattgtttttcaatttttatgtaactgaaacaaattctactttatcatgattaatttattttttaccttatggaaggatgaaaagctatacaattcactttgttctgtatatcttctttcttagctggaagatttgagaagagtttatgaccaactaacctggaagcaaaaaagtcatgaaaatcagtatctggaagcagttaatgatttttatgctgcagtaagttgattttttcctacttcccacttagaacgccattttctatttccaaatattaactcatatatctaaaagtgatttcattattataggttttgccttttgataattagacatgtatgaatgattcttttattcttttcttaaagaaaaaaacatgggatattgagctttctgatgttgcaaaagatttttcagctatttctttggcatgtacaaaactgacggaagacaataaaaaacttgagattgatattaacaaaataacagtaaaaaccaatgaaaggtaaatttgcaaatacttttcttcttatataccataatccaatatgttaaatacaataaacctctccagtttgtgtccctggagttatatggtggtgtttttgtttatcagtagcttaaaatttaagttctattcaaaatgttgccttta

SEQ ID NO: 19719 - DNA, 2300 bp, Homo sapien
tcctcccacctcagcctcctgagtagctgggaccacaggtgcgtgccaccatacctggctaatttttttgtatttttggtagggacggggattcaccatgttggccaggctggtcttgaactcctggcctcaagttatttgcctgccttggcctcccaaagtgctgggattacaggcatgagccaccgtgcccaaccaggacatattttcattttgagttcagtgttctcttccaagcacatccagattatttgtagaattcagtttcttgcagttgtaggactgaggtccccattgccttgctcgccgtcacctgggatcattgtcggctgctagaggctgcctgccttccttaccatagggtcttgtcaatcttcaaaggtgacaatagagaatatccctttgataaatccctctgatgcttcaaacctccgactccaggaagaggtcagtcccttttaagggtttacctaataaaggccaacccatcctggataatctccctttttcaagtcaattgtgtcaggtaacaaactaatcaggaaaatgaaatccaccaaatttaaagtcctaaggattatgcaggtgtgtataccaaggggtagggtcatgggcgtccattttagaattctgcctgccacaacaggggtttagcaattatcagtgagttctaattaagagaaacttgtcaataatgagatttctagtaggtaaagttttattttatgagaaaaaaatctagctattgttttaatatgcacatttacatattgtgaaccctcatgaatacatatttactggcatgcaaatgattcatttggtttataatttaacattgtattgagaacaagccaaagtttaataattaatggagggagatgggaaagtggagtgcattcttgaatccattttttaattacaaaaagagctctgcttctgcatatattaatttaagattaagaccttccaccagtttgttagttattgcttcctttttttcatctttggctgaaaggaccacattccaggtacggacttgctggttttcccctcttagaaaggattactaattaaattgcctcttaaagtaatagactttgctgatttaaccttggcaggcaattgcctgttctcagtgttgcctggaaaaatgatttctctggatgagaatgctaatctttattctgattctgttttttttttttaaccatcttcagtttatagtccagtgtttgttttcattgaagaagacggtgacaatagtgtaagacacgactgtcctctgaagcctatttcagttcacagtgtatattcacagatgaagaaacaaaatgtaggtaatacattttgtgccactgatttatgtatttattgatctgtcgcccaggctggagtgcagtggcacgatcccagttcactgcagcctctaaccactgggctcaagcaatcctcctgcctcggcctcccaaagtcctgggacaggacacgcctggcacagggttgtgccaccacacccggcctgccacttagtattttgtcagaaggatcaatgcttcaaaaatttgtttttgaaagaaacagacccttagagaaatggcttgaattagtcttgaattagtcattttccccactttcagacactaggaaaagttctttcttccttaacagtttgttgaggtttctcaatactgaagtcacaaccaaaccacatggggttatcgcatggagtcctggttgtatcatcccaagtggcaagaaagaaagaggtcctgcggtcctcccgaaggtggacgaagtctgtgatcccctcacgttctaacctcactgctgtacgaaggggcgttgactcgtctccactccttccctctccggtaaagagggaaaggagttgggttggcaaatcggttacaagagaaagggaaaggcactgggagaaggcggagcgggggcggcctggagcgctgatcgggcgccgaaacgccgggagtcgggggctaagggctcgagccaggaggccccggagcagcagccgcccgctcctcacgccgccgccgccgcccccgcggttgcctggacacgggataaccgacttggggcctcgaccgcagcagagccggaggggtgggcaggcgcgggtccgggagacgcgcggggaaacgcgcggagccggtgagtcgggggcgcttgtgcctcggcgcgggcgcttgtgcctcggcgcggggcgctgccgggcggcgcccactccccctggccgcccgcctgcgcgactcccgcgggagaaccaaatgcaattccctggc

SEQ ID NO: 19720 - DNA, 2300 bp, Homo sapien
aaaataacaaattatatgttatgtctgattgcttaaaataggtatttctgagtagaagaaaaaacactagaatgaaaatactttgaaaatatatcaattactttagccataaagagaattctggaaaataaaagcagatgtgaacgtgattcaaatttaatatatttgaaatgtaaagtaaaaatataatacacctggatagaattatgcaaattgcatggataaaattttcccctagggataacttcagcgtgttctctaaatccattttaaaaaaagaaaaagtgcagataatcttttgatattttctaaaactgatgcatagtcttttctcagtctaatgaattaataaaacaaatattctaaaagaattatcatatgcagctctttatgattatgaactgtctctgtttaatttttggtaatcaaacatttttattactccaatcatttgacagtgctctcaaaggaatcaccttactataattgttctcattctgagacataaatctcttcattagatgtaagtgttcattttttagacaagactatttttaaacaggcagtatagaattgaataaacaacatgagattagggtcaaaagacttgaattattaaaaatgatttagcaagatatcttggatacattgtcatgtttttgagtttcatttcctcatttgtacagtagaggggaaatatatgtttaactgagctgttttggggatcaaacgatataatgtgtatgaaaaaacacaaagtactatttatataccattaatatcctattcaggaaataacttcagaaaaataatccagtagaagtgacctttttgttttcagatactcaagacaaatacacataattactgtgtgggtcacagcgtcatttttttctttgcttaaataactctactgacccaaacaattcactagagatgtatgaagttggaaagattaccataaacttttaagtcttaacatattttttggtagttcgctaataaggataacaatccaacacttcatgtatcccagacctgaaaattataatttaaaaaatacacaagcgttagcttttcagttttttccatgtgcatcatgttttactctacagaatgttgactacacgctgtttaaatataattagccctacggtatggcatcgcgtggatccacggtgacggctctttggtcctgcattgtttgagatgctgtaggtggttcaacattgtgttaagttgcacgtacattattagttctgtatccgaagacactggctctgtaccctttcaacaaggctctgggagttcccccagccaagcagagacagggttaaggcagtccaacagaggagagtagtgcggtgtgtgtgtgagtgagtgtgcacgcgtgagcgcacaggacagaggcgtcgaggtgcggggcggactcctacacaagttccaaaggccaccgtgtccgcggctttcggcctgagcgggacagcgggaagcgggtggaacggcctgcacggagtgggcagcgccccaggaatttgggggctgagttggagggagaggggtctcgcgagggtttcagggcgtggctggagtagggggcgcgcggcgagtgtgcacgggtgtgcgcgcgcgagagggcgagtgtgagcgcggcgagtgtgagcgcggtgagtgtgcggccgcgtcgccattccccgtgacgtcagagtgtattgttgtgagcggggccgagcggagcatccccggagctgtcaccgcagcggccgcggcggtggcgcagcgcgagccccgcacgagcgagcccggccggcgccgcccccgcccctggcccgggccccgctgctgccgccgcccccgcccccggcccgcccgccgcgcgccgccgccgccgccgtcgcgcgcccccacccactccaccccaccccctcgctccatccctcccacccgccgccgccgccgccgccgccgccgccgccgccgccgccaccgcccgcgcgcctccccccgcggagcgagtgcgggtcaccgggtcactgggtcattgtctccgcgcccgaaccccgagcaccccgtggaatcccccacgtcatcatcagaaccatcaatgagatgcaaacatgaaagacaagaggaagaagaaggaccgcacctgggccgaggctgcccgcctggtacgtaccgccccccacacgccgcccgcgcctcccgccggccccgccgctcgccccgcgccggtccgcggcggcggagacggccacttccagcccgagccgccgcccgctcgccgggctcctgctctt

SEQ ID NO: 19721 - DNA, 2300 bp, Homo sapien
tctacttaacacttactgcttacttctcacatattccccacaacttaagtttcctcttccagatgcagttcattaaagaatcactatcacctgcccattcatccacagagtgagagatttagcgattaacgcaatcacagataagtggagaaataacatacaacactacaaaattaagagattaagtaaagggacctgggcactccagctaccaataactagattgcaattaaaaaggactttgtcacttcttcgctgggcaatagggccaattatctaaaaccctttgctagaatccagatacataccagagcaaggcccttcaaccaaactcagataattacttttgacaaatgttctccttgagcataatgtagttactcaaatgcttttcaaaatgactacagttacagtaaaacaatctttacaaagtcaacccaataacacgtcctgctcccccctcccaaaacccccgctgcatgcagtctgctttcttttggccaatttataacagatagtaagctggcgaataaatgtttaatttatgcagccaaaaccctgaaaggcttagcttcaaatgtaatgcctggcattcccgagacacactgtacagaaatatccttttgaaaaatccttttacagctgtcctttaaaagaagataggaagaaaaaagaaagaaagaaaagaaaaacccacacatatacatgcatcaaaccaaagacgccgacgcccctctgccaaccggcatttctatagagacattctttcgatgattaaaacgtaagctccgaaaggttaaagaaaaggaaaagcagccaagtaacaccgcccaggaagccagcagtaaaatacacctagctgtacactcttaataacctcccactacaaatgacactgacccaacttcaccaaacacacacacacccgaaacacactcacaaattgcacacacgtgcacagaatgtacacacaaacatcgagcagagcacaatacctacaaacacaaacgaactggagccacacaaaacatgcacgtatcagtgtgcacacataatgcacacgacatggcacacagacacgcaaccacctagcccacatgcacacgccccacaagtccgtgtcggacacacaccatgcatgcacgtgtaaaatgtttgaactcacaaacgccgaacatacacacagactgtgcacagagttattgatgaaattccggggggtggaggggccgggagggagtggtaattgccacacaaaggtctccggagcggcagagagggaagtcgagctgcgccgagcgctcggaaattcacccgtggagaaggcacagcagagccccgagagcgaagtacggggagaagtgtcccgggcggtcccggacgcggggctcccggagataatcgctgcgcccctccgcgcgcgcacgcacacacacaggggcccccgggcgagcccactcccgcagaataacaaagagcaggagcccggcgagcgggcggcggctcgggctggaagtggccgtctccgccgccgcggaccggcgcggggcgagcggcggggccggcgggaggcgcgggcggcgtgtggggggcggtacgtaccaggcgggcagcctcggcccaggtgcggtccttcttcttcctcttgtctttcatgtttgcatctcattgatggttctgatgatgacgtgggggattccacggggtgctcggggttcgggcgcggagacaatgacccagtgacccggtgacccgcactcgctccgcggggggaggcgcgcgggcggtggcggcggcggcggcggcggcggcggcggcggcggcggcgggtgggagggatggagcgagggggtggggtggagtgggtgggggcgcgcgacggcggcggcggcggcgcgcggcgggcgggccgggggcgggggcggcggcagcagcggggcccgggccaggggcgggggcggcgccggccgggctcgctcgtgcggggctcgcgctgcgccaccgccgcggccgctgcggtgacagctccggggatgctccgctcggccccgctcacaacaatacactctgacgtcacggggaatggcgacgcggccgcacactcaccgcgctcacactcgccgcgctcacactcgccctctcgcgcgcgcacacccgtgcacactcgccgcgcgccccctactccagccacgccctgaaaccctcgcgagacccctctccctccaactcagcccccaaattcctggggcgctgcccactccgtgcaggccgttccacccgcttcccgctgtcccgctcag

SEQ ID NO: 19722 - DNA, 2300 bp, Homo sapien
gcagcagctgtgaactgggcatgaaacaagtttcctatgaccagaatgaaatgaaagaacagttaaaagcattcgcgctaaaaagtgcagatttctcttcctatttgctttctgagccacaaaagccttttacccaattagctgctcagaaaatgcaggtgcagcaacaacagcagctctgtggaaattatccaacaatacactttggtagcacgagtttcaaaagggcagcatctgcaattgaaaagtccattgggattttgggaagtggctccaatcctgccacaggcttgtctggtcagaacgctcagatgcccgttcagaactttgccgacagcagcaatgcagatgaattggaactgaaatgctcttgccggctgaaagccatgattgtgtgcaaaggctgtggggccttctgccatgacgactgcataggtccttcaaaactttgtgtagcatgcctggttgtacgataagagctgagtgaaagatgcagtatcccttttccacacggaaaagccaaatagcatcagcaacaacaaatagaataatgcagtggtttctatcatgctaatttattttgctttggagcaggtacctttcctctatggcattattttcttgcatttctcataaaggggaggatgcatcccaactgaatggctcactggcatgtcttttatgtgttcagttgccattcctagctttggaaagtttctatctgtccatgtgtatacaagtcaatgccccatttttgtttttcttttaaccgaggtgtagataggaaaaggacatttttaattacttaataaccggaaatgcagatgtgtaaggagaatgagaggaatgagttaaagtggttatgcatttttctatagatgagccattacagcaaggaattttacagttgacttctctgaacctagctttaccacagtgattaaatcctatttagaaaggggaatctgatttaaatgtgtgattccttgtatttgctcctatcacaaaagatatattaaaggaggtatgccattaatgaaatccactgtcctgagtattatctttcctcctgttgtactttctcagagactatggcagaatatctggatcttccttggattttgtacacatattgtagtgaaatgtgtcctacatctgaaattgcatgggactcatgcccagcaatctggttctaggcctttgacacctgataatatgagagcaattggccagccaatagccataagcccagaggattttagagcttcatgtgtggcttttaagagcaggtttgaaaaaaaaaaaaaaaagaccctaaacttcaaagcaaggaaataagatgctgtatatgcacacataaatgcattgataatgtaaatatcctattcacgctaatgaattactagatattaaaagtggggggtggaaatcattgtagccctttattgatgacacccattcattctggcttcagaccttgcagaggttggccatatctttttaaaagtgtcattgatgataaaagggactacccaaggctaaagcgtcaacatttttcagaacaattgcttttctcattatttacaacctatataattcaactttgaaataacccttattttgaaaaaaactgttctaggtatggcatgttttgttttttccctcaggtatattcaatacattcttcatatttgggggaactgcttttgaaaaagggatactgcatcttaacagttatcttcagtgtgcatccagtaaagtctgcgtgttgagtatttgagctacattccatatattttggccaccctcataccagaggacagccgtagttcaggaggctctgttttcaaaagcaagttcaaaagcacatgcacattgagggaagatgaaagaaaacaaaaaccaaccatgcccatttaacttcagattacagagcacaaaatgtggagtgccattaacccattgattgattgtggctgtagaatttaaaaagcaaacatggggggggtggggaatcatctgtatccagggtaagaatgaccaatattttcacatgggatcatcctaatcactgtaaactttttgacattcccgtaaaacacgtcttaaaagttgactggaatgagcagaaattacattcctgaaaacaagaacacttgtgatttttttataataaccaactatataatatgtttttttctccgtatttattgtgatgttgccaaatttctttctttaggtgatagagacatcatttcgaataacaaattgctgatagtgagaggtactttactttatct

SEQ ID NO: 19723 - DNA, 2300 bp, Homo sapien
aggaactcatatttggctactcagagcagtggagggggtgtccatgacgtggcagggggaaaatagacaactgaaacctcccgtgtgaactgcaaactgtgaccaagcaaggggaaaatgatctttctgtatatattttaatttcgtgcaaaggttttcaagcatctgtatcctaaacttacttctatgtcttgttcagcagaaaccagaggagtcctgtctgggggtcccatcattattcgggatacccgccgccagcggcctgccttcggttacccacatccccctggaacggatatctgtttggggcactacaatctatcctgtagaactatggccaaatctccatcaatgctttgctaatttctgggacttaactcgtagaatctacatacagggctggaatttattcaaaatgcatctgaagaaatgacattttaaaccgttttaaaaaatatcttgataaaaaattctgtaaaacagaatttgataggtttaaaaacatgacaggtaagaactttctctttctagtcccttaacacccgtcgtggggaaggtcaaagcaggacccaggaggaaggagagatccgggacccgtgtgcccttcggggctcaaaggcgctgggcgggcggctgctttcgggagaggcgcagccctcactcctggaccacggggccagtggctggggaagcttctggggcgcgcgcggggaggcggcgctgcgctccacctgcccagccccggacgcagcccgggggcgaggcgtctagggaccaccccaattcaatattgggatttttaataaaccaaggaatgggattttaattattgaaaacccagctcctctgggccagaatggtgttgggatggtcctggtcacaaaatattaaagagaccgaccgctaagggaacaggaaaaacgtccgagacagccgttgcaattacgaatggaccagacttggtagcacggggcattgattgctggtgcccaaccggaccctcctcccctcttcccatcccttcccccacccaaagcaggctcccgctgcggccgggacctcgcatccctgcaacgtggccggggctgcatttttcatgagcctagggtgaacaggtgcgaagtgcgctgggagcatccggccagcggccgagcgcggggaacatggagagcgagcgcgacatgtaccgccagttccaggactggtgcctcaggacttacggggactcaggcaagaccaagacggtgacccgtaaaaaatacgaacggatcgtccagctcctcaatggctccgagtcgagctccacggacaacgccaaatttaaattctgggtcaaatcgaagggcttccagctgggccagccggacgaggtccgcgggggaggcggcggcgccaagcaagtgctctacgtgcctgtcaagaccacggtgagtgactcgccttcctctgttatttgtctgccggagcagcccggcggggagggaggaaggagagaggcgggagagagggggagccgtgagccgccgttggctcgtgtgccccctaccttcctcaaccccctccccaagtcgtccccactcgcattagccaggcgcgttttccccactgtacagtctttgtggtcctttattttaaagcggcagcgcacctccagagctggcctccctccccgcctcgggttcccggaccggctgcaggagcttccttccccgggtcgggcggcggcgtctggcgtcctcgggctgggccattgtcccatgtccttctctgggcgcctggcgcgtgtcccaccgccgccaccgcgcctaaaggccaggctggaagcccggccgcacgctctgagagcagacgagtctgatcgatagtctacagtgtctccttattggcataaagcccgaatgtagcgctagcggtggatgtggggttttccccaggacactgtcaggttttatcgttagatcgctgcccgggaggcacggggcagcccgaatgcctcgatcactcccagagatcgttgccgcgactgttgagattgtagataaggtcctggagattcctcctccccgcccccccattcccttcctcacttccctcttccacaaataaagccgcagctagaagatgaacaacaaagaaagatgggtttaggcgctatcgaatggtgtgtgtatttgttcctttttctggggtggctctagtctcatggccacaaagctctagcccaggcgccgcgaggcactggcattgagagcccaatgcatctcagcctcacgctgcagaagccagtggggctggggagc

SEQ ID NO: 19724 - DNA, 2300 bp, Homo sapien
ttcacctcaataaattgaaagtgatatttttcccctgagtcccttgtattagattcacttgtgacttcattggacagtgtcttctctgagctctatggtctaatacgtattgaacaaaaattcaaggactcaacaactgatttattttagcatttctttttaatacaaaagaaggaaataaaagaataaaagcagtcggggtggcctctggagaaggggagctgttgttgcaggaatcttgcaagttaatgagaattcacccgggactcaagagggatggagagagggggagaaaggagatgggggaatggggtggggggataaaaactcttcctttgcagctggccctttccctcatttgttgctccaataagcagtaattaggtcctgagctaatggtgtcagctgatctgctgtttttaggctagacccagaggaatctccatggaaaccctgctggagtcgtccccccacctggatgctgcgtgctcctttctgccacctggctgccgccgggcccgctgctacctccttctgcctctaacctgcagcctgcagcatgcgcactgcccccgggatccctaaatgggacaattctgcccgtgacgtcagcgcccagccgtctccacagaaacttttgtcccattggccaatcagagagcttggaaggggccggggagggtgggggaaggagaggggagtgggaggggtgggggtgaggggagaggcgagaggtttagcgtgtggagctgcctgcgctccgcccgggctgtcagtcccggctccagccgccgcgagaccttcccggagacgcgcgcacacacagcgcaccccctgcacaccgcacaccctcgctcccttgctcacacacacgcacacactcagcctggccgagcaggagccactgaccattttgcaagtgtcaggaccagctacagcgcggtgggcgcaaacatcccgctttccctttccgggatttagtctgggagacgacgacgagggaagaaggtgggctcggacgcagcccaggcgccgggcactggtcgggccgttttcctggcagagccgctccccgggacgggcgcgggcctcgggtgagagtagaataaagaggagcggccgcagccgccgcgcgaggaggatgggaactcccctatttccagctctggaaacaaatggatggaagtcctgaatggagcaactgctgacttcatctgcttggaaaaatagtccagaggaactcatatttggctactcagagcagtggagggggtgtccatgacgtggcagggggaaaatagacaactgaaacctcccgtgtgaactgcaaactgtgaccaagcaaggggaaaatgatctttctgtatatattttaatttcgtgcaaaggttttcaagcatctgtatcctaaacttacttctatgtcttgttcagcagaaaccagaggagtcctgtctgggggtcccatcattattcgggatacccgccgccagcggcctgccttcggttacccacatccccctggaacggatatctgtttggggcactacaatctatcctgtagaactatggccaaatctccatcaatgctttgctaatttctgggacttaactcgtagaatctacatacagggctggaatttattcaaaatgcatctgaagaaatgacattttaaaccgttttaaaaaatatcttgataaaaaattctgtaaaacagaatttgataggtttaaaaacatgacaggtaagaactttctctttctagtcccttaacacccgtcgtggggaaggtcaaagcaggacccaggaggaaggagagatccgggacccgtgtgcccttcggggctcaaaggcgctgggcgggcggctgctttcgggagaggcgcagccctcactcctggaccacggggccagtggctggggaagcttctggggcgcgcgcggggaggcggcgctgcgctccacctgcccagccccggacgcagcccgggggcgaggcgtctagggaccaccccaattcaatattgggatttttaataaaccaaggaatgggattttaattattgaaaacccagctcctctgggccagaatggtgttgggatggtcctggtcacaaaatattaaagagaccgaccgctaagggaacaggaaaaacgtccgagacagccgttgcaattacgaatggaccagacttggtagcacggggcattgattgctggtgcccaaccggaccctcctcccctcttcccatcccttcccccacccaaagcaggctcccgctgcggccgggacctcgca

SEQ ID NO: 19725 - DNA, 2300 bp, Homo sapien
agtacttctccattcaacatgtattacaaaaaattagggacaattatcactctttaaaaatgaagtccataaaggggactacttctgattattattagactccataaaaatgtatgaaaagatctggaaaaatctgaaagtgctttaaaatatattattaatattattttgctttaaatattgcaaacttatctcttcattgcctactttattataccagtgcctttgctttcccatctatctcccttaatttcagtgttaatttcttcttaaaaatttatataccatggctatttgatcccattgtcatttttattattacactatactaataggtctacatatttcttttagcggatcctatactttttaaaaacttgagatctttcagcacatcctctgcagaaccaacacctggtgtcattgccaccaaattcctgtaagtttgtttaggaaaaaaaaattcaataagaaagtctacaatttcctgaatttgttttccatgcaccaaaatttggaaaattttagctttcacacgaaagttgatcctctttttcttctccttttgtttccttctcttctttcttatcttgtaacttaattccccctccttttcccccctcttgactgctttctcttctgccttttctctgaccattctctctttcatactatttgttttctttttgggttattagaaggctagttagctgctggagttccttatctacactgaacagaagctacccaagagtgttccttctgggaaattttacgacataaaacaatccccatttactgtttatgtgagtatggtgccagtgtaagagaagggcaaggttagacataattaccttggccatttagaaggtaggagggttaatgacagattgaaatatagggcacataggcaaatgagatgatttgaacatggaacagaaattaagtaaaaagaaaataagtgtattttgtactttctttgtgataactcacaccaccaaaataataaaggtttttatctgcagtcattcagtatatgtatcttgtttcaacaactagatgtaaactaaagacagatacttatattaaacttctttctatccttcaaaatgtagcgtagctcttcacatacaccaggtgaaaggggtttgaatgacatatacaaattatgaaattggtgactacttcagaaacattggctaaaattgcttgaaattactatctaaggatttaaacaatgcaattggatataaatgtatgcatatacatgccacattcctccaaaaagaaagaaaattatatgaaaacgtgaaattggaaatataatacaagagaaaattatatgaaaacatacatatagtaagataaaataattttcaatcttggtaacttaaaaataatcaacaatgttttcattattttcagtaaactaagtatctgggaattgatcatagtgaaaaagcaacctgtgagtagctatgcaattaatatttatagtgagatactgacttattatgtgtacttggataggtcatgttatcttacttatgcttctgtgtctctgaagtgacaatactatttgccttttcatccacctcctctgcaaagatgctctgcaaataaatgaggtaatgtttggggaatgtttgcagcttgggaaagaaacccactgcatacatctaagaatattccatattcaagccttgtatattttgcctctgttttaaattgaaattgtactgtttaagttcttgggttctgaccaaaatctgggtcaacataagagaataattatttttaattttaaacctgattctctgttccaatctcctgcacgtgtgagggaaaactgtaggaaataaacaaagcacataaatcaagctttggaagagaaaaatctctatctgaaggatttttttttttttcaatgacgagcgtgcccactatttccctagaggaatatttcggtccaggaaggaagatagtgcattcagcatgagtgtgtgtgtgagtgtgtgtgtgtgtgctgtgcgtgcgcgcccgcggagagaggggcgggggaggcggatgaggaggatgagatcatagtttcaggatcctcaggaaaccctggtactggcagcagccagcctctgctgtgcccacatgacccacaactctggcagcggacccggcacttccaacattattaaataataagaaagcggctcctactccaggctcaaacctccctgcagaccaatggacaccttctaagagtttggcgagtcagtgactgaagcgcccgtccattccaaggt

SEQ ID NO: 19726 - DNA, 2300 bp, Homo sapien
ttggtacataatatacattctatataatattttggttaattgcctgaaaagaagcgtatttttcccaagacaaatacaaaacatatttatctaagatgtaggccaacaaataaccattttccataggttaagatatacacttgcacatgagcagttcttcagtttcaacaaccattttttgagtatcagttatgtgctagtgctcactctgagatacaacagaggtgaacagagcagctgaatgtgaaccattgatggccgcacgtctgtccacccttcttagttcatttgtgttttggcaccatccattagccttgggaaggcgtgtttttgacagagggataaagaaacacagtgacagaaatgtgtactttctggactattgctttatttcttcccatttatttgtgaagtcattagaatgcccgtctatcagcattacatagagcctgcagtttccctaagaaactgtcaactttggggacaaaaataaggaaagtttcttactcctctgtttctatcttttgatctttttaaaagacatctagtaacaaagttaggctaaaaggctaaaagctggtaagccaccaatctatatggggcatcaaaatatcactaaaataggctagtaatatgatgccaattaatcaagttttccctcatggtttcttaagatggtattgccctagatatgataaaatataacccaaaatagaagattcaaaaccatcaacaaacaaaaacagaaagcttgctttctggcatctacgttttgccgttgaatatttttgagatgtccacataagttccaaggagcagctgcagccacaccaccaccctgagcccagccagctgacagttgcctagagttggcagccacagctagctgaaatttggaaacccccaaatgcttagggttgagatgtgtccaattaccaaaattataaagccttcattaggcttttgaagaagttgtgtggtctgtagaattgcatgttttgaacataaagaggttagttattttcagaggcaggagatcttttggccccagtgaccactaaatattaataaatattaaacacaagttaattaatggtgatttaaagggaccccatgttgttaattcatgtcagtctctatttgatgaaatgtatctttttctttgtttccattcactcaatttctcttcttttagatatacacttgtataacacacacacacacacacacacacacacacacacacacattttgttttccagtccgcactcaagttttgcaagacagtcctgaaaaagaagtttcagtggggagatagaagtgttttttgcactctctcctgtttggttgaaatcagtttttccacaattcttacaacaagtttttctctaacagaaaatgcacagattgaacagttgccctccaaaacactggcaagcaggcggcatgatgatttcctcttctaacggatcccaactcatttactaagactcattcaacttttaacaaaaaatttgtcatttctctttcttactacagccattgccatcctctgtaaaattacatgtggacattaaaacttaaatgctgtcctacaatgaaaatatttttaatgccctcctcaaagttaagaaaaaaaatttactatttgtattttgtgtacctgggaagttattcatgctgagtaacagtacaaaacttgagctgccttgctttctgcttccaggaatgccaatcagagaacattctttttcaggcagccaagtttggaagtcagttggtttctggcagtgagtagggggaggggatggcaggggaagcatagtgagtcctcgggctgatgttcagcttccaagtgtttccgtaatatccgtcaatgaaagcatctccttttacccacgtagagacaggtaaaaagacagctgagtaaatcagcattagatgtaacagcggaagctcagtcagagggagcggggagggagggcgcatgaaagcctgccattggcgagcttaccaaaggcatctgccagtgggacttcaatggaatgtgaaaccaaatcattttcaagttaaagatagacacagtacacaccaggatctagaggctggatttcatactcatagctctccctagaatttcagagagttctgttatgatctctgttgtaattaccaatttggttcaagtttgttctttaaatgaatatgcttagaattcacatatgttctggatgtactggaattaaaaggatttaagagatcatggtgtgcatgttctagggtaagtgaaaagattggtt

SEQ ID NO: 19727 - DNA, 2300 bp, Homo sapien
aggtaatttcctgaatttgattacgatggagagaagcagctaaaagtctacactggtgagcagtttacagtacttgttagagatcaaggtgaccttgtaaaggcttctattgacacaatattggttaattactagaaatgtaatctatgtatataatttatattttaaagccctttatgatgaagattctttacagttcatcttaatttgagaaagtatcattaacaaataacatatagaccattttttaagaatccaaaatgaataccacaatgaactgctgtacttgtgtttttcttccatatttaaagatgaaaaaaattaactaccatgtttaacattcttcccacagtccatttcatactagaaatatgcttaaccttctgactgatcagttgctcctagctggtttgtaggttggagcaagcagcccttgctctttgcctaaaaaggtctctatatttatgctgtgttgttatgtaaacctatgttaggaaacataggattgttaatgcacatcttgttgaaaatgacagtttattcagcaaagggaagtcacgtgccagtcagctttctcatggtccctcttgttcaaaaatcacatattgactaaataatactagccagaatttattgagcatttagtatgcttcaagcttggtgcttcccttggactatctcatttaatccatttccattccttgttaaagtaggaattttacagaagagtaaactgagggttagagaggttaagtaacctatccaagatcacaaaagtagtatgggctagagccagatttcaaatccgcatctgcttgattccacaattgctcttcttaagaactcctctgccttgcctctctttgtgatgtgatgtactaagaaaaattctgtgcagatctctgaagggtttaaccacagcaagccatgctctgaagacagtcctggaggagttgagggaaagctttcagatgccatctttatccattgaagaagtagccctacctagtgccaagtcttttgatggttacttggtagagaaagatgagtaagacaatgttcctgttcctctgggagtccatctctaaagagagaagatagatatgcaaacaaattattgtgaaatgtaagctaagtttgggaaataaggaaggttgtgcaagagcagagtgattatgcgaggcctgagggatgaagtagccatccctggaggacgggggcacccactggctgattaatgtaccatggtgggaggaaggaccatgctgacatgctggcaagcggggaagctccagtcacctgggactccttcagcttttccctaaaggactggtaatgcgctgaaggtgattccttaaatcctaactacatagccattggtttggggagtcccaggattgctcagagtttgtatcgtttcaaatccaagactgctgctcttaatatagagccctccccacctcagcaaatatagcctgatcgattccagcaggctgtgttgcctgctttaaatttaaatgataaattttaaaagaactgaaatctgtttaaataacagttaaacacagggttttgatgaaaagaaaatgaagaattttacctcccacatctaagctgtgattagaagtttgctctagaaaaaaagcactttgaaactagcccttcatacactgatgtagtgttttcagcatctgtgtttactgaatacattactgcattttttaatgtttctaaaggagctgtgggattattgctgcatttcctattgagttagtaactgacatttaaaaatatttagttggctgatgtagtagataatgatcagtatttcaaaagattaatggtgacttaaaatgcatagagatatttcattagttagttgggaaaccttttattcttatacttctgttatttttttcttgttcatgaagttgagtcagcaagagaagcatattcaaattagacttgtcatacagaaaaaaaaatctgactttgtcagggtgggtggaggggaaaaaagcaactttttgtcagtcttttgtatttcagcagctggattcattgctaccatggtaacggaccacatgatgaggtgtattagattgctgtgtgttgagcacaaggggaagaatgaacacagctttttattgaagttaaaggttactttggagtttgtttggaaatgtgtaaggtcaaatactatagttttcagcatatgtagtacttcagaggaagaattaaggggcatgttggtgcatttaactacaaaaccaggtaaggtacaattgaatctatgaaac

SEQ ID NO: 19728 - DNA, 2300 bp, Homo sapien
tggcacgatagaaggcgaacttcaacaaggagtgtgacattattttgtatttgttttagatccgaatttctcatatttgcatacacggtactgattatttcttcccaggcactcagccagaaataggtgggagaaatgagaaaaaaaaatagatgatagcaccctgttaatctttagtcatatgttccagattgtgagctttcaatagttgtacttacgttaaagataagagtaaaataactttcgtatcatgtctttttttaaagcaagtatttctaggataaaaggaactactgttggcatatccagatttaaatatgaaataccatttggggcaaaatttacagaaaattaaacatggagcagttcagtgcctccatctaatctttaggtgttcctacttattgttcaatgtaactctgaaatttctccagacttgacgaggaaataatttagtctctatctcttactgagatttaacttaagtctctatatattactcaacttctgtgtatttctttaatatacattgcagctaaagttagcttaattttaaattatcattcagaatttttagcatctgcccttatttatctgttagttagaagttatgaatttatcctgtttttctcatggagaaaatttaaagaatgaatttattttatttttttgcaatcactaacaatcatagtttttttatgtttatccatatgcagaagcgaagagcaatcaaggtccatgttattatgcaaaatgagttcacgttactgtttacagttctagaactagtcattttccaatcataaagctataatttctttcgttctctctcagcatttcctgctgcaggagatcagtttcttaggcaccatcccagaacagttgtccctagattgaagtcccactctagtctttctcaagagccgggaagaaaggttatgacacttgtttagaagacaatgcgtccagagctagttatgtctttgtttttacactttgctttttatcttcatttattattattttcattgtttttcctgactggttaggccggagaatagctttaccaaaggcaagaattgttattgttgttttagtatctagctcatagcatgtagacaattacttggatttgatcacttaaatctaatattttactttgcttcaaatctagtattttgctttgcctgctttataattcaaatttcctaccaaagaaagttaaccgtctcttgaggcatttgaattatttagaactgttttcagataatttgcacatcttttttagggccctatacacctgcctcaggaaagaaaaaaaaatctgtttgtcagatgtaggcaacaccactcgttaagtaagccattagtcactctattttttaaaaaataacttaattatctcatccacaccagttttccattctctgcccatcttcctttcttttttcttcctctcattctccgtgtctctgatattcgctctcttcccactggacaatcagcattcaccccttgtgcttctgagtcttccagtgagctgtgctggtctcctggagacagagagcagtttggggtaaaggcaagtctgtttggctaatttaaattcttgtaatgtgagagatgggaatagaaagagcaaatggcattacagagatttttgttgttaaaaggacacctcttctccatcccatttcatttcatttccccacaggcatgattgaaaagggttgtaagattccaggaatgaactaaatgtttctctgagcccaaatcaactatcatctgaaatcgtggtgcagagaagaaaggtgcaattcctgtaaggctgtatttttccttcttctggttcatacttttgttttcttggtttttcttcacttacttcccccttagtcttccatccggttgagtgttcctactgccacagtgagagtatgatgggatttcgctaccgatgccaacagtgtcacaattaccagctctgtcaggactgcttctggaggggacatgccggtggttctcatagcaaccagcaccaaatgaaagagtacacgtcatgggtaaggcaaggtccaggcaatacttggagttggatgtgtgagtgttgcccagagttaaagggaatatcaaggatggtggcagaattaaagggcaaacttaccttccatcccaggtctagtattcagtcccccttcctcccactctccaccctactgcgtgctcttacttattctgttggaacccagtgtagcttcctgagatttaaaatataggaagactcaaaactatgttacttc

SEQ ID NO: 19729 - DNA, 2300 bp, Homo sapien
agaaacagtaagaggaagcatgggtctttgcaagaatgactacactctcatgcccctttagctcatagtgcaatgtgaagcttggtgtgtatctttgatacttagatattcatctgtgtaccttgtaagtcttaggtcagaattggatctgattgtataagaaaaaaaatcttatgtaaagtgagatgtggacgaaggaatcaacttgtgcactgtggactaactggagaagcaaaagataaaattattaaaataatagcccaagaggaaagtataaaataggaaggaaaataagtagggccccttgtttgagattatccttaccatctgggttgtaaaacatttgattctaattccagaaacttgataccagaaataacttattaccagggacatatgctgaagaattgtcaggaatgacaaagtgtttacttgtttttaatatctgtatcacaaaatgataaagctgataaaccatacagtgatgtgaaggagtgagtcatagcttaatactttatgacacatatatttatgctgtatcttttacaccccaattcttcccttttcaccctataaaaggtcagagaccactgctgataagcaaagaatccttcaaaatctctcctggctgggcgtggtggctcatgcctgtaatcctagcactttggggcgggtggactgcctgagctcaggagttcaagaccagcctgagcaactcggtgaaaccctgtctctactaaaatacaaaaattagctgggtgtggcggcgtgcgcctgttatcccacctactcaggaggctgaggcaggagaattactagaacccaggaggcggaggttgcagtgagctgagattgcgccactgcactccagcctgggtgacagagcgagactctgcctctaaaaaataataataaaaaaaaaatctctcctctctggaggacagtactgaacatatgcagggtcttttcagtttataatctaatccgtagactgcacagtgctagcaattctgttcacagttatcttttcacaacagtcatcttggaagtacttgattcttaccttgatttataatatttattgagctcacattacagatcattactgtccagtcacattgataaaaccatgtcacttggaagctccagttcaccactcctagctgtgtgaccttaagcagtttacttaatcttactagtttactcatctttaaaatgggaataataatagtatctgtcacatagccaatatatttgaaagcggtattgcaaggatatagaacagcttgaatgttaagcactttcaaatactaagtgaggtgatcacttttgtaattcaaatggaaatagaataaatgtcaatgaattaatgatctgtatcaggaggcagcataaagaatttgaattggagggttttgggtaactggtaaaatggtggttatctttttttaaaagaaaaaccctctttggggattcctttgtacagatgatctcttaatttgccatctttaatcctcacattattaaaggctacattgattagaaggaaatacagcttccttgtaggtttttagctttttggcttgtttttggggagatggttgctgctatttggagaaagggagaaaggcagaaattttaaccttagtctgataccttttctacaagctggccaccaggtcctttttaggtttttctgaaacctgaccaagtttaattgtcatggcataaaaacttggtattgaaggagttaaagggtctcccacacccctttgcatgaatcgttcttttgtgtacacagctgcagtggcagcacgggtcggaaaggaaatggttagaggaagagctggttttcagacaaggcgagtctgcgaggggggctgcagggtggcctggggttttacatgccagatgtaggcctgccccggtgcctgcctggagctgctggcgtggtcacgccgcgaccctgtgcgaattgaggcgaggtgatgagttagcgggttgccatggcaacaggctggccacgtgaccagggtgctgctgccggcgctctgacgtcagctgccagagggcggggccgcaggagggcggggcgcgagcgagagctgggagaaggcagtgagcgagcaggcggcaggcacggtccgtgcggagcaggcgagcgagcgggaagacgcagccaccttcctcaccagccagcccacagcggtttgttccccttctcgggagtgcgccaatgcctgggccgacccaaaccctgtccccaaatggcgagaacaacaacgacatcatccaggata

SEQ ID NO: 19730 - DNA, 2300 bp, Homo sapien
aaaagaaggaagaaacctgtgtccttgacaatattgtccagatgcagaagtaaccaaccctgggaatgattttatctccatgcatctagctattaggatttgtttttaaaaggcttgaacaataaggacatttagtaaggttcctgttactgcagccaaaagcatttcaactgatatgccttctctctttcaatagtttcactcttacatagtaggtttctcaatataacaaggtgtgttaggttggatgcaaagataactgccaaaatttcctcctatgatcaagctgcttaatgtctatttcccttttccaccattctagtccttctgtcatggaatactgcagaaaaatataatgccagttccagactcaggctttaagagaattagcatctttcctcctccttaactctcttggaagccagtcaccatgtaagaaagcttaggctaaactcctgaatggagagaggccttgtggagaagaatcaagtaacttcaaccaagaggcaacaccaagacttcagcaatttgagtgaagccatcttggaccttccaccccagttaagtgaagatagctgacacatcataaagcagactagccatctccgctaagcccttcctgaattcctggcaacagaactgtgagcaataaaacatctgctgtttttagtcactaagtcttgaagtggttcattatgaagcaattgataatttataaacaaattaatattatttggttttttgctttgtaaaattgctgtagtcatttcacaatgataaaattatttagtgagtcactaatagctttgaatgctaacgaacatttttctcaaatatgtgttttaagtcttggctcacaaaggagaatttgtttctatgtatgtatgtatcgctttgttattatcctgtgtacttttttaatataacattttaaaaatatgtaacatttaaacatgtaaaatgtaacgttttaaaaataaatacaaataaatgggaaacgatttgcaacaaacgagttgctatccttaataagcaaaaaattctcacaaataaaaaagaaaaatcttactcccttaattttttaaatgggaaaagccatctctgaagaaccataaatggtcagtaaacatgaagggggactatcttaagctcacaaagttgaaacatgaggcatcatttttcaccgactaaatagccaaagaaaaatttaaacagtgagacaataccagcaagcttccactgaagaacgggaagaccctaagataggctccaggagtctacgataccagtctccttgaactatggggacgtggacgtccctggtcacaagttgcctgactttgggcgatgtctacggctgtaaatttgggattatatagccacagcacagaactgttgtaaggctccagtgatactcataggcaaaagcaatataagtgactgttagtttttgttcagcctattcatccttacatttacttttgtcggaaaagaactggaatcacaggaaaatctgaggttttttttttttttttttttttgagacagagtctcgctctgtcgcccaggctggagtgcagcacatctcagttcactgcaagctccgcctcccgggttcacgccattctcctgcctcagcctcccgagtagctggaactacaggcgcccgccaacatgcccagctaaatttttgtatttttagtagagacggggtttcaccgtgttagccaggatggtctctatctcctgacctcgtgatccgcccgcctcggccaccgcgcccggccgaaaatctgaatattttaatggaaaactgggagtgagattcgggaattacttgagaccaacaatgatgggtggtgccaggagaaagccagggtgggaacggcccaggcgagatgcgggaccctccaggtgccgccgctcacaaggacccctgactcctagcgcaccctcccctggccttggagattccgccgggctagcggctaccgggagaaggcggtggaaactgtagagcccgcggctctgattggctacctcagagcaaggggcggggcggcggaggacccgaagggcgcgagagcggaacactgcgtacgcgcacttccggtctttgtggcttgcagctcggggtgggtggctcatttcctggccgctcctgggcttcgcggtgagggacgtgggcccctaggaagagggaggtggggttgggagcgcgcgccggacagtggaggagctccgctcctcggcctgcccatccccaggtcgcggccctttggcccgcgcggcgtctccaa

SEQ ID NO: 19731 - DNA, 2300 bp, Homo sapien
acgaaagatttgtacagatacttcaccaaagaatatatacagatggcatataagcacattacaaaatgctaaatattattagtcagtatggaaatgcaaattgaaaccacagtgagatacacagtgagttggtaaggatgtggaggaaccggaactctcatgtactcatgttaggaatgcaaaatgatacagccactctgaaaagtagtgtgggtttttttaaacattaaatgtacatctaccatgagagagggggaaaaaagcatatgtccatataaagacgtgtgtacatgaatgttctcagctttacttgtaacagtaaaaacctggaataacccaaatgcccatgaactggtgattggataaacaaactgtggtatatacatacaatggaatattattcagcaacaaaaattaactattgatacacacagcaataaagataaatctcaaaataaaagcttagtgaaacaactctgacaaaaacaaggacattctgtatgattccatttaaataaatatctagaaaatgcaaactaatctctagtaacagctgaccagtggagggggcattgggagagaggcttaccaacgggcaggaggaaacttttggggtttagatgtaataaacatattattttgattgcagtgatagttccacagctgtattcatttaacaagccttatcaaattatatcctttaaatatttgctgtttatgtcagttatacctcaataaagctgttttgttttgttttgttttgttttgttttgagacaaagtctcgctttgtcacccaggctggagtgcagtggcgcaatctcggctcactgcaacctccgcctcctgggttcatgggttcacgcgattctcctgactcggcctcccaagtagctgggattaaaggcgcacaccaccatgcccagctaatttttgtatttgtagtagagacagggtttcaccttgttggccaggctggtctccaactcctgatctcaggtgatccacctgcctcaacctcccaaagttttaggattacaggcctaagctgcgcctggccaaaaagaaagctgtttttttaaaactatctgcactccctacttgggagggttggactcaagttcccacatctctttcctcttacggttatattaagggcttagtcatacatccctaaatttcatatatcccaacagggacttgggctgggacaggaagccctcttcctccacctcaactaccacttagccacccaccattttctcaaacctcttcctttccccaccggacagcttaaaccaagtcacacgtctcattggtctcaacagaaatgaggtcccaactcctcatttcccaagatatttccatgaacacagcaatatcctttcctaccctgattaccccgcaccctccatttcgggtccttctcaccctgatcagtgagaattgttctagcaagcaaaccttaaatagacctcgtaccctttctagattgcaaagtagataaaaatccaactttccgttaattcagggattaattactgagcatcacttatttcttgggcagtggttctcaaaatgtggtcccaggaccaacagcttcaggatcacctgagaacctgggctgccaccgccccctcccccactactaaatcagcaactccggagttgtggggcagaagtcagtattttaacaaggcctccaggtgattctgatgcgcgctactcttctgggggtgtgaaaaaccagagaggacaggaagaaagttagaattaaagcatacctacgaatcagataagcgatagggggaggggtggttatttaaaaaacgataactaattaagaacttgtatgtagtaagaaaacctaccctgccccagagagctttcccgaaagataatggattccgacattcacctcaagaaccggcagacagagcagcaaaggatctgtcgctggccaagcaggtccctggctaaggcactgctagggacagctcgcggcggttcgggggttaattctcggcagccctccgtcacccggtgccccacccccgccctgcgcctgcgcggtgaagcgccatagagctgagcactcctcccagattcctagagcggacagggcgatggcaggttcgccgggtgtgaggcttcacagcggtccggtgaccaagtcgaggtaagggtgatgtcggctcgcggatagcagaggagttccgggtgatcttgcctaacgagcaggaaactgtgcatggtttctcgagtccttggagagtgaaggcccccggggtcgctcccggg

SEQ ID NO: 19732 - DNA, 2300 bp, Homo sapien
taattttttaaatttttgtagaaatggggtctcactttgttgcccaggctggtcctcaactcctggcttcaagcattcctcctgccttggcctcccaaagtgttgggattacaggtgtgagccactgcacctggcctgttatagtattagtgtaccccagtgaatcctatctcccagtacccatatccctgtgtagtttccttctataatgactttagaactggtcatatgacctgctttcatcaatgagacattaacagatgaaacacattaacagatgaaacacaaacataggtatgaaaagagcttgccttctctgactggaaacaagctgtcctgtgaaaaagtccagcgtcacctgctgaagacatgaggactcaagccatagccggcactaacagtttgacattgagacaacgtgattgaaaccatcttagaccctggccccagtagagtcagccttgagatgactgcaaaatgaccccagaaaagaccaagagaaaaaaaaatgcccaggtgaacccagctcaagttgatgacctacagaatcataagaaataatgtggtttaagaagtctgatgttttaggtcactaaattttggggttctttattctggagtaatacatagatacaaatctcaaaataacttcaaggtatgaagtactatgcacttgaaaagtgaggaaacagaatcgtaaaatatatgagtaacttactggagccagttaagtgacaaaactactgtttgaatctaggttgtcagactccagaacttttaactatgcccctacagtagataagaaaaatgaccaaaactgacagattagcaatgaggtcattatacagggaaaaatgaatgactttggggtcttaaaaaagtggagagagctgcatgagaatttgatcgccagattttgaaataaagtcatgtgactatgcttggtacactaaagaggtaatactgcctaacagagttaagggggatcatttgaagacactagcatagagtgacaccccctcatcctccccaccccgccaaagccactaagaaagatataataccctgcctctcacctgacagaaggtggtgttcctgagattcataattgaactggatctccatgggctgcaactggacacctcagtgtgcaagtggagaattaccatttcctctgtaagcttttcttgtccacataaaggtctgggacctggaggcaactgggcaccactgggcttggaagggaatcattgtgctgactacagatgtaatctctgagactagaccaccagaaaaatcctcaagatataaaagaaggagaaaacaaaaaatctcatttgacttccagttgcttttctctcagaatgtattaggcttcctccccatcatccaagagccagggattaacccacttaagacacacattccccattccaagtctagagatgttcaaacaaaattaggggttaatgctaccaaaaaaaggtataactggaaagataacgcagagaggggaattttacagtgaattctagtggttaacactatgttattcgctgcccttcctatccaaaaatgacactactgatcatttttcttccttttgcttttacaacattcacaaattcaggtggctctttcccagtacggtaggctgattcgtatggatgcaccacggttggtgactccccccaccccacagagtttctggcgttcattcggttgaacccaaggccagcaagggctgactgggaacaaaccgaacactaggccgtgaaccaatcgtctctccgtgcccgggagcgaccccgggggccttcactctccaaggactcgagaaaccatgcacagtttcctgctcgttaggcaagatcacccggaactcctctgctatccgcgagccgacatcacccttacctcgacttggtcaccggaccgctgtgaagcctcacacccggcgaacctgccatcgccctgtccgctctaggaatctgggaggagtgctcagctctatggcgcttcaccgcgcaggcgcagggcgggggtggggcaccgggtgacggagggctgccgagaattaacccccgaaccgccgcgagctgtccctagcagtgccttagccagggacctgcttggccagcgacagatcctttgctgctctgtctgccggttcttgaggtgaatgtcggaatccattatctttcgggaaagctctctggggcagggtaggttttcttactacatacaagttcttaattagttatcgttttttaaataaccacccctccccctatcgctta

SEQ ID NO: 19733 - DNA, 2300 bp, Homo sapien
aaataatgaaggtagaaattataacactagggaaaaatttgtagcggatggcagtgttgaaggcaaatgtaaacataagggtaatggtctgtcatggcttttagaaaaagatgatagagttcatcattattttgccttcatctttgttaaggacagaaaattccctgacaggtgggcaagtatcaggttacctattttttattcctttggtacaaaagggttgaacgtcaggctaaaaaagcagccatgcatttattattaaacattttctaccgacaaggcactgtgctaggtactgtaatcctaccataagtaggtaggtatttcttccactgtaaatcataggggtttgctgttttatgtgagttagcctcttccccttgtctgagcattcctcaggggaggtcacctgtgaggttcccagaactgtagttttttttaccagggtgttgtatttggagggggaggaggactcggctcaaaagagctagctggctctccagtgttcagaggtgagtccacgatactcttaccacaatttggaagtttgtgaatctttttaaagaactaatcaatctctaatagcattgaggttgtacctacatattaagttgaatggactgttctatttaaaaaataaacaactagacaattaactagtttattaacctatcacaattgaatttttttttaattttcagtcttaacacattttttaaaatgtattaaagtaatacattgtagtagtaggattatatactccttggctgagaattccaagtactgtggttctactgtttagtggaaaactctggaagttaaaatatagaatatgagaggaggcttttttataatgggcatcattgtgtggaaaatgacccatgtgaatacaaatatttcctagttcagagattttggttatatctggtgcttggatcaagtttaaaaatggaaggtgagattttgcatgagcctattaaaaagcatagtaataaatgcaaggccagctggtggaaaagtgaggcagaatggagcttgtttataggttttctgataacaattataaaaaatgtgctttatagattaagatttattgaagtataaatatgtagtaatgatataatgtattttaagttatacaagaaaatgtagggacttttgtttgggtctttttctctttgtggctgaggggaaacaagtcagtgtccaataaagctgtaaactcctctgctctaagataaatgatgtgatttatttatttataactggcttctttccaagtaggttttcaggtggcatatttggaagacggctggaatgacagaattcttgtatcagagtaggtaagaagggagcaacctctcaatggctattatgtcatgctttttaagatcgtatgcggttcctatatacaaggaagcttccctgtggtagatttgtcataaatgccaaagatatttggtaatgtgagtgtagaaaaagtagtatgagggttggcaaatactgtttttgtcttggcagctctaatatctgcattgttcagaaaggattctgaggctaaggcaaagctctgtgggaaaaagggactggaccaaaaaaaactggatggtggcacacaagaagaggaaatgatgagatgtgtactttctatctctggttaggcttagtccccactagacaaattgattttaaatactatgtagtgatttttaaattccatccacacattcattacccacacagataatcatagaaatttgggggagtgcctagcttctgatgaagtggtgatatggcagtgccaagcagtggcatcgccagagtatctgtttggttagcaaatgagcagtcattttaggtcatgcagattgctgatatctgcccagtagccactgagcatttgctggttttttcttctggctttcttggaggttaagctctctgtagtcatacccagttggtacttgatctttagcaatatgtctcatattcatgtaaattgaagggagggttacatgtactgaaataatctgcatgctaggcattggcttagacaccgtacctatctcacttagatttgtggactaggaaagcaagattcagagatcatgtgacttgcatgtggcctagagataaaattcaaatctggttctgtagactccagggacatattcaccatgccatgggtggtggctattaaaccttgataaatttgtgtttatggttaacaaatgtgaaagctattaaacattgctggtttgaattttttacagtgcagaaatgtaaaatgaaaaaggata

SEQ ID NO: 19734 - DNA, 2300 bp, Homo sapien
aggccaggcacggtggctcatgcctgcaatcctagcaatttaggaggccaaggcaggagggtcacttgtgcccaggagttggagagcagcctgggaaacataggaagaactcatctctgaaaaacaaacaaacaaacaaacaaattagctgggcatggtggagcacacctgttgtttaaggacttatcaaaagtgtaagtccagccttccataagcatttcaagataaattattacagcataaaatggaggcctttaaataggagaatgaagtggtttgatttgtaattttaaatgattgcatcaacagctgttttatggtataaaatgcccagttaggaggctgaggcgggaggatcactgagtctgggaggttgaagctgcagtgagccaagactgcaccattgccctacagcctgggtgacagagcaagaccctgtctcaaaaacaaaacaaacaatataatcacaggaaaagggttttgtaaaattttgcaacatttttaacttcctcaaggttaggtttcagatttattatttttgttttccaacattaattagatgtaaaaactcttaaaacaaaaatgccttcagctagcctttacaaatcagataagagggaaaggttgggaagagcagccaagttgcttaggggccgtatccaagtagcagagtgaaaaggctgtacttctgaagcttcctgcaatggagagaagtgttagcaggggttgtgagaagagctctggtcggaatgaaaagcagtggtataccatcagctgctcgctcacttgctctctcatgcacgaatccagcggagcctgacggcacttttcagagggcattttctccaatgaggcaaaaagtcaaagcctgaggatcttgaaatgcttatgttaggctggatctacacttttgaccagtccttaaacaacagggctcctttgtgtggtgtctgatgccaatcatgtgacctagctaaaggcagcaatgtaaccatcccacaattcatttatttattcaacaaatatttattgagttctctatttaccaggcagtcagcttccaggatctaggatgggatactgtggtgagcaagacagacaaggtccctgcccttaagggacttaaagacaaaacaaaacaaaaaataaaacaagtaaataaatgagatcacttccattaataacagtgccatgaagggtcatgcgccatgaaaggcaggtggtgaggctgaggatcttgggccacaatgagccgaggagctgaggtgactgggggcgccagggtctgggggtgcgggcaggcaacagaccacaggggacttacaggccattataaggagtttttatgtcataaattattatgacataaattggagggctttaaataggggagtgaagtggtctgatttgtaattttaaatgatcgcgtcagcagttgttttatggtataaaatgcccagctttaagatgaccatgcattctacaaattcaccgtgacatcactgccaaaactcttaacctgtcttatctagttttcctgacagataaataggtcggaataaagctccatgacataactagtgggagccaaagatttgaatcacgtcttggtttcaaatcttgctacccacaaatgagttgtgagctcttgtcaggttatttactgtatttgtgcctcaactatctcagctgtgaaatggggataatgaaagttcctacatcatttatttgtggaaaaaaaaatgacatgtaaagcacgacgagagcgcctggcacaatgtagtaagctttcacaaacactcactttcattccttcttgcaggggattactgagaggatccacaagataatgcacgtgaaagggcttgcgaaattgtaaggactatcttaatggtagagtcctctttatgttttcttttaaacggtccagaggacgctgggctgttcgaggagaggcgcgaggccaagcgcagcctcaatgcggtcattgtcgtggggccgcccctcccccgcccggggcgcttctccatggcaacgtgggctttacctctccccgcctcctcaggcccgcagaccggaagcagcccgcgccgggggcttctgggaaaaggcttgtgaacggcgtttctgcgtctgccgtggacagcgaagctgctgcggttcctgagccggaggtttgcgccggtgtgcggggaacgttatgagagggaggggggacaccgggctagggtctgcggacctcttagcaggagccggcggggaagcctgtccgggaccttcctcagcttcccgggaggcgc

SEQ ID NO: 19735 - DNA, 2300 bp, Homo sapien
ttcagatctatccttcgtgttgctatcagagagccctacctgaattgcagatgtgcacatgccactaattcaagtttctgcttaaaaccttagttcatagccctttacttggcctgtcaaaccctttaaaactaggctgctgtttgcctcttcagcctcatcctcagccactcatcctgctgtcctttaatccagcaaatctaaacaacatcccacactggtacctcagtctcaaatgtatcaacaccagctttctccatcaactccaatcccagtctctacccaggacctccctttctttgtgcttttatagtatcctgcagttgtctccatcagaatgttgccacattgtttagaaaagtcaatttattcatctttctctttacttagtctattagcccctaaagggcaagaatctatattttaccattgaattcccggtgtttacgatacaactggtatatagtaggtgctcaccctactgggaccttattcctgctaatttcttttcactttacccccaaaatttttaaaaaattaaaacagcaaacaaaaacctgttcttgctctaactacctgactgtgaaacttttctaatcaatcttttatgtctgctcccttttttgttgttgctgtttttaactttggcctctgatatctggctgtttggtggaccatacccatgaattcatcatccctgacctcttgccacatcccacagttcctccttctccttgaagcttctgactgtcgttcatattctccttaaattgtctcctgtgacttcacaccactgccaagccttgccctcgtttcaaattctcccctgacgtgagtcatttaacctaccctacccaccagcgccagaaacacattcccacctgcacttttgggctgtttgctatttgtgttggcagctgcatcagcaaaaagtcttatcctgtgaaagccccttgtttgaagcaagaatttcttcagatttagttttactgtactctaattgggatccaaacctctccctagtcccctagcgtcataaactgagtaaaccagcctcttctttcttcacttcagattccagtactaacatacttttggggcggcgtcataccaaaagggattttttgttattgttctttattaattagcaagtgcttttcaagcatctccgtcctctccctaattcctcagttacgagtacaagtacattttccaggagtccctagggaaaggggctagagaaggaagtcacgaggtggggctgtggtgcatttaggcttaaatttatttatttatttattttttgagacgctctcactttgcagcccaggctggagggcagtggcgcaatcatggctaactgcagtctccacctccccagattgaggtgatcctcacccctcagcctcccaagaagcggggactacaggcatgcgtctctacactcggctaatttctgtatgttttgtagagatgcggtttagccatgttggccaggctggtctcgaactccttggctcatgtgatctgcccatctcgacctcccaaagtgctgggattacaggcatgagccaccgcgcccggcctcaaacttatttttcaattgagattaagattatctgaggagagatatgtgtatgtattgtaacaaattttatgtgggtcagttctcactttttcaagggccattgtgttctcctgtgaaagcatggggttgcggatgtcaaacttgtcccttaaaacgtcagtacttggggtgtaaccacttcgggagtgggaatggtattagggattgtactcagcggtagacagcacagcattcgcccctctctgtaatccttggcaagtcacaggacatttgagtttattttctgtaaaatgggaataaccttactgagttaccggagtaaatgaataatgtaagcaaaagcactttgcgaagcaacaatgctagtttattgaacggaacactgagcagagcagctggattcccaccggtcgagcctcccggttctctttccctgtcccaagtgcgcggccacagcggctcttctccatggcaacgtccccgcgttccgggccccgccccgacccgccaccagaaccggaagttgttgcgcagctggcagttccccggtttctccccgacggcgtcgggaggtgagacccgaggcctctttagggcccccaggctgcggtcagaggcggtggtccccgggtggtggaagggggacgcggagaggcggccgcggactcgtcgccacccctcccttcgcgcgcaagtgcagcacccttacacc

SEQ ID NO: 19736 - DNA, 2300 bp, Homo sapien
taccctgaaggtaaaaaaaaaattttaccctgaaggcaaaagggccctgaagaatgtaagaaagtaagtggtatgattatatttgtaatttagaaatcccattctggcagccagtgtgaaggatggtctggggtcaggaatggataagggaaagatggcggccgaaacgtccatctggaggctgttgctgagatgtagacatgggatacagattcaccagggcaggagccgtgaaggagagaagcgagctgaggaggtgaggaatgggaggaggtggggacagtagagtttgcttaggtgactggcttgttggaggtgagtccttgagttaaggaatgaggaaaagactagctttagatgaggatagggatggagatggggtgtgggaaagaacatttcaacactggtaggcttattcctttctctaaaggaaaaaatatgtcagtaacaatattgcaagtttccctaactgctccttctctctcacctctaagtcattgtgcagcctgtttatttcaaatatcaagactcatatacatcaacttcctgtattcaaacatagtagcttccaccaatcactgcagggagttagttcattcgttaaatacatcattaaaaatacttataatgcaccaatgacttgcaaggtactgtgattggggggactgataagttaacaagacataactgacccttccctcatacagattacattctagcaggagccaaaaaagacattaaccatccgattataaatcatttagttatatgatgtcgcaaaggttctgtaaaaatatagggtagaatgaggcaaagaacaaggcgggtagggggactcaggttcctaaataggttttagtagatctgtgacctccctgaaatctgtaaaattttgtctgtgtctgtatacatttaatggggtggtggggaggtgggggtgtgcggcagggataggaagcacagattccatgctcaagagtctgtgaatcctaagagattaagaaccggccgggcgtggtggcttacgcctgtaatcccagcacttagggaggccgaggcgggcagatcacctgaggtcgggagctcgagaccagcctgaccaacatggagaaaccccgtctctactaaaaatacaaaattagccgggcatggtggcacatgcctgtgatcccagctactcgggaggctgaggcaggagaatcgcttgaacccgggaggcggagtttgcagtgagccgagatcgcgccattgcactccagcctggacaacaagagcgaaactccgtctcaaataaaagaaaaaaaaaaagggagagattaagaaccactctacccttcatgtccatttgggcgctatttatatacaaaccttttccgcgtgggaaggcagggagggatagagggagaagccagtagcttggcggtctactgagaacgaccccagctttaggcttacagacatcaaaagtaatcactcttctatatgagaaaagacaacacgctcattaattttttaaaacgtagttacttaaaaagattgggagattttctattcctctatcaatggggatttccaggcacgtgccccacccaaggcccacgcccagagcgcccgagtggcaggacaacgcccgctgacatcttcccgtcccgacggcacaggctactccgagctccgccttttagattgcaccgagagaagccagctacagcttggagtccaggccgggttttcaagcatcaagacggaagtaacagcggaaaggaagttccaaggcccgcgctgggaaaaaggtggggggaccaggggaagactcggagtgcgatggcggcgcaaattccaattgtggccaccacttccactcccggaatagtccggaacagcaagaagaggccggccagcccttcccacaatggcagcagcggcgggggctatggcgccagtaagaagaaaaaagcgtccgcttccagctttgcgcaggtacgcagtcgcgctcccaggctgcgcgtgcgcgtcgcgaaacgggacttggcggggcggagccgagccagggcgcgtgcgtaatgtggggcgctgcgcgtgcggtctccgttggggttgaaagacgctgccccgcggagtgaatgactactctttcccttcgtttggacacatgggcttacaacgccttgtgttgtaaggagagaagaagaagtagggaggttattactgacttagtattaatagaaggactgcctcttcccctcgaggtcgcctttagcatgaggttcaggactaatgagtgtcagtcattcagaaat

SEQ ID NO: 19737 - DNA, 2300 bp, Homo sapien
attaagtgttgggaaccaagcaacagaatggggcacagcccagttgttgttgttgttgttgttgttgtcgttttgaggcggagtcttgctctgttgccaggctggagtgcagtggcacgatctctgctcactgcaatctcccgggttcaagcgattctcctgcctcagccttctgagtagctgggattacaggcgcatgccaccatactcagctaatttttgtatttttagtagagacgaggtttcaccgtgttggacaggatggcctttatctcctgaccttgtgatctgcccgcctcagcctctcaaagtgttgggattacaggtgtgagccaccgcgcccggcccagagcccagtcattaaggaccttgtatgacaagccaaaacgttcttaccctgaaggtaaaaaaaaaattttaccctgaaggcaaaagggccctgaagaatgtaagaaagtaagtggtatgattatatttgtaatttagaaatcccattctggcagccagtgtgaaggatggtctggggtcaggaatggataagggaaagatggcggccgaaacgtccatctggaggctgttgctgagatgtagacatgggatacagattcaccagggcaggagccgtgaaggagagaagcgagctgaggaggtgaggaatgggaggaggtggggacagtagagtttgcttaggtgactggcttgttggaggtgagtccttgagttaaggaatgaggaaaagactagctttagatgaggatagggatggagatggggtgtgggaaagaacatttcaacactggtaggcttattcctttctctaaaggaaaaaatatgtcagtaacaatattgcaagtttccctaactgctccttctctctcacctctaagtcattgtgcagcctgtttatttcaaatatcaagactcatatacatcaacttcctgtattcaaacatagtagcttccaccaatcactgcagggagttagttcattcgttaaatacatcattaaaaatacttataatgcaccaatgacttgcaaggtactgtgattggggggactgataagttaacaagacataactgacccttccctcatacagattacattctagcaggagccaaaaaagacattaaccatccgattataaatcatttagttatatgatgtcgcaaaggttctgtaaaaatatagggtagaatgaggcaaagaacaaggcgggtagggggactcaggttcctaaataggttttagtagatctgtgacctccctgaaatctgtaaaattttgtctgtgtctgtatacatttaatggggtggtggggaggtgggggtgtgcggcagggataggaagcacagattccatgctcaagagtctgtgaatcctaagagattaagaaccggccgggcgtggtggcttacgcctgtaatcccagcacttagggaggccgaggcgggcagatcacctgaggtcgggagctcgagaccagcctgaccaacatggagaaaccccgtctctactaaaaatacaaaattagccgggcatggtggcacatgcctgtgatcccagctactcgggaggctgaggcaggagaatcgcttgaacccgggaggcggagtttgcagtgagccgagatcgcgccattgcactccagcctggacaacaagagcgaaactccgtctcaaataaaagaaaaaaaaaaagggagagattaagaaccactctacccttcatgtccatttgggcgctatttatatacaaaccttttccgcgtgggaaggcagggagggatagagggagaagccagtagcttggcggtctactgagaacgaccccagctttaggcttacagacatcaaaagtaatcactcttctatatgagaaaagacaacacgctcattaattttttaaaacgtagttacttaaaaagattgggagattttctattcctctatcaatggggatttccaggcacgtgccccacccaaggcccacgcccagagcgcccgagtggcaggacaacgcccgctgacatcttcccgtcccgacggcacaggctactccgagctccgccttttagattgcaccgagagaagccagctacagcttggagtccaggccgggttttcaagcatcaagacggaagtaacagcggaaaggaagttccaaggcccgcgctgggaaaaaggtggggggaccaggggaagactcggagtgcgatggcggcgcaaattccaattgtggccaccacttccactcccggaatagtccggaacagcaagaagaggccggccagcccttc

SEQ ID NO: 19738 - DNA, 2300 bp, Homo sapien
gcttatcgtttttgaggttcctctatgttgtatcttctatgactacttcgttccttttactgagtagtagtccactgtatggcatatactgcattttatccacgcagcagtttctggacatttggactgtttctacttcttggctatcatgaataacactgttattaatattcatgtacaagttactgtatgaatttatcttcagttctctcaggcatacgcctaggagtggaattgttgggtgatagaatacttcatgtgtaactttttaaaaaacctggaaaactgttttccaaagtggctgcaccattttacatttccataggcaacgtatgagggttctaatttctccatctcttcaccaacactgctattgtctgtctgtcttttgtactacagccagtgtagtgggtgtcaagaacttccttgttgtgcttctaatttgcatttccctattaactaatgatgttgaacacctttttatgtaattgttgatcatttaaatatctttggtaaaacgtctattcaattgttttgcccatttaaaattggactattagtcttattactgagttgtaagagttcttcatacattctggctacaagtcctttaacagatatatgatttgccaatcttttctcccaagataagagtattttttaacgatgacaactttattccaaagtgaagtttccttgtggaacagtaacaggctagtcatgattgactttgtttcaaaatattatataagtacttttaaaatagtaacttttaacttttattttagaatacttggaagatgtagacaagcaaaaacaggatactaaaattccagagataatcttcaggtttttttttttttttttcggacagccttttggttatgtgagaggtaatataaatttaaaagtgggaccacttaaatattaagtaatctcttattgcagctcttggttggcaagcaataagacacaaacctctgaattatttaagtagaaaattaatttattaaaagaatggttggttatgcctcgcgtgagtgacagagccagggttttgtcttctatcttcagggcagggtacagctgggtattggaattgtaccaagcagtgtttcccaagggggcacagagggagggcccctctccgggcactgtgcgggagccacttccccaaacagtccccgttctgcaagggccccggcgttgctgcccccgagacccgggtgcctgccccggcggtgcgggtcgcgggcctccgctctcgccgtcctccctcagtcccgggcctcctgcatcgcggtcgccaggcgcaggctcagcgcggctgacagcgctccagctcccgcgctcgcggccgcctcaggcagccgaccgggttggggcggccccgcgctcggcccgggagccgatccgctgtgagggctcctccatctcctcccaccccgtgacctgctcgacgcgcaacagcccgagttgtctttaacttgctgcggcagcctctttgtcccgacccagggtcgggggcacctctcggcctggcccggccctgcccgtagccgtgtgagcgggggccgggactgggcggtcggtccgggaggggcgccgcgcccgaccccggagtcccgagcccgaggggagcgtcgcggccccgcggtgggctcgccgcagcggagggggcgcgcatccgggtgagcgccggcgcccccgcctcccccgcgcagccgcacgggccgccgccgccgctgccgccgagcacgcagcgcagggaggaccgcgcccgagcgcctgcgggcgccctgcggcgcccgccgcgcgacgagccccaagtgagcgggcaggcggcgcgcatgcggggcggcccggagtagcgccgcccgagcccgcgagcggggcgcccggagtagccgccgacccgagccgggcgcggaggcgggggcgggcgcggcggagcggggcccggccggacccgcccgcccgccgggggagccgccggcagtggccgaggagcgcgcggcggacggcggcccgagagtagcgcgctggccgcgggaccggccgcgaccgccgcggccggcccggaggacgcctgccgccgccgccgccgcgcgcctagcgaggtgagtgtatcgcccgcggctgggcagtcccggagccgcagcgctgcgcgcgggtcggaggtggagaaagaggccccgccgcggccgcgtccccggtccctttgtggccggcgctgcctggggccggggcgcgggcacgctcggcgcgggttcgggtctgggaccccggtgccgttggac

SEQ ID NO: 19739 - DNA, 2300 bp, Homo sapien
caaccccagctgctgcttgtgtatgtatgcctaacaaacctgccttttcacatcagacccagttactcccctgactgcctattgacacctcgacatgaggcccctcacattcagtgtgaactaactgaactgatgatttagtccgtatttcctttcattgttgcattaccatcatctgtctagctagttaccttggccttaaatctgggaatcattttttgcctctcctttatcttcctttctccccatactccatgtagggtgtgccacacacccctcttctcccaaacactccctcttcactgcacttcaccttcaatcttaaaagctaattgtgcacccttgcgaaacttaagtagaagtagatgaaaagttatacttacatttaactattctgcaggcatttttttcaaataggattttagagaccgtaaaaccacatttgaaattcagatgttgcaccagcaatcagactgctttgccagtgatcaaaagaggcagcttttcatatgaaataacacaaaatataaatgtatgtatatagtttatctggtgagaacttttgttccatgacattgtgcactctaatgctttaggttctcccctcacctcagttaccatagttatcagtaagttgctcactacaggtgacccagtatcaggtattgagtaagcatgattttgaggtaagaacatgacagtagcatccttgttttcatcttgcagtcagggagtattggtttgatgaaaggaggaatataggcaagagatcaaagcccctagagagatgagcataaataataactttacatttataagtatcacttagtgttttctcaggttgctctctagcaaccttgtgaagtaggcaagaactgctgtatatatttcatggataaactacaggcctgccctgaattgttcaggtaagtgcatctctgttggccaccatggaacttgttgcataaagttgcccttgtaagaagctgttatcttgcccacattctggtccttccagggcatctgcatttgtagctttcagcatagacacagtgcagactctgtttcctcactccacttcataggaatgcacttggtttatatttctcctggtcttcagtgacacaggctttgagccttagagtcagctgctgagcaggagattctctacctctctgaggtctctcaggctgcttcatcatgctccaagatgaattccttacgcttaagacacctatgctcaaactatcccaaatgacttttcaaaattggtaaccattcctctagtcattttctcatcatggtataacataataaagggaggtagtagggtgggaaatggaaactaaaaatcagggaagtgtataaaattattgtcagagccaagactaaatgtcagatcttatgacatatacttttcttttccattatactttccacgaatctgtttcctgaatgattggtgactgttgcagttttagaatgggattcagtgtgaaagaggaacgagagttaactcaggaagctgctgtagtgcaggctacaaggagaactctattaattcttgagcctgggtactgaatgtggacagttgaaatgcactgggaatcactagttgcctaaccccctatggtaattaatagcttgacttttaccttaacgtataatacagcagttgagtaggaaggtagttaagacccaggtgtttgatgggtgtgaaatagtagctcactgttgttttaatttgcatttcctaattgtagggaattgagcacttttctacatgtttattggctatttaggtttccattctacaaagtacctgtttatgtcctttacctattttcctattggattgttgtatattgatttgtaggaattatttatatagtcctgatactctttatatattttataagcatttttccaagtctgattttcaaacatagtcttcatagtgaaatttcttattcttaatgaaattaataattcatattacttaatgtttataatattaaattaattttataattcacttttgatgttctgaatttttaagttaatcttttttcctttctttctctatagggtatgaacgtgatttctgatgaaactggattggaataattttcatgatctttgtatatttatatatatatatttttaaattttgcatttgacttaaagtgccatgagaaaatttgcatactgcaaggtggtcctagccacctccttgatttgggtactcttggatatgttcctgctgctttacttcagtgaatgcaacaaatgtgatgaaa

SEQ ID NO: 19740 - DNA, 2300 bp, Homo sapien
atgcctatagagatgtaaatatatactttctctttacaaatctttatataatttagccccccgcctcccgccttttttttttttttttttttttttagacggagtctcgctctgtcgcccaggctggagtgcagtggctgtgatctcggttcactgcaacctccgcctcctgggttcaagcgattcctgtgcctcagcctcccaagtagctggaactacaggcgcatgccgccacacctggctaaatttttgtattttagtagagacagggtttcaccgtgttgcccaggctggtcgccgactcctgagatcaggcaatccacccgctttgccctccccaagtgctggaattacaggcgtgagccactgcgcctagccaatttagctcccttttaaaattaaaaatgggctgggcatagtgtctcatacctgtgatcctaacactatgggaggctgaggtgggaggatcacttgagcccaggagttcaagaccagcctgggcaatatagtgagacgcccatctctaccaaaataataataataataacaacaacaacaacaacaacaacaatacctacgcatggtagtgtgcctggttcccagctactagggaggctgaggcaagagaaccctttaacccagcccaggaattcaagaatgcagtgaactgtgatcacacgactgcactccagcctgagcaacagagtgagatcccatctcagataaataaataaagcaggctaaataagggtccactatccagaacatacacattaaaagaaccttacaacttatcaacaaaaagacaactccaataaaaaatgagcaaagaacttaaacagccaaagatacataaattgccaacaagcacatgaaaagctgctcaaaagcatcagtagtcagggaaatgttaatcaaaaccacaatgagatgctacatcatactcactaggaaggctagatttaaaaaaaaaagaaaaagaaaagcaaatgttggtgaggatacggagaaactggaaccctcattaagcacagaattactacataacccagcagatctactcttaggtattataccccgaagaacagaaaaaaggcactcaaacaaatgcatgtacacacatgttcacagcggcattcattcataacagccaaaaagtagaaacaattcaaacgttcaactgatgaatggataaaccattgtgataccgccatacaatggaatattattcagccataacaacgaatgaagtactgatacgtgctgcaaggtggatgaacctgatacattatgctaggtgaaggaagccagacacaaaaggtcgtgtgtatgattccatttacatgaaatgcccagaataggtaaatccatagagacagaaagcggactggtggttgccaaggcctgggagggagaggaggattggccgtaagtgcttcatggagttggctgtccttcggcgaaatattttggaaatagcagaatggtgcttgcacaacattgtaaatttactaaacgccactgaattgttcaccttaaaatggtcaatattacgttatgtgaatttcactttaattacaaaaagagaaacgctagcgtttacgcaggcggagggcaggctggactggggacgctcctcccggccgcctcgttgctggcagcgcttccgcccgccggcgcaccagtcagtaccgcgcccggcgaatgtggagggcgaagctgcggcagggcaatcacaaaagggctgtcagagaggaggcgaggcgggaggaagatggagaggcgggtgggagcctcacctttggactctatcgccacagcccggtctagccgctacgcccgagctcaagtctgactcgaaactccgctgggtgcctgagaggacccggcaggccaaggggtggaactgagggggcggggacgcggcgggcgggtggggccgcctcccggctgggcacgcctccaagccagactggacgcgaaggaaaccggaacctgtctgcctacggtgcctgtttccggaagcagcttgagtccggacaccaacgacggggacgctgggaagccgacttccggcgccctattttctcacctggttcccgcggcgagccagcggcagcggcggcggcgatgagacagaagcactaccttgaggctgcagcgcggggactgcacgacagctgcccgggccaagcccgctacctcctgtaagaggactggaggggaagcgggaggcgagcgggtaggtgttcctttgctcctcacaagtctctttctcttttacagctgggcctacactt

SEQ ID NO: 19741 - DNA, 2300 bp, Homo sapien
taagaacattttccaaatatgtggcagtaatgatttttgaaaaatacaattctccaagaactaagaaaccgaattccatactcacttcaatattctatctcttctttctttccctttaaccattcaattttatgacaaagcaaaatgcacctacctgaccaacactggtaaactcctaaatatgacaattttcaatccaagtaattgctaattatagtcttaggccagacataagctgtcataatgtccagtgcccggcacagtgatagacaataagcaggcacttgaacagttgataaatgttaacataaaatatgcagggatataaagtgtatttgctactggcctccatatagtaaaccgtacgtaatctgattttggttgttttattccatcttatatccccaatattaaatgttgcttggcatatgatagaccctcaataaaatgttgaaagaacaaaagatgcattcacctttgttgggcatacctgtaaatccactctgacatggagtgggaggacagctgaagaagtgacatgatacctacatacataacatagtactatctgaagcaaaggagcattaactgaaaaaataatgtagtggtaactgcaatttaggtggagccataacggtcagttcaagaaatccgcacatttgtgaaaaataatgctcaacaatgggatctcaaaacaattgagagctcaccatgtttggtttaggtaatcatgaaaaataaaagtaagctgtccttataatgaaacactaatcattagagaagtgtttatgtatatattttgataatccaaatatactactataaatctctgagttatactgaggctgattcttaaactgattttaagtgaaagaaaagaaaattctagtttactcatacatactggaactgaaatcttaccaatacacttttggagtctttgaactttttcaccatttttgcttctttaaaactgagtgtatagtttctcgcttctcgattaagaagtttctgtattttgggtgtcaacctggctttgggtttgagacgcactcgagagttatccagaaccaacagctggaaacagtatggacacgtttcttcaaaagtgctcttatcatctaaaattatacaaatgaaactcacaattcagcaaatcagaatattttgttacctcaaactgtcaacatttataaaaagtatattgaaatttaatataagcagatacacattaagtaaactcaaaatatgaaaatttacaaaaagataaattggcagtaatttaccttgcaaaatactacaattccatccattcactcctttcagcaacagataggcaaatctccaacctatgctagcaaatcctgtaggctttaaaatatatcctaaatctagccacttctcattacttgctactaagttttaaaaggctgttatgtttcaccaattttaccaatgcatttaccacaaaataacaaattgcactgcgattttgtttctttttttaaataattagcacaatgaatagtatctactgttgagcactgtgctaagtgccagggatgcaacagcacttataaagctaaagaccacacttaaacttagctctgccaaatgtgaaactcattcatattcactaagtgacaattaagaatgccaggcactgttctaagtgctggagacacagcagtgaacaaaggacaattcaccgaggcatacaataaatataacaacgtcaaatgttaagtgctgggaataaaaaagtaagataggaggggggaatagaagtattgatggagttactgtaattttaaataggtggctagggaaagcttcattgagtgatattatagagaccagagggaaatggaggattcacatgaaagcagatatgtgaggcaagaatcccaggcagagtgaagagtacctgcaaaggccctgaaacagaaaagcaaggagacctagtgtgactggagttgcgtgaaggaaagagtacgtcagagaggtatgcaggtctatgacacagggccttacaatccttttaaaggactttcacttttattaatccaggagagagctggtgatggcctggagcagggtagtagcaatggatgtggtgaggagtggagtgcaatggcgccatctccgctcactgcaacctccacctcccgggttcaagagattctcatgcctcaccctctcgagtagctgggattacaggcgtgcaccaccatgccaggtaatttttttgtatttttagtagagacagcgtttcgccatgttggccaggttggtctcga

SEQ ID NO: 19742 - DNA, 2300 bp, Homo sapien
ttccaggttcaaacaattctcctgcctcagcctcccgagtagatgggattataggtgcccaccaccatgcccagctaatttttgtactttttgtagagatgggatttcaccatgttggccaggctggtctcgaactcctgacctggtgatctacccacctcggcctcccaaagtgctgggattacaggcttgagccaccgtgccctgcccttccttttcattttttgagacagggtcttgctctgttgctcaggctggagtgcagtggcacaatcatgactcacggcaacctctgcctctcaggttcaggtgatcctcctacctcagcttcctgggaccataggcgcataccaccatgcccagctaatttttaaatttttagtaaagacagggactcactatgttacccaggttggtgtctaactcctgggctcaagcaatcctcccacctcggcctcccagagtgctgggattatagacatgagccacacatctggccgcaaagttcttgaacgatgcttgtcaaaagatagtttaggaattcctatggtttcttatgtatctttctggaagtttcttgtattaatatttagggccaggcatggtggcttacaactgtattcccagcactttgggaggccgacacagaggaggattgcttgagcccagaggtcgagactgcagtgaacatgactgaaccacatactccagcctgggcaacagagtaagacccggtctcaaaaaaaattttagaatatgatggtgtatgcattagattaacaatgagatttctgtaattaatttttaactatataagtaatatattcacgtattctttttgtaaaaatgaaaacaatatggacacaatttaagggctccaattctgatcctctccctgagaccagtattcatgtggtgtgtattcctccaaacctttgccatgagtttacgtacttgtgaacccatatgaactacatacctttaaacaagaagtggtatactatacttttgcttctgtaattaaaaaaaaatccagctgggcatggtggctcacacctgtaatcccagcattttgggaggccaaggtgggaggaatgcttgagcccaggaattcgaggttgcagtaagctgtgatcatggcactgaactccagtctgggtgagagtgaggccctctctcaaaaagaacctcataaaaacccactcaaacccttccaaatccaccatatcttggattaatccatattttaaactgctgcatgtattatggaatatagacgtatctgtgtagactgcaacagtgaatgttccaatttttcactgttactgtgttggactgaacacctagaataagcttcctggtgcaaacatgctggtgttttttccagcactgacagcaattagtgaaattgctaggaaagagtattcttataatttttaaatttttattcatttttcatttttgtgggtacatagtaggtgtatatatttatggagtacataagatattttggtacaggcatggcaatgcctaataatcgcattatgcaaagttgggtatccatccctttaagcatttatcctttgtgttacaaacaatccaattatccttttagttattttaaaatgtacaattaaattattactgactctagtcccctgtcatgctatcaaatactaggtcctatttatatttagtccttctattagtccttctatttagccctcccccactacccttcccagcctctggtcaccatcctatactctatttaggaaggtgtatttttaaccgtaattggtcatgcaaatagtctttaaagtgcctgccccaatttataccagtttacatgcctatgtagagatctgtaatcactgcttctttgacagagtttccattaaggagggttcaggcctggcaaactcccaccatgcctctgagagtaacccaggcatcacgcccctgtccgcctcccctgcacttgtttcgactccgccccttccgcctggcggttccacttctcggccgcgcgttttcccagggcttgcagcgggaggggcggggcgtgggtccctgtgacgtcactgccggccggacgccatcttgctggtttgcggccggtcttggatgaagcggcggccgtggtgagagcgtggggaagggtggggtgagggggcgaggccgcagctagggcggcgaaactctcctcccctcggccccaccgcgtgggacggcgtgaacgtggtgtcggagggatgtcagccttctctgaggcggcgctggagaagaagctgtcggag

SEQ ID NO: 19743 - DNA, 2300 bp, Homo sapien
aagggtgttagccctgccctttaaaaaaaaatcccagaaaataaaatttcaattatgacttctctgggttcatcctacaagaaggtgtcaggatcacctgaaatttgggatttttatatcatgtcacactgcttgggaagaggtcttgggttcatttatgctgcttagaaacctaatactgatgcattcttattgataagtgaagctaggataggctctgctatagcgtagggtctcattgctcaaaagtaatgaggaaggaatcactgctttgttttctgaggacattattgaattcctggtttcttcctcttcttttctttcttttccttttttcttaaaaaaaaaaaattcttttatcatttagctcttatgggagtctgaaagctcagttcctaagtgagctacagttcatccttggtaaccatttttttttcctctttcaccccgacctgaagaatttcccattagagctatgctccttacctggagagttcttaagtaccagtcaggttgttcatttgagccaacaacagatttcttggttattgtgctattgccacagtaggtcctatttgcattgaatttgtgtgtttttagcttctctccttttacgtgttgctttatgctactctccaaaagtctttcttgtagagtttattagttgtataatttttctttgctctgttttgttttgtttgacagcctgggttggtggttttatagccatttccatcatcagtttcctgtctctgctgggggttatcttagtgcctctcatgaatcgggtgtttttcaaatttctcctgagtttccttgtggcactggccgttgggactttgagtggtgatgcttttttacaccttcttccacatgtaagtatagtaatttgtcctgttagtgtttgattattcaacattgaaaaaaaaatgttttggtttatgctagaattttttgtataaaatgttagaaatttggtttagaaaagcttattttaaaatatatttggtaagtgaaagctgtatttttctgctcgatcttaatacatttgtgaattttgctttccttttacaaaacacagactaatttaactttttgaaacccacttaataaaaagagacaaattctgcctggctattagtactgtgatagactgcagcaatgtgagttatctgctttatctgttagtgtaattgccaagaaataaaatatgtgaccctttatgtacccaagaaacttggaggttttcttcagagttgaatgtttatgtatgtatttaaagatttacacttcatgacacataaaacaagtttggtaaagtgaatttacttttccatcagatatttggaatagatgctcagttaaaaaatatgcgtgtttcattctttaaattcccattaaaggttttcaagtatgtgggaaaaggaaatcacaccatacctagagcactacaaatctcatgttccattcagtagttaaagaaaactatgttgctctgacaagctctcggaccaccagatggcagacattcgggaatacctactgatagaaagtggcgtgtgtatggggtgtactctgtgatcccccagtatcttagtgtgttccacacccgattccctaatgtgcaatagcagtagttactactccactcagttacaggctgctagggcagtgcacctggatctcgggtacatgccaggacccaacacacacacacactaggcttcttacaatgctagtgtgatgacattggtatgggcttttcagttgggaaaataagcagtagaaactgtgcacattaagtctagtattcctgttatttgtggccatggtaattcgtcaagcattgaaaatgctcactatttatatattatgggggtcactgggaatgtatctgaagtacatgacatgcattaagttctagatagctagctgctcattggtcattttatttttaatgtcctaaacttcacctcatctctgaagtatctgaataattgcataactgaatgatttcaattttgaccttacctagccaactttctgactcggtgtgtgaaactgatgaatttataaataacaaattattttgccttcagtctcatgcaagtcaccaccatagtcatagccatgaagaaccagcaatggaaatgaaaagaggaccacttttcagtcatctgtcttctcaaaacatagaagaaagtgcctattttgattccacgtggaagggtctaacagctctaggaggcctgtatttcatgtttcttgttgaacatgtcctcacattgatcaaacaattt

SEQ ID NO: 19744 - DNA, 2300 bp, Homo sapien
acgaggtctcactatgttgtccgggttggtcttgaactcctggcctcaagagatcctccacctccaattcccaaagtgctgggattacaggcgtgaccactacgcccagcctcaaataagtgtatactttaaatacacattgaatcttttttccgacttgacaatgaatcagacacattatgtccatacatagaattcttaaagtaaactgaacttcatgaaaaactcactgtagcatccttgtgttactacaaaccagtcaacatttaatcacaggctgttaatcatccacagtagtgtttggaaccaaaggcctgtgccccaaagaggaggaagcaattgagttggagcttgaaaagcagaattcagttaagcagagccagaattcagttaattcagatccagcaggatgtccagcaccaacggtggaggtgatggtggtcaaactcacatctccagcaaaagacgcagacgtcaagtttacaactaagcaagagcatggggctatccagctctaccacggtcagctgttctttggacagggctctcgcattcattaccttatctaaaataccggtaaaacctattttgcaaggcgaaggaggaaaacacatgaaggaatgtatattacaagtactcgttaaactcatgtgttgcacaagtgcgaggtatcatacagggaacagtgggaaatggaggtacggcgtagaacgaggctcctgaaagaggaatctttggggcttgaagtttcgggaattcttttactaggtaaaagataaacatttagaaatcattcccaggagagaggcgaggagcggggtgggaggggactagcacaggggacagctccgagcctttctccagggaggatgctgagcgcggtcgtggacccgttgaaggatctcctttcctgcaagttggtgtgtgctggaggaaaaaggaaagcagaagggaagggccttagagaaaaaggcgagtacagaaaacggaaaagagggcacaaagctctcttctaaaagctttttatttctaaacacgtcagtcccttcttcgaatatgggatgaaaagtacggatcttttcctcaaaaaatcctccgttgcaccccgaagcccatctgagcaccttaagaagtccggctctctagggtgagtgggcgcctgcggcgggctccccccagcatcctctttctgtagcccccctgcccggtccgcaggatccggttctccgcagaaccacccctaccccgccacgcctgtctggcctgaggagctcccctcccagccgccctgctcccggacctgaaagactcacgtctccgcggcctcgttgtcccacggcccggccacgcgcgcaggtttggttccacacgggcggtccagagggctcggaacgggcccactggtgtcttcgagaaatctctaccaggcgcgaacacgcggtggtttcattgggttggctgcccctcggtccgggggcagcgccgcgcagccacccggcagccgcgcccctagccttcgcgaagctggaagacaatcactaattaccgccgcgcgcagcgccgcggggaaccaccgcccccttcgcccaggactgcagggcatgcgcagtgcgaccccggaacccggctccgcagacggatccgcttttccgtgtgttcgccgacgccgcgggggcgtggcgcggccctagcgcattgtaagcagttgggggtcatttcctcgaggccctactcgctagccagcgcccccggggccagccctggctgctgctgggagccgggtcgtaaggggcagcgagatgtttctgacgctgccccaggcacatgagccccgggtccttcgggagggtcccgagccactcgggtcggatttcgctcttgagacaaaggcctggctcgttcgcggagcggggccacggtccaagagcagagctagcaaagcggcggccttgcacaggggttccagcctgcggtgggaacggagagtctcaggggggcggggctgcctccgtctggccctcggctggctgcgaaacgtggactgggtgatgcctcaggagaaaccaccctagtagttccgctccgagggcggaagtgcgcgtctcttgtttgtgcggctgaccagttggcgacatggtggcacccgtgctggagacttctcacgtgttttgctgcccaaaccgggtgcggggagtcctgaactggagctctgggcccagaggacttctggcctttggcacgtcctgctccgtggtgctctatgaccccctggtaagagaggtcgctggacggccgaccct

SEQ ID NO: 19745 - DNA, 2300 bp, Homo sapien
cctttaaagtttacccttgttttttgcactttctcttgccattcaagaatgcaaataacaagaaacaaaaaccaggaagaggcaagcaagctcaagatggggtaatgtggttacaaatatttcatatatatatttgaatctccaaagggtgtgagaataatgtttttttgagatagggtctggctctgttgcccaggctggagtccagtggtgcgacccccgtccactgcagcctcaaacttctgagctcaagcgatcctcccacctctacctcccgagtagctgggactacaggcgcacgccaccacaaccagctatttttttttttaaactttttgtagagactggggtctcgctctgttgcctaaactggtctccaactcctggactcaagcgatgctcccacctctgcctcccaaagtgccgggattacagacatgagacacgctcctggccaataatgaaatttttaaccaaattaataaagccgtatgaacagaaatacatatagccatctcctgcgttgtatttgaattttcaacattttactttttacactgagcctccttttgagatgcaagactaactgtatagaccaacttagccattgggaatggagttataatgaattccggggagcatgcaaaaactattcacttgagaaatatggtgaggaaagcaccaagaaaataaccaactgactgggtgaagtcgagggaagtcccgccttataatcagtgcttaggatccccatcccctatgacctttcccccaaactgacactttctctaaaatgtccattcccgtagctaaaacacaggtaacatttccttgaaattcaatacaacaaaagttcattaaccaaaactgaaggaaatactgaaatgagattgcacctgtgggatgatggttttaatctacatataaatttcaattgttttaaaacccaaattgattaacggtactacagttcccaaggaaggcttcaggtaagatgcttatcattcgggtttctgcgtgggactaacaggttactagcagctcatgggcagcaatgaccctaggatgacgccacgcgtgagacggcaaagggtgaggggtgaggagcgagtccggcaggtccactggagactccgagcccaaaccccgctcccctgagccgacccgactcgcctcctaggtctggggcggcaactaacagcgcgcccggagcacgtccacaggttcaacccgaaaagcacaagggtcggccgtccagcgacctctcttaccagggggtcatagagcaccacggagcaggacgtgccaaaggccagaagtcctctgggcccagagctccagttcaggactccccgcacccggtttgggcagcaaaacacgtgagaagtctccagcacgggtgccaccatgtcgccaactggtcagccgcacaaacaagagacgcgcacttccgccctcggagcggaactactagggtggtttctcctgaggcatcacccagtccacgtttcgcagccagccgagggccagacggaggcagccccgcccccctgagactctccgttcccaccgcaggctggaacccctgtgcaaggccgccgctttgctagctctgctcttggaccgtggccccgctccgcgaacgagccaggcctttgtctcaagagcgaaatccgacccgagtggctcgggaccctcccgaaggacccggggctcatgtgcctggggcagcgtcagaaacatctcgctgccccttacgacccggctcccagcagcagccagggctggccccgggggcgctggctagcgagtagggcctcgaggaaatgacccccaactgcttacaatgcgctagggccgcgccacgcccccgcggcgtcggcgaacacacggaaaagcggatccgtctgcggagccgggttccggggtcgcactgcgcatgccctgcagtcctgggcgaagggggcggtggttccccgcggcgctgcgcgcggcggtaattagtgattgtcttccagcttcgcgaaggctaggggcgcggctgccgggtggctgcgcggcgctgcccccggaccgaggggcagccaacccaatgaaaccaccgcgtgttcgcgcctggtagagatttctcgaagacaccagtgggcccgttccgagccctctggaccgcccgtgtggaaccaaacctgcgcgcgtggccgggccgtgggacaacgaggccgcggagacgtgagtctttcaggtccgggagcagggcggctgggaggggagctcctcaggccagacaggcgtggcggggt

SEQ ID NO: 19746 - DNA, 2300 bp, Homo sapien
tttaacaggacaaagtactttttaggctcaacacttctttgtcaatatgctaaaattcactagctcagccaccaggttatcatttaaaatctgatggaatacatggaaacaaatccattcaactgctgcaaaaagatgggattctacagctgaatcagaatttcatttcagtgtgttaagtacatcaaagcatgagtataatcatcttaaaagcagatcttgtcctgtgatatagcggcaagtttgtccttgcagactttaccaagatgcttcctctgccgtaaacatctcaggaccgtgggttgactggcaaagagtgtgccttgctaattttacgacggagttgattttaaaagggtgtcaccctggctctcccgggctcctgcttccctgacaactccacccctatggccgcccctcttagggtcctcccagtgcccagccatggcggaacggtgccgcaatgccgcaaggctccgcgctcacggcgctggatgaggagacgctgtgggagatgatggagagcctgctgtggtctctcccattctacagtcggtccttgcctcatggtccctttaaagtttacccttgttttttgcactttctcttgccattcaagaatgcaaataacaagaaacaaaaaccaggaagaggcaagcaagctcaagatggggtaatgtggttacaaatatttcatatatatatttgaatctccaaagggtgtgagaataatgtttttttgagatagggtctggctctgttgcccaggctggagtccagtggtgcgacccccgtccactgcagcctcaaacttctgagctcaagcgatcctcccacctctacctcccgagtagctgggactacaggcgcacgccaccacaaccagctatttttttttttaaactttttgtagagactggggtctcgctctgttgcctaaactggtctccaactcctggactcaagcgatgctcccacctctgcctcccaaagtgccgggattacagacatgagacacgctcctggccaataatgaaatttttaaccaaattaataaagccgtatgaacagaaatacatatagccatctcctgcgttgtatttgaattttcaacattttactttttacactgagcctccttttgagatgcaagactaactgtatagaccaacttagccattgggaatggagttataatgaattccggggagcatgcaaaaactattcacttgagaaatatggtgaggaaagcaccaagaaaataaccaactgactgggtgaagtcgagggaagtcccgccttataatcagtgcttaggatccccatcccctatgacctttcccccaaactgacactttctctaaaatgtccattcccgtagctaaaacacaggtaacatttccttgaaattcaatacaacaaaagttcattaaccaaaactgaaggaaatactgaaatgagattgcacctgtgggatgatggttttaatctacatataaatttcaattgttttaaaacccaaattgattaacggtactacagttcccaaggaaggcttcaggtaagatgcttatcattcgggtttctgcgtgggactaacaggttactagcagctcatgggcagcaatgaccctaggatgacgccacgcgtgagacggcaaagggtgaggggtgaggagcgagtccggcaggtccactggagactccgagcccaaaccccgctcccctgagccgacccgactcgcctcctaggtctggggcggcaactaacagcgcgcccggagcacgtccacaggttcaacccgaaaagcacaagggtcggccgtccagcgacctctcttaccagggggtcatagagcaccacggagcaggacgtgccaaaggccagaagtcctctgggcccagagctccagttcaggactccccgcacccggtttgggcagcaaaacacgtgagaagtctccagcacgggtgccaccatgtcgccaactggtcagccgcacaaacaagagacgcgcacttccgccctcggagcggaactactagggtggtttctcctgaggcatcacccagtccacgtttcgcagccagccgagggccagacggaggcagccccgcccccctgagactctccgttcccaccgcaggctggaacccctgtgcaaggccgccgctttgctagctctgctcttggaccgtggccccgctccgcgaacgagccaggcctttgtctcaagagcgaaatccgacccgagtggctcgggaccctcccgaaggacccggggctcatgtgcctgggg

SEQ ID NO: 19747 - DNA, 2300 bp, Homo sapien
tcaggatctcttcagttctaggaattgaaatggggttttacgattccatgagaggcttagtcccagttgtacacttagttctgtgtcctaagatacagggatcctgtagagtagcgagctgcttgctctcgtttgggttttgctcccatactaagtgttgggataggtatgtaggaatgcctcttactgttcttttccatgttagtttttctttgtttctgagataaagcatactgtttcttgtgtcccaggtagccatttttgatggttttaaattcttactattcatgtttgtgtctagtttcagcttctgtgttaaagtctaagttgtacagaacactcttagcaaatgagcatgtgccagttttgatggttagcatatattttcacatgtaataatttgattgatataaattgcaaaatctaagcagatattgccttttcaaatgacactcatacgaagttttaaaatactcagttagttaggtatgtttaatgaaaatactatgactaatgctgtaactgttcccttctgggaagcatctgtgtttatatgagcatcatcaggggatgtgcctgtgagattatcttggaagtagagctctgggccttccattttcagctcactgcatttcctgtcagaccctgaaacccattgaaatgttatggttcgatgaggtccctttatggatgagaggatgcccgactttatggattgcatgggagttggaggcctggtagggcttgtctgttggagagtgattgcttagcattgcattgttggttcaggaagtgaaagtacgggtagacatccacacaagatggtctttaaactgtttctcagcatttatgagcgtgacttttttgtagtgcctgaagtaacagtaacttttagttttaaaattagcaaataaaactttagcatttataacttagatattatattttctattctagcaagatagtgatcttccagaaggagccactgtccctgcattgggattatcaaataaagctgtctttcagggtaaggcttttgtcttcaaaattattaaacccatagtggtacttaaaccccagtcatacacttgtgtaatgtctacctaatgtttgttacagctgattttttttttaaatcacagtatatcttttctatcacctatttcgtgataagtactctttgtacacactcagaccactgaagtagatgcagttttcacaaagcatgttttttcccttttttttttttttttgagacagagtcttgctctgtcacccaggctggagtgcagtggcgcgatctcagctcactgcaacctctgcctcctggcttcaagcaattctcctgcctcagcctcccaaatagctgggactacaggcatgtgctaccatgcccagctaatttttgtatttttagtagagacagggtttcaccatgttggccagagtggtctggaactcctgacctcaggtgatccacctgccttggcctcccaaactgctgttattacaggtgtgagccaccacgccctgccacaaagtatgtgttttggtgttagaactacagatgagaatgtgggtaacctgaagagttggttgtgtagttttaaaagtttggagactgttagatcaaagaaaatggaaagaacctttatggagttgattaatgctgccaggagcatgtttggaaaatactggagtaatggaaatactcttgcctttggaatcacatggacacagctgtgaattgcaccactttgaattaccactgctttctatgtggtggccttaatattgagacaagtgaaggagatataaaaatagtgactatattcttgatgtgtttcttcaaactaggagatatagcttctcagccttctgatgaagaggagctgttaactagtactggttttgagtatcagcaggtggcctttcagccctccatacttactggtaagatgtgacaaagacaatttaataaatcgctagaacacacagtatgttatctattgctgctgacctaaataagtgctatagaattcacttttacatagaaaaaaatagcttcaatttattctagagcctcccactgaggatcatcttctgcagaatactttgtggcctgaagttcaaaaactgtaagttaaactgtatttagctctttggtctgattctgtcgtaacttctgacttttcctccccaccccacaatctgatgtctcctttttcttccttctacctacctttttcctcctcttctatatatctcttagtggctcttcataaggaatgagaattaaa

SEQ ID NO: 19748 - DNA, 2300 bp, Homo sapien
caccaggaagcagggctttaaaaggatgggtgaggagtgacacactgaacagctgctgggaggaccaactcacccctctcaacttagatggggaaactgaggccctgggaaccacggtggctcacaccagagagttagcaaaacacacttccctgcctgggctctggagactgacttcccaggtgctagcttgtcttctagctgtgtgcccgtgtgcaagttattctgcctctctctgcctcagcttccccatctgtaagagccacctcctagatctgcatatttaatcattgaacgaccaggacaggtaagagtgtacacagtgcagtgcctggcacacagtgaggccctgtaactagctcttgttattagtgctgcccaaagccacattcacagaagacagtccagtatccaaagtgcctgcttgaagcatggccagaaggcaagcagatggtggggtgggcagtgatgtcaatgagcaaatgcctgcatccatccatcagtacattaactcctcctcgaacaactatgggtgtttgtcgagtaaggtcctggacattcagcagtgagggagagagcgggggtggtcagtgggcagaggccactgaggaatatgggtacctgggcatggaccctagcgctgcagtccacagacccctgggtctccggccagggggaaatgagctcttagtggcgggtctttctctggcctggtatcaggggcctgggcgggagagccagggctgcgtgctgccttcccatggctctcacgctgggcaccggtatgcatcatgcatcagcaaggatcctagggcatctgcggcccataccctgggtggcagctggcctggatgcagcacaggttgagctcttggggcataggcctccttcccaccttgtccccccgctgtatgcctccagggcctgtgggccgcctgcacctggtcgccggccttgggttctccaccgagcctgcctctgagttatctcccctgagccccagcacctgccgcccatccgcactgtccaccatccctgacattcgattcccccacgaggcacctcgcctgtgcgtgcagtacctgttttgcttccaccccattcccagcagcgggttccgcacctgggatcgcacgtgagatttccccccaccccccaaccgcatgcctgggctctactacctgcacctgccgccccacccctgcatcccgctccgcacttcccgcgcataggtttggccaggccctccctattgaggcacctgttctccaagacagagccgctgtgtcccaggtgctctgggtgcaggcgcgagtggggattgaaggaggcgctcttattccactctgtccgggacaggggcggctttgtcctagggcactcttgctttaatagagagggcccggccacacccacgtgcgggaagtgcggggcgggatgcagggttggggaggcaagggcaggaagtagggcccaggacgcggttgggagggcggggaagctcagctcacttggatcccagctgcagggcccgctccgggggaagcccccgagcttcccggttccgaaagtgtgcagccactgagaatttattagcctcgtggatccctaatctttccccttttctaccctttggtcagccgcattctaacaaacggcaagcacacgccccgctgggtagcagcaacccgagaacgcccccacccccgcccccgccagacgccggttcccgcttgagagggtgagggtcccgagacccctgcgaggaggagggtcgcggggttccaggatgccgatgccaagcaggaaagatcacctcgttgcttcttccaccggcctctccgcgagacatagctaaacttgaacttggcattccaagggtctggaaacatcttcgtgggacccatcgagaggttgtttaaagactggcacccgctcccgcgcccaggtggggaaagggctggccagaagtgaaagtccggtcggggcgccacacctaggctgcggattccgagagactgggaggctggaggcctgggaggcgtggcgggggcggagtcgccgggggccggcttcgcgcacttcccgggcccggccggcctggatggactagccggggccatggccggcgcggcggcggagtcagggcgggagctgtggaccttcgcgggttcccgggacccgagcgcaccgcggctagcctacggctacggcccgggcagcctgcgcgagctgcgggcgcgcgagttcagccgcctggcaggtgaggcgggcgggcaggcttgggggacacgaggttt

SEQ ID NO: 19749 - DNA, 2300 bp, Homo sapien
ttctcaaattggcagaaaaacttcatgaggggagaggaggaacgaggaagaggtgatgttattttggtttgttttttcccgccctctctctgtcttgtttctaggagaaaaacaagtggacatgttccaagactcccagcagtgggaggggcgtcagattagtgcacaaatgtctgctttaaccgtaatgtagaggaaatacaaggaacttgcattaaataaaagatgcccacaacactaccagacatacagtaagtggtaacgagttctgagggccagcctggctgacacatcccaattttgcatttgaggggaaaagtactgttctctgagggacaagagtgaaaccaggaggggaccagaacatagctctactttcccagggtagcattgaggggagaggttggccaatagtgggcgtgagagatcacagctggaggagatttaggggattaaggaggtgcggtgctgatataattactcaggtagccttgaagagttgcttcaaagaatggagagcctccctccccagcacctgtaggcattcatagtacccctctatttctgagtggtaggaaatttccataattaatagttgagagagagagagagagagagaatacgaaagaagggtgaggagctgtctccagcaggtgaccctgcgagagggaaggatgaggagtgaatagagaggttggcagaaggcacccccgtctccctcctgactctccctacttaggaagccagaggagacacacaggaggaggccacagttctcacagcccccaaagggaaaacacagttaccctccacaacaccaggaagtgacccgaagcgctgaaatcagctacccgagtagtgaaacctaagtcatggttgctgttctgcccccagaaggggagcagtcaccagttgttcatcgcgacagagcagatacactcaaaccccggtgccctgtgccaagacgtgcccacttcacctgcacaccctccttgaccatccggcacgcggccctggggcttgatgaagccctgcacccaaagtccctggcagagggatgagtcacgaacttgggccctggcagcagagggctgggtcggccaaggccagatggagcttgatttgcaatttcatcagcctgttccgctctgaggaaaggcacgatgtgatcttggtgttgtctaattcacaggctcgccctgttcttaaaggtgaaattgcactgtttgctaattcttctagtcccccagagaactggagctcagagggattgttctgacgctgtaagagtaaggaaaatgaggtttcgaaaatcaaagctgaatacaggctatcccagaggagtctgcagagcgcagcctcgggaggccccggccaagaggccttggcctcccggtcccaacctggcgcgccgtcagaggtgctgtcccagcccgggcgctggcggtccacgcaccgctcctacctcgggaggacatccgaagggtcacggccgctggacatgctgtcttttgcaaccccggccccagcaggccctttacagtgaggggtctcccgcaagagagggcaagaaccatcctaagccccgctcgcggagggcgggaaaaggggaagacggctaggttggtcctgcccaccggaaagtcggaagagtaagagtagcaagaagccttggggctgcaggtgggacctcagggagccgtgtctactaggaggacgcgtggacacgtccctcctggagtttcgattcaaaatgcgcccgaatgaggtagcgccgctctcactaggagcaaaagatccgtccacgtcggttccagaaacctcgtgtcccccaagcctgcccgcccgcctcacctgccaggcggctgaactcgcgcgcccgcagctcgcgcaggctgcccgggccgtagccgtaggctagccgcggtgcgctcgggtcccgggaacccgcgaaggtccacagctcccgccctgactccgccgccgcgccggccatggccccggctagtccatccaggccggccgggcccgggaagtgcgcgaagccggcccccggcgactccgcccccgccacgcctcccaggcctccagcctcccagtctctcggaatccgcagcctaggtgtggcgccccgaccggactttcacttctggccagccctttccccacctgggcgcgggagcgggtgccagtctttaaacaacctctcgatgggtcccacgaagatgtttccagacccttggaatgccaagttcaagtttagctatgtctcgcggagaggccggtggaagaagcaacga

SEQ ID NO: 19750 - DNA, 2300 bp, Homo sapien
gaggctgcacttttcacccacatttgtacaaatcatgaggaattggcccaatcccctagcctggggcctggaacatgagggtgtccaacagatgttatcacaagaactaacagatcggagagcatgtcaagtcctccaaagggtcctgagtggttcacttgcattgatggttaacattgagcagacttacctactcttcattttggaccttccatccttattcaggagaatttgacaaaattaacttgcatcattctttctcaaggaaaatgcagagttctgccactgtcttccccaaaaggcttttacatcaggcagcaaacaggaaatgggcctgatggtggtcacaagctgagagtaggaagaaagtccttctgcaggaagttcagggcatgtgggacagagatgtgcccagcaagaaagaggtgtggggtgaccacagggaaaggatgccttagaatgagaatctttggggtctaaagttaggattctcttaatgttccagtgcattctactgtgtaacagataggagatatcaagtctcagtatatgtctttaaaaatctgacttgattttagttaaacattaatatttacaaagttattttaattgctaaaataatctagccttttttgttgttgttgctgttttgttcacaggtgaactttggcatgtacctgatgcatgcatcattggatttatcctccccatgtttcctgtctgtaggatctcaggtgctccctgtgttgaaagagaatgtggaaggtcatgatttacctgcatctgagaaacaccaggatgttacctcctaaaaaaaatttttagcataaagtttctcttttacagtgatctctattattgttaagatctgcaacttggttcagtagaacttgatgttttgaataaggagagctctttttctttagaggcagggaatgctctcacctgcttccttctgcctttgacttctcaccctgcaaatttgcactggctgtgctcaggagagcacttctgaggcctcaggaacgaatgctgcacccacatccagtgaggctcctgtaggtatttgaagtataatcacttgtaatcagatgaaatttttaatgaagttcactgggaagattgaacttactgcgggtccctattttgccattttctcacattgttactttgtttttagagagcatctttggatctctccaacccgtttgtagtgaggaagggagtctatgcccagtgatcctgggtatgagaaggtgctcctctcctcccatgtacatgatggtgtgggtttatgctcaggggcccagagggtaacttgtgaccacattccttgaggggagtttctaccagaatatttatattctgagcaaaggcacaggccagcaattcctttcctgttgcttcccatccctggcctccgtcctcatcccccactgagttgatgcactgaggatggctcacgagcctgaagttacactcagtgatggctgtgcttatgcaggttgtcatcctcccctccacaagcccacaggatggtgttggtccatcacccgagagcctccaaatcctatcgagggaggaactttggcattcaggaatcctgtctgtatcatctttgaccactgctcctgcagcctccagatgaaaatgtccagtgaggaaatctcattctctaatgaagttacccatcccgctgagtttctaagaagtttctccctgtgcggagcttgtgtgtgccttatctgcttctgcatgacttccagcctggggtcttaccctgtcctctggagcaatgcagagtgagtacatccactccacattcattctgctggcgtccttctgaagcctgctgtccatgtgtgaacccagtcccttcatcatcttccccctggatggttgtatttttccagtcacttctcccccaaatgtctgcctgctgcagcccactgcatcttttgaaagcctgtgccaccccatctctcctgctgctcagttggagagcaggctccaggctcaggcttccctaatgtatctgttcagagcctgtgggattcagggtcagtttgtttcattatcacatttgtaggactttgtgttgttcccagcactaggtgagatttgaaagatgaggtgtgctctgttctcaaggattgttgagatggagcctaatgattgcacactcacgtgctgtgaagagttaagggtaaaaagtacaactctgactctggttcctgagatcaccgaaagaagaggcaaatgaagttaggtggggtggggtggggtttattgttttgaac

SEQ ID NO: 19751 - DNA, 2300 bp, Homo sapien
aagtcattctggagaaattatttaccttattgactaatttctgagtcgaggaaaggggcagaagcttgcagcagcatcagtggagtaagaggctgaggggctttggggtggaagtggggcactgagtggtcccactagcagcaggcacttggtagatggggcagaagcaagccaggtacccaaaggacaggtgggactgaaggaggggtgtggagaggaggcccctgagaggatgggctgggatccgggttggaaaagtgataggaaatgaggtggccaggactggagggctctctcagtgaggagggaggtggacgtgaaggtggaagtgcaggcggcccatctcagaggggaagaattcgtgcgtttagtattctggctgtgaggagatgcggaagttggtggagatccagtctagatcaggggtccctaaccccgcggccgcagaccggtactggtccgtagcctgttaggaaccgggccacacagcaggtgagcggccagtgagcgagcattaccgcctgagctccgcctcctgtcagatcagcggaggcattagattctcatgccagagagagccctattctgaactgcgcatgcgagggatctaggtagcgcgctcgtatgagaatctaattcttgatgatctgaggtggaacagtttcattctgaaaccatctgcccttcctcccccaaacgccccccacccccaccccaccactgtccgtggaaaaatcgtcttccacaaaaccggtccctggtgccaaaaagattggggacggctaatctagaggattcattcaaagagttaaataacaaagaaagtagagctagaagttcgtctggaaggagcggaagtgtcgtggaattattattttaagatcaggcataagtgtgtatgtgtggcagggagggagatcacggagagggagaggttaaagatgtgggtgaggctgctaaatagggataagggtttcttttcccttgaaaccagaggaaagggagatagacgcgttatagagtcgccttgaaaacactcggatgttaagagagactgggtgttatgagggcgatctatataaggggggaggaaccaggaacttggctgtggcctgggaatagggagaaccgtgaatttttcttgaaaacgaagggggtcgcccgtgagcagcgaggagagcggtgggaggcagcgccgagtcttgccgctcccgcctggcaggggcgggcaggacgcaaaccttccttcccagtccctcggttaccagggcatccccggctctctgcaattcgggaaccttgccagaagggctcccacctccccaagcccccgcggccccacaaggtccaattagggctttcggcggcctaactggggagaggccgtggtgatgcagaggtttaaccagcatccgccgggagccccggggtccaggcccggcgctggagtcccgcagcgaagcctcgcagcccccacgcctctcgactctaggcttgtgccctaaaagcggcctgggttccctggcgcaccctcctctttcttagcttctttgtccctaagggaaacctccccgtacccttaggtggggctcccggtcactgccaccacccctcttgctgccgaagccggctccctggccacctggtgccctgccggggtattccaaatctgggcagcagaagccggccgccgccgccttcatctggaaaggcttaagccttctccgggtggggaagaagtcagaaggccgcctgtctccccgtcccccaaccccccaactccccaactcggtcctccaggctccgaggggtgcagctcggccctgggccgcggggcgcacgtgcagcagagtccggccgcccggcctccccgccccgcctccgccgccggcctttggcgcagggctgcggatgccgcgcgagccgtctcctttgcactttcccggctgcggtccggtcgttcggggcagcccggccgggggtagaggacccggaggaggggaggagccggagggagaggggaaggagggggcccgccggccccgcccccgccccgccccccgcggccggagcccgggctgcagcccggcgcgcctgagcctgcgagtccgcgagccagcgagctgcggctgcggcctcccctgcgcgcagctacccgggcgtcccggcccgcggccccgctaaccccggggcccgcgcccccgcggcagggatgcatcatggccacgctggcttgccgggtgcagttcttggacgacacggaccctttcaacagcaccaacttccccgagcccagccgg

SEQ ID NO: 19752 - DNA, 2300 bp, Homo sapien
agcacattgccaatttggaagatttttttccacattaattatcaataaatttctccttcctgagtgccttatctacatatgtgcataaatttcagttctgaatgatttttataaacactgtctcgcctgtccagtgttttttccaagtgcctttgccagacagtcaattctctggtatattaatattagtgattagcttgagtggtttcttgagagcttgttctcactttttcaccatgaagtcatgtgtgaatctagttttagttaaagtaataaacatttgttacatgcttggaaaaactttctgactagacatgagctcatctaaatgttcacttttcacatatgctggtggaaaaggatatggagggagagagaattattttttatttcctttatacatatgagtgtaaagtaattttccaaaaactcatgatattgtcccattttctttcttccaaagccatgattatcttgaagtctgagttaacacagctgtctttcattacgttcagggcgcagacatcactcacccacccttccccccaggtcagctctgaccctgaagagctctttcctggttcaaagggagcctttgctgagcctggccacatttacctggtcccccatccatataattgaaaaatgccataaaaatcaaaataaggggctgatttcatgtaggaacaggagaattatgccagttcatctacattattttttctcttttggagataagccatggttgctgacttttcctataataataacctttcattattccattgagctttctaccatttacatcactgaggttttttatttttgccctgttgtgatcatttaagatgaatgtttcagctttatcctagatgcgtttgagacaaggcactgtccaattgaggaaatctcccaatctcagttgaggaaaacaatggtggaaaaatccctctcagcttggtactatgaaaaaaatgactgggtttgggtctggctagttaaatgatcttgccaatgtttttttttttcttttcttttctttttgccactcctgagtcttagtgtctttatctgtaaagaaaagctaccattaaatcagtggttcttgaacaggcaacccttgaggatttcctggggaatttaatagagcctgggccccaccccagaaatttggattaaatccatctgggtaaggtcctgctttctggtccttcttaaagctctccagatgattctaatgtgaaggagtctggggtgagaaccgtctgagctcttcagaatcacctgcttctgagcttgagaaacagggcctcccgctagagattcctaatcaggagggccgtagtggggctaacaagttcctaggcaatgcccttgctgccagtctctgttggctgataggtctggagacttctgtctgagaaccaccggatgagatgacccctgaagtttcttccatgtcctgccttctgtgatcaggtctgcaagccagccaaggcggtcctttcgagggattgcgtggctgctccaggttaatgtccaaccctgcaccctgcttccatgcttgtcctacaggcagcacaactactggaggttggataaactgcttcctgtggttctcagcccttgcaagagccttttctgtaatctctgtcccaagggctatctttggaacacattagtggctttgagttcctcacctgatagtctttgctgcaatcaaatgtttcctgcagtagaaaaccagcaagcttctccgtggccagtcccttgggaccgtgggggagtagagcctggtgtttcttgaagaatgaaaaacaaggcactgtaaatatttctggcagtgaggagattcatttgccttatctttattagattgcccagaaggcagcaataactggtgtttggcaaaggacaatgttaggactggttgtaaaattcttttggcaacagttgatatgcttcatttgaatacagcagagcaatctgtagggtccattctggctttaaaggcttgtacatagttttagcagcacagctgggatggaaggtggacagggacagtatttgaagtatttttgttttctttcctgccaggatgacaaggatttggtgcatgaatttgtagtggctgaaggtctgacatgtttgatcaaggtgggagctgaggctgatcagaactatcagaactacatcttaaggggtaagtcatgactgggcatgcagcagctgccccagctgcaggggggatctgggttcaccttcaggaacttaactactgagagctttttaaaagactt

SEQ ID NO: 19753 - DNA, 2300 bp, Homo sapien
aaacaaaaaattaaaggaaaggccactcaatttcattgagtattctgtattaggtttcttggctccagcatttaaatagcttttgcttgctaaatatatagggtattctctgaattatctttttattgtttcccaaaatcaacttgctgaaaaggaactatgttggaaaacagttactatcttaaaacacttttctgttttcaaaagtttgaaaaaaatggcatatttaaacaacaaattcttaaacttgagattcatatgatttccttttaaaggggatgaatttgcaaattgccaaagatggtttacagtgtctgacttgctgggacacctgtatttgctaagagaaatgttatttaaaaaacacctaatatatttggaagcacaaaaaaaaatgacgaagggaaagtggggtgcattagctccctgtgagggtcatttttatgtatcaactcagctggaccaatgtccctaaatatgtggtcaaacattattccaaatatttctgtgggggtgtttttggatgagattacatttaagttagtaaatgtaaggaaagcaggttgccttccattatgtgggtgaaccacatccaatcagtcagaaggaattttgcaaaagacggtgctaagactgcaacaatgggtccttcctgagcgtccagcctgacagtcttcaactccaaatgtggtatcagttctttcctggatcttcagcctgccagcctaccctgcagatcttagacttgccagcctttataattgtgtaagccagtttcttaaatctatatatagtgtgtatatatacatattatatgtatgtcaatatactttatataaatatgtaagtatatattttatgtatatatgcatacatttcctatgggttctatttctcaggaaaatcttgactaatacattcccctttcagagagatccactagcagagaaatttttggtcaagaaatttaattgcatggtgttttccttgatggcctggttggaccatacgctgtcatatatgtccccttcttttgtccagaaaagacagtgctggacagtcaggaggaacagccaagaagaaaccctaatcagtccacctacgatgaacaaaatagaacattcttgaagtttcctgatgctaaaaaaccttttaaactcagctggcctgaggtcctgcagacccaggatccctgtcacccactggggatgtgaggtagaggagcaagccccgcgtactggcctcacactgaggcccagttgagctccaaaatgggacaaagtactgttttccctaaaacttgttctctttactcttcaaatcagcatttggtactactgccagtgccagtgctggtgctgagtgtttcaaaaacagttctacttcttaaaataaaaatgtttatggaaaaaagatcatatttctaatctctttcagttatttctgcggtagaagctaggaacttcgtatctgaacacccagattaattgtccttggagtggggcagacagtagagattgaatgtagctgtagcaagttaaatctccaaacaaaacatgtaagatggttttaacatcttatataggcttctggcacaaggtatgtgttcgttaaatatgtcacatgagtgagagcttcttggagtgctccctggagaggtggctgagtgtatgtgtttctcggcagtatcatcattgaatattagagcagctgcgggttagaaacgaaggcagggcttctgggcagactgcctggcaggagagatgctctctgcagagttagtgccgggagctggtgccacctccccacccgatctccctgaacatgtgtctcatgcagggccacacttggaccactcagagtggtcaagggtgaagagcacatgctgtttgcttgttctgtgttgactttcctttttacttcttgtttgttacctgtctaattgcctctggtctgtgggtaaatgctttattagttggggccaaagcccaggcattctccgggcctactgaatcaggctgcgtctccagggagctcacagtgtgaggtgcctgggcacgtgagtcactgggctgggtggctgcagactcccgtcacggcagtcggctccctcactgcctctggacttgccaaagttttgttgaggtggagaggtcgccacaggctgaaagcattaaggagaaccaccctggcatgcggagcagtcggtgtgctttggaggaaaacatacaaaccaggtgagtgtgtgtggacaagctggggcttggctgccagatgccgccctcccctttctggtggga

SEQ ID NO: 19754 - DNA, 2300 bp, Homo sapien
caggagaagcagtttaggttggggagagcagggttggagaaggtggtattttatggatggcatttaatgccttgaaactagatgagactgaaagagtgcagatggagagaagaggtccaaggacatttaaaggttaatgataaggaggaagcagcaacggagactgagaaggagtagccagatgtcctgggagccctgtgagggaggagggagtggttggctgtgtctagtgcaacacaaaagtcactggtacctgaaagcagcagctgagaagggtggtgggagcaatagctccctttgactgggtccaagagaaaagaaaaagagaaattggaggcagtgggcaaagcaactcttatgaggaaatgagaaaagttaaagttaggtgatagctagagggatgagtggggccaagggtggttttgcttttttaagacgggggaaattatatatgtgtatgtgtgtgtgtgtgtgtgtgtgtgtgtgtgtgtgtgtgtatgtgttaatgtgccagaaggaagactctagtgggaaggccatgggaaatacaggacagagaatttctggagtgggttactaatgcacaagtgggcagtcgacccctgctaagaggtatgtttatgaggcagttgcaggagggaagctgtgttctgagggtcaatgcaggtgggagagtagaggtggaagggaggctctggaagatgccttctggcttcatctgttaagtcactgaacttggaggcaaggttatctctgaggatgagacgggctaggaggttagagaagagagggctatggaaagtcaccttggagaggagtgggtgagattgccaggcagcattcagccccctggagactagggaccgtgataaggagtgaacctaaagagtgatcagtggcacagtttgtgtgtttttgaggcactttgagctgcactagtgcagatttagagtaggggagagaaacagaggtaatctttcaggctctctaatacctgctggggccagggagtggcttcttgcctccctatctcaagttagggcagaggctccttagttacctgtggctgagtaggtcctgacccgctgccttgggtgggcaggaaaaaggaggaagatttctcccatgagcccaggtaggagccaggagcagcgtcatgcctggaagagtcttgggtcctggtgtgggtctttgggactataaagcagcatctcttcttgcccaagagcgccttgtcagccacggctttgactgctcatgcagtgtcttctctgaagtcactcccatgtgtcaggctcacttattctcatcgattctctcatggaagtgaggcccccttgcccctttctcatttttctctcccatgtactttcaggtttgtggcccgcaggtgtccaggatgcaggtgtaaatggacagtgtggcgacatcctcaccaacaaacggttcatgcttgacatgctgtatgcccataacaggaagtctccggatgatgaggagaagggggatggggaggctgggaggacccagcaggaggcagaggcggtagccagccttgctaccaggatatccaccctgcaggccaactctcagacccaggatgagagtgtcaggagggtggatgtcggctgtttggacaatcggggcagtgtgaaagcatttgctgagaaattcaacagtggggacctggggagaggttccatctcccctgatgctgagcccaatgacaaggtcccagaaacagcgccggtgcagccgaagacagagtctgattacatctgggaccagctcatggccaatccaagagagctcagaatccaagacatggatttcactgacctgggggaggaggatgacattgatgtcctagatgtggacctgggtcacagggaggcccctgggccacctcccccacccccacccacctttctgggtttgccgcccccaccccctccgcccctgttggacagcattcctccccctcctgtccctggtaatttattggttcctcctcctccagtgttcaacgctcctcagggcttagggtggtcccaggtacccaggggtcagcccacattcactaagaaaaagaagaccatccgtttgttctggaatgaagttcggccttttgactggccatgtaaaaacaaccgacgctgcagagaattcctgtggtcaaaactggaacccattaaggtggacacttccagactggagcacctgtttgagtctaaatccaaggaactgtctgtctcaaaggtactgctagtcttcagcatgcttcttgattggaagttggg

SEQ ID NO: 19755 - DNA, 2300 bp, Homo sapien
gatcaccaggatccaaaacagctgggatgttttcagttgttgttgttgggtttttttttttttaaatgaagaagtttgagtttattcccaactgcatatttaaggatctaaaatagaaatttagcaactaagtctgggaggttccaggaggacttaagctgggcttgagcctgtttctcctcgatgcctcacggtccctggggctacagcagaacagtttctctagatggcttggctgctcccagccctagccagggcccctgctttagagaacaaggtgaggcctcagtgcaggagatcagatgatgagtggcagtcagttgctcagtgggaacctgcctgcacagtgtggttgaagctgcttggctgggtcagcaggtcctctgggatgtggccccatcaaacttccagtctcatccctgacagtttttaacaacctagacaaagccacttcttatctcctgaaggtcttctgtccccagactagatcctagacattctttagggcctagcccaagggtcagcccttccagaccctgagcccctccaccaccaggtgagttacagttgctctgctgttgagctccctcaacaacagagggtgcagcacaccccattactgtgctgaatgtgtcttcaggagatccacagtgcctcattcatctttgttactctagacttgttacatgagtcaaaatagccatcctcccaagtgtgtttgcctcaaaggaaacctgagcaagagcagggagcttgtggagccaagtcttctcccacctgcccccaggtgccacctgcacccaacttcctgagagctgaagaggaaagctgggggccttgtggtcacagctctggccagtgacagggttgactcatcaccccacagacactgtcttagtttgctaaggctgccataataaaataccacacacaggtgacctaaacagcagaaatttatttctcacagttctggaggctgggaactccagatcaaggtactggccagttaggtttctagtgagggcacttttcttggcttgtaagcagccaccttcttgctgtgtcttcaagcagcagagggagagaactagtagcactctggtcttttcttataatgacaccagtcccgtcatgaggatcccaccctcgtgacctcatctaaacctaagtatctctaaaggccctacctccaaatatcatcactttgggggttagggcttcaacttatgaattttgaggggacataaacattcagcttataacacgtgcttgccaagctcccatcttttgctaattctgggctggctgcagagataggtgaagcccaggacctgcctctgaggaccacacaggccacctgggaagccacacataaaagggctttgagaatgccaggacacttcttattccctgctctccttctaggcctctaagctggttcgtcccctattcatcctcaccagtgcatgccctttcctttcttttccttggaaggctcctcttcattcatctaccaggcagctgcacagaggcctaagtgcacaggaaaggtggaggtgctctggtataaggggcatggaatgtttgaatggcaaggtgagggctttgagacagtacagctgtagatctggaggggctgacaggccaatggtgctgtattctccttattgatcctctcttctcagcatgtaaaccagctctctctgggcacgcaccatatgtatgaaggccaaccaagacattcggacacctcaaagcccacaagaaaggaattctgaaaggttttgattttgttttcactgcttctatggaaaaaacagatttttttttcttgcaaaatatcacattttcccaattgaaggaaaatccattttatttttgtatgtgtctgactcttgaagttctgttgctgacccaagcttggcagcatctcagaactaatccctgatactttctgtgctgaacagtagccagtccttctctgagctgaactggggccatttgttttcatctctaaataagtagtgagtgcttttaataatgaaatgcagaaaggacccaagatgatgcattaatcttggattctccttttttatcactaagaaaactgctgcagatggaaaaaggcaagagatcattgttctggattccaagaggagtaacgccatcaatattggtctgacggtgctgccccctccaaggacgattaagatcgccattttgaattttgatgagtatgccttaaacaaagaaggaatcgaggtgagggaagctctattaagcattatttgtattttatc

SEQ ID NO: 19756 - DNA, 2300 bp, Homo sapien
tgtggaatgagtgagagccatccatgcagctgtcagtagggaaaacattctacacatggggaacagctggtactggataccttgtcaggcctgtggtcctaccctgtggagtggcctcctcacccctccccacaggccctgcaggctctcagttccttggcctctgtgtccctccagggctcctgcacactacacatggtgtctggggctctgaggtgggctttttcagggaataaccaggattccagtgtaactagagtcacaagagatgaagtcagagaggtgatagggctagtcgtccagggccttatttggaaatgctatatttagtttatccatgcattatatccatccaatgctatacttagtttatctttccatggacatttgggttgtttccactttcagctattgtgaataatgcttctatgaacttttgtgtagaaggttttgtgtgtacacatattttcatttctttttatgcaaatgagaaaaattgctaagtcatgtaataaactctgtttatctttttgaagaactgccagatcattttctatggctgctaaaccattttatcttcctaccagcactgtggaaagggtccaatttctccacatcctcaccaacatttgttctagcctgtctcttttattacagccatcctggtgggtgtatgtggtgtctccttgtggttctgatgtgtattccttagtgatgttgagcagcttttttcatgtatctcttggccgtgtgcatatctttttaggagaaatgtctattcaaatcctttgtccattttttatttgtctttttagtgttgcgttgtaagattcctttatatattctgacacaagtcccttattagacacatgacttgcaaatattttctcctatcttttagattgtctttttagtcttgataatatcctttgaaacacaaaagtttttaagtttaatgaagtccagtttatctactttggtcacttctgctttgggtatcatatctaagcacattaatccaaagtcatgaagatttctactttattttcttctaagagtcatgtagttttggatagcattttttaggcccttttactttaaatacaagttgtatgtttacttcattattcgtctcaaaaagagtaagccagtgtcccttattttaaaaaatccatattcaagctgtgcaaattagagtgatcaaaattttttgtctataaatagtggtatcatttgcgtaatgttgtttgttccacagaaagctttccctctgtctcccactgtgttctttctcatttcctaataactaaaatttgggtacttatctgctcatgtaatttcttttacaacattttaaaacaaataatgtttaataatttttgtttacaaattaagtagttaaaataaatttattttctgcttctttggtgtttcctaattaaattaatattatatataatatcacaagaaatgtttaaaaatatttactcagaaaacagcatctacttagaagctatgaattaacatgttattcataatatgttcatgtctattttaagtgttcattccaaagaatttctaagcaacatttctttattcctattgaattgtcatataatctagaaatggtgcaatacttttcgaaaataccactttaacatttttcttacaaaagttttacatatatccattttagaaaaatgttaaaacacagatacgcaaagtgaaaaagtaatctgttgaggtcctgccacctagatataatctccatcagtgggaaagtgagttgaacttctgtttgcattttcacttgagaagactcttgaaattcaaagccccaggaatgaaggacagtgtcttcttactgagagtgtggcttgttggtttctttattattattattattattattattattattattattatttattttaagttctcacattggtttcttactgagagattttagacaagtaatttttatttcttaaaacggaagtcattgctattactgttttttccttgcagattccactcctttttactctttatgggccatccaccttatgcaattcgggaagtgaacataaacaaattctgcaggattattagtgaatttgcactagagtatcgcacaaccagggaaagggttttgcagcagaaacagaaacgggccaaccacagagagagaaataagaccagagggaagatgatcaccgatgtaagtttcacacaatccctctccttatgtcattcgttttcaaagtaagatcagtcaggaatcctccccacagtta

SEQ ID NO: 19757 - DNA, 2300 bp, Homo sapien
attatattaattgattttttttaagtttctttttttttagtgacagggtcttgctatgttgtccagctggacttgaactgggctctaataaccctcccaccacagcctccccagtagctggaactaaagacatgggccaccatgcccagctattaattgattttcatatgttaaaaccactcattcctaaatcacacttggtcttggacttctattaaaagagacacaaattttaaaaatcaaccaaacaaatacataatttcaagtagtgaaagtgctataagaataaaagaaaaagcagggtaaggaaagagagagcaagaaagacggcggttattcgaactatattcagggaaggtttctctgaaataatgacatttgatcagagatctgaatgacctgaagaagcgagacattcagagaaagataattccaggtgcaaggactagcaaactgcaaaagccctgaagcaggaacccgcttagtgtgtttaaggtacagctagaaggccatgtgggcaagagtggaaacaaagtcagaaagagatgagagcagatcttacagggacttgtgggtcatggtacagacatttggattttattataattgtgatgggaaggcactgaagcatgcttttcagccttcttaaaagacctttctcctccttagttttctggctaactcctatatgtctttcaaaatctagcatcatctcctctgtgacatgttctttaacttccctggtaagatcagtcccctcctctgtgacatctctgagtaacagattactgacctcttttcacactcctagtgacctcatttgtttatttttttcacagaactgtgtctttttcatatttttaacctcacgtctaacatagtggtgagtactaaagaaacgtttgataggccaggcgcggtggctcacgcctgtaattccagcactttgggaggtcgaggcgggtggatcacctgaggtcaggagttcgagaccagcctggccaacatggtggaaccctgtctctactaaaaatacaaaaaaatagctgggcgaggcaggagaattgcttgaacccaggaggcgcaggttgcagtgagccgagatcgcgccattgcactccagcctgggcaacaagagcaaaactctgtctcaaaatacaaacaagcaagcaaacaaagaaatgttcgataaaagaaaaactctgagtcattcagtggtgcaaggttggattcctttcagacccgacgtagttgtcgccctgggaggtcgggtgcattacttcccccagagaaaggtcttgggtttcggggataatgccctggctgagaatgcctcctagggggagatccaacttcccaaccgtcaggtgcttgctgtgttccctttgcacgtctctgcccgtccttcctgggtgggaccttggttggcggtgagtgggggaaacttcaggcttcccagctctgcctccgaacactcctggcaaacactttcaaggcctaatcacaaacccaggtcccccactttcctctgtaacaacggaagtcccagcagcgatgtccactcctgttctggggccagcgtcgcaccgctcaccccgcacctcatccctccgctcctccttccttctcctccacaccctctcggcaccgtgccccctttcctcacctaggatgcgcgtgatgcccagggtcagcttctccaggtgcggcttgctgcagcccagccccggggacgatgcctcctcctccatggctcgcgaccgcgattcgcgcgcggcgggagcgggtggagggccggaccccgcctcagcgccgaggccaatttcatggcatgccgggaacggtagttctcggcgcctgaaagcgcggcgcagtgatgatgggggcccggggttggtctgacagcagcagctccgtggggcgccggttcccgcggccccgcccggtgccccacaccgcacctccgggacgtagcttccccttcgcccccaccctctcgccccgcaggggccggccgcgcaggcgggggcgggcctctgcgtggtgcggccaatggggaccgagcctgcaggccgaggcgtggcggcccaggcgcgacgccccgagtggcggttgtttcaagatggcggacgtggcgggcccctcccgccccagtgccgcggcgttctggagccgggactgtatcctttgcccgcctgacagggggcgccggcgccctccacgggacggcgaggggcgagccgtcgcgtggcagtccgagagcggaggagaagctccgaactaaccccggggatggggac

SEQ ID NO: 19758 - DNA, 2300 bp, Homo sapien
tgagtcacagatgatctgtcctctcatgatggaaacatcaaggactaagaaatctctccatcacatttctctaaatgtttaggtgaagtattgaaaatcttttttcaatagtgtgaaaagaataccagattataggtacttactttttggtctttttctattgaaaattctactataaaggctctagggtggtctgggaaataatcaatatgacaaaggaatcaagatgcaaagacatgtaactaaatcaaatgattaataactatcattatgcttttcagcaaatattcagtaacaaatttacatttgacattgcttacagtgacattctctatggagatttaaaatgaaaatatctgaggctcgatgttaactggtcattacgtggaatagtctgaggggaaaggtgacactagcaactttgcaattcctttcatacatctgaattagatcttataggatataatcgccaccatttttcccctgtacaatttcaattcctcactatctatgagaggacgaatattttacattaaatgttgggagtcagaatacaagagataacggagtatatatgacttctacataaaatagggggtgatataactacatgagtaagtgaaagtactgggtgcgaagaccaagagcttaggttcagtccatatatctattaatacacttattcagtcccattgcaatagcttgtcccccccccaaaccattgattctatatttgaacagtaccataggatgctataagctaataaccttcaagtatctcctccatcacaaaattatgtcaatgcagaagcagtgtttcttgagaaaagacttatcccaatttcctaacttcctaattcagcccagttgtccacagtgcacatattctcttctgaaaggtaaaggaaaaaatatttaatttgcacactgcactagtatgctttcatccacagtgtatgtacatgatttcatttgcttttcaccaacctatcagagacaaatggtaattatgtctagtaagtgcaaacactaaacacgagcagcacagaatacaaacatatccctctctctacacatgacactaatcctagtaactcaacaaaggagttgataacacagttttgtaagtttcactgggagctaagaagaatgcccagtgattctgccaaaggtaacagcaacgcctcaattaatgccatcaccaatcctagcaaacacaaaaagagctgcctctgcaagcactcagtaacacagattgccgtccctctttcaagtaacccctctaaggaacgtgaagtaaattatcaggaccaaagctcaagcgagaagagtctacctactccaaggaaagaaacactcctgtcacacaaacatctcatcactgctgctgaactggtaatactaccactggactaaaaagttccactgcttctccacctcacaacgatccaagaacttcaatgactgccagtgacccgcactccacaagtaagtcaacaatacttccaggcacaatgattcccatcttacgcagtaaccagcaccaccagaccacatcccagtaaccaagctccacacctctcctaaaaccccagtattaaaatacatcatcactggagggccttttaagtccgaaaggtcctgacttgctcctagcaatgcagactaaagacaatcctaaatcaaaacaaaaaggctccctgtccagccaacaccgactcctccctcaacttcgagctagctccgcacactcaagtcagcctgggggcactctgacagggtgggcagagggacctcggagggccatctcagccctggactgagcctggactcaaggctatctttctcgagctcaccggtagtgagcgctgggaagcatctgagccgtgtccccacacctgcagacagtaccagtctctcggccacctaacacccaagcaaggggagagcccagcacctagactggggccgagcagcacgtccccatccccggggttagttcggagcttctcctccgctctcggactgccacgcgacggctcgcccctcgccgtcccgtggagggcgccggcgccccctgtcaggcgggcaaaggatacagtcccggctccagaacgccgcggcactggggcgggaggggcccgccacgtccgccatcttgaaacaaccgccactcggggcgtcgcgcctgggccgccacgcctcggcctgcaggctcggtccccattggccgcaccacgcagaggcccgcccccgcctgcgcggccggcccctgcggggcgagagggtgggggcgaagg

SEQ ID NO: 19759 - DNA, 2300 bp, Homo sapien
cctcagatattttcattttaaatctccatagagaatgtcactgtaagcaatgtcaaatgtaaatttgttactgaatatttgctgaaaagcataatgatagttattaatcatttgatttagttacatgtctttgcatcttgattcctttgtcatattgattatttcccagaccaccctagagcctttatagtagaattttcaatagaaaaagaccaaaaagtaagtacctataatctggtattcttttcacactattgaaaaaagattttcaatacttcacctaaacatttagagaaatgtgatggagagatttcttagtccttgatgtttccatcatgagaggacagatcatctgtgactcaatggcaccttttttttttattgttgttgttgtgagttatacatctcctgcacagtatgattcagcagtgctgttttgcacaaggaacgttttagtacctcatctgtaaacaatgagtgtgtggtgttgtcatgttatgggttaaatcttccagcaaaatatgctccttcagtttaagttgcctttgtccttcattacagttcctagtaatgtcagaatgagttagtgtttcagcagtacctaaatttgactgcttaaatgcactcaagtgtattaccattagcaatatcatggacttgatattaaaaaatatgaactgcaagtgacctggtcaaaacattgcagtataatctctgctgttgagttttcaaatggaaacaaagactgtatgttgtggtaaaaataatatattagcccagaaagtctctgtggttgataataattacatatacatgtattgctggcaaaactcagcagattagagtagaatgggcagtactgaacttatttccttcaaatcctggaggtctgggatagaggtgcatcttcctctctaccacttctgcctgggtttctaattacagttagccctctgtatctgctgattcattcaaatgtggatggaaaatatttgagaaaaaaaagaaatagcacacaaaaaaatacaaattaaactgtacaatttaactactatttatatagcatgtacattgttttaggtattataaataatctagaaatgacccactagtaggcccactatacatttggtatataatgtgtctgtttgacttccccataaaatatacatttgttgggaaattctagatttgaaggaggtaaatatttgggttcttaatataatgagatgaaaatacattacaaattattagaaaggatagaggcaatttcaaatattgttattaaaaatattgaagtagtttgtttagagttttatatatttgaaaataaatttgtcatggatgtagctgaaagtaaaaggttttgttggccgcttgcggtggctcacacctgtaatcccagcattttgggaggccaaagcaggtggatcacaaggtcaggagttcaaaaccagtctggccaacatgatgaaacggccgtctctactaaaactacaaaaaaaattagccaggtgtggcggcgggcacctgtaatcccagctactcgggaggctgaggcagagaattgcttgacctaggaggtggaggttgcagtgagctgagatcaaaccgctgcactccagcctgggtggcagagcgagactctgtctcaaaaaaaaaaaaaaaaaaaagttttgtttgcatatttagaatcacagaaatataacatataaggttgttggacaacacctcataaaattaaatcaataccaattttattctttcatagatggagccagacattcttttatgtttgagggtacaacactgaacaaaataaaacaaaaatcattaccctcttggtgcctacattttagtgagatgagatcaggtcatgaataaggaaaatatatgttcaatgatttttttttttttttttgagtcagagtctcggtctgttgcccaggctggagtgcagtggtgccatctcagctcactgcaagctccgccttctgggttcacaccattctcctgcctcaacctctggagtagctgggactacaggcacccgccaccatgcccggctaattttttttttttacatttttagtagagacagggtttcaccgtgttagccaggatgatctcgattttctgacctcgtgatatgcccacctcggcctcccaaagtgctgggattacagacgtgagccactgcacctggcctatgttcaatgatattggtgctgtggagaaaaaataaagcaggaaagaggcagatagtagcgggaggtaggtaggttgtgggaagagagagt

SEQ ID NO: 19760 - DNA, 2300 bp, Homo sapien
catttttcaagttacttaggttagaattttttttcgtagtagggattatttgggggtcattttacgtactgccttgagaagagtcttggtgccttttgttattaaagtattgcaataggtaatgtttgcaaggtattacaatatattgatacactttaatattatatatagtattcctccatgtcaataagtattgaagatgtttatgattgattttttcctttaattttttcttacttttcacttcttgacttcatacatcaaagaagaaatccagagtgaaattagagagtattttgaactaaatgaaaatgaaaacacaacacaacctgctaaaattacttagatgtatctaaagcagtacttaaagggaaattttaccactgaaatcctacattagaaaagaagaaaggtcccaaatcagtaaaatcagctttcaccttaaactagtaaaagcaaaacaaatgaaaccagaagtttacaggattataataaggatcatggaggaaatcaatgaaacaaacaacagaaaagcaatagagacaatgaagccaacctggctatttgagaagataataacattgttaaaattctgtcatattaatcagtcaaaagaagagagaagacaaattaccaaattaggaatgacagaggtctcatctctacagattctatagatcttaaaaaaaggggattattataagtaactttatacatataagctttacaatttacatgaaagggataaatagataagttgatttgtatatcattaaagaaattgtatttgtagttaaaaaccagcaagcgaagtgtaaagaaaagaacattctagacagacagacatatcccaagatacacagaaataccaagcatagagctacactgtatagtatggtgaccactagctatatgtgacaatttaaatttaaattaattataattcagtaaaataaattttgtacctgttacatttgccacattttaagttatcatttacctacatgtgactggtattatgtagaacataaagaacattcacatcaacaaagttctactggacagagccatcataatgtgtttaggaaacttcaggagttctgatttgatgagagtgtaggttgcaatggtgagatggaagttgcaaaggcaagttggaagggaattatgctggaagggcaaactgattccaaaccattgagtgtcttcagtggcaatggtgtttggatttaccctaggggacaccagctagggtagagaggtgatttttggttttggttagtgacggtagatgctggtagggtaagttgatctgatttgtgtttgtttggttttgattagtgaaggtagatgctggtgagttgatctgattttgagtataatattttggaatattatactcaatataatgttttgaaataatattttgaaataatatttctgggggcaggataaaaggtagatttgaggggtgaaatcagtattcaggagctcactctctaacagccaagttgtccagatgagagtggtggtaaggactaagctataatgaggcaatgagcatataaggaaggagacatttgaatgctatttagaggaaaaaaagataggaggatttgatgtgggagctaacagaatctgaatgaccctgatttctggattgagcatatagagacaagataggacttatgtggggaaaagcagactttgaaaagagaaaacgagtatgactatacatttggccacattatctttaaagataggcccaatttaattaagagtctggagttggtaaaactcaggatcagatatgtgcttttgggcatcaccagaatatagttggctttttgaagctttgaatttggataagattgcccagagagaatatgcagcatgtacagatcaaagccaaggacacaccccaatatttattaggtatagaaagataggaccttagaataagaatgaaaatgagtaactagagaaaaaaaaataaagagtggttcccaaaagaacccaaagaagataacatttcaaggagggttgctggtccagagaagtcatataaaagaaccataagcatatattggatttgttgaacaggaagtcatttgggacctttcagaagtgtagtatcctgaaacaccaagcaaattcagaccttcatgctgaggtgaatttgtaaagggtcattgggcgtaccctttgggagaactgatacggccttcagacctgtaagttatatttgtttcatatgtaaaatgataatacaccatggtgtttttattataaagattatg

SEQ ID NO: 19761 - DNA, 2300 bp, Homo sapien
ctagatgaaataaatactacctgcaaaattaagggctccaaagaagacatttgtaagaaatatataagaagacccaggctgggcacgatggcttacgcctgtaatccaagcacttcgggaggctgaggtggaaggatcacttgtggccaagagtttgagaccagtctgggcaaaagacggagaccccatctctaaaaaaaaaattaaaaattggccaggcatggtggcatgcacctgtagtcccagctacttagcaggctgaggtgcgaggattgcttgagcccaggaggttgaggttgcagtgagccattgatggcaccactgcactccaggctgggcaacagagtgagatcccatctcaaaaaaaaaaaagaaccaaatttttttgaagaaggctaaaatgtaactaatgtaattagtttcaacaatgatctgtttatactgtacaaaaagagaaaaagaaaaggttccaaatttgtttagtgtattctagatctgcccaggaagaaggtattcaattcatggtctacaaaacaccaatattctatttcttttcctcagtcagctcagcccttcttctttcttggctcatatctccactgttcatataattccagtgggtcctccagaatccgtagtattctgccattatatatctttattatcttctgtttttacctaaaatcctccctcccatttccttaccttaaattatatagagatttcacaaaaaaactaatcacaattctgtaaacttccaaaaaactttacagagtttacaaaatactttctctcatattaccatacataatctttataataaaaacaccatggtgtattatcattttacatatgaaacaaatataacttacaggtctgaaggccgtatcagttctcccaaagggtacgcccaatgaccctttacaaattcacctcagcatgaaggtctgaatttgcttggtgtttcaggatactacacttctgaaaggtcccaaatgacttcctgttcaacaaatccaatatatgcttatggttcttttatatgacttctctggaccagcaaccctccttgaaatgttatcttctttgggttcttttgggaaccactctttatttttttttctctagttactcattttcattcttattctaaggtcctatctttctatacctaataaatattggggtgtgtccttggctttgatctgtacatgctgcatattctctctgggcaatcttatccaaattcaaagcttcaaaaagccaactatattctggtgatgcccaaaagcacatatctgatcctgagttttaccaactccagactcttaattaaattgggcctatctttaaagataatgtggccaaatgtatagtcatactcgttttctcttttcaaagtctgcttttccccacataagtcctatcttgtctctatatgctcaatccagaaatcagggtcattcagattctgttagctcccacatcaaatcctcctatctttttttcctctaaatagcattcaaatgtctccttccttatatgctcattgcctcattatagcttagtccttaccaccactctcatctggacaacttggctgttagagagtgagctcctgaatactgatttcacccctcaaatctaccttttatcctgcccccagaaatattatttcaaaatattatttcaaaacattatattgagtataatattccaaaatattatactcaaaatcagatcaactcaccagcatctaccttcactaatcaaaaccaaacaaacacaaatcagatcaacttaccctaccagcatctaccgtcactaaccaaaaccaaaaatcacctctctaccctagctggtgtcccctagggtaaatccaaacaccattgccactgaagacactcaatggtttggaatcagtttgcccttccagcataattcccttccaacttgcctttgcaacttccatctcaccattgcaacctacactctcatcaaatcagaactcctgaagtttcctaaacacattatgatggctctgtccagtagaactttgttgatgtgaatgttctttatgttctacataataccagtcacatgtaggtaaatgataacttaaaatgtggcaaatgtaacaggtacaaaatttattttactgaattataattaatttaaatttaaattgtcacatatagctagtggtcaccatactatacagtgtagctctatgcttggtatttctgtgtatcttgggatatgtctgtctgtctagaatgttcttttctttacacttcgct

SEQ ID NO: 19762 - DNA, 2300 bp, Homo sapien
tgacacaccgtgaagatggaggaagggctataaaagtgagaaatacaggtggccactagaagctaaaaaaggcaaggaagctgattctgtcttcagagccaaaggaactagccctcccaacgtcttgacttcagcccagtgaaacagatttctaatttctgacttccagaattgtaagataatacatttgtgttattttaagccacaaagtttgtgctaagttgttatagccacagtaggaaactaatacagtagttgtaatatatttgtttactgaaaaactcatatttctcttgcagcattgagcaaataagcttccccatagcatgcaaataattgtgtgtgaaaagtgagactatttcagaggatatggatagaagattaagaatttttgcttgtttggttaatataagtgttcaatacacagaagattttttggatttgtttgaatagaaatagaaaatggcaagaaagtacagtgttaacataagtgggccttgaatgaaagcctgagggaagaggaagtgttagtggaagctgtcagatatttcacttgtttaggtctgcttagtttctttctcttaccttctctttagctttcactaaagactgaatctgtatatctagagtaaataggccttggaaaacaaggcctctccacaagtggatttgttcctttcagatttgtgttaaaggttatactctggctgctcaaaagaaataacagctgctaggaataacacattttcaaacaacccatcttgctagttaagtaattggacttggaggcccttttttgctgtgctccagatctaaattgaagggaagtttttatgttataaagggctacccttggaagagtctgatcgttagctggattcattttcagaaatgcacctccttcagtttagtttgattaagtttctttcttacacattaatatctttcattattttgttaattacaagtgtctaccttcatgggcaagttgctcatttgaaacacatgcaacatttacattaaactataatatttctgtttggacaacgtggaatctagatacaccatgtttctgaaatacactgtgaagaaaagctgcttagttatactaagtcagcgatgttcagagatgagctaagtataacaactcaaccttcccaggccaagctcaacagtaaggcagatggaggtgttccatgatatagaccaatagttttcaaagtgtggtcccagatcagcaacatgagcaaattctctgactctgcttccgacagaaagatttggaaactctggggatgaagctatagtttcatgtttgacaagcacccttcagtttattctgctacacattaaagtttgagaatcattgatacagattaagttttgttctcgctgacagaacagacttacagctaaaatgttggaaaatctgactctattgacatgtcagagataatttgcaactgcttcctttctgcccgagttctatcagactaatcacttgaatagattgaaaaatcacttatgtttgtagatgaaattaagtattttttgtatttaaataacgcttttgattagaatcctattttgttgaaagtggttggttttatctgtgttctgtaaagatagttataaaacctcatcaagattctaccagtaaatcacattctattcagtataaggtgaaatgttttacatcaagtctcatgctgtgtaatggccaaagagtatttaaagtgactgaatggattccttggctcagtattcaaaagtaaacattttacgatgttcatgtttaaggctttcacctcttctcaaaattgactttatgtaactctctttatttgcaactccagaaatcaccaaagatcatgcttaagcaacatgtagcagcaacttatttttcttatctttatatagatttactgaagggtaggttgtttgaaaatggatgtagctttggggcacaagtctgtttagctgtgtgaatgctataatttaatatttaagacaaaacaacagctttggcttggtaaatatatatcactgatttctgaaaaaccaaacgaaagaacttgttttgttgtgttcttatttgacaggtgatcttgtggttctttctaggtatccagtagaaaaagcactctccagtgttcatctgtggaactggatggttcctacttgagcatagccagaccacagacctactatcaaaccaagcaaagacctaagtctgcagtccaggattcagcttcagaatcccttatagcatttaggaataattctttgaaaccagtaac

SEQ ID NO: 19763 - DNA, 2300 bp, Homo sapien
ggctgcataccaatttagcccgaaactgagtggtgtaaaacaaccatttattttgctcatggattccatgggtcaggaattcacagggcacagcatggaaggcctgtctctgctccaggatgtctgggcctcagctggaaaattcaaaggctgggagctggaattatccgaggactcattcattcacgtgtctggtggtcgatgttggctgtcagctggggcctcagttcctttccatggggactcttctgcatgggctaattgggggttcacagcatggtggctggcttccacagagctaacaaccccccaccccacaaaacagaggcaagtggaagctgatctcttttatgacccaacctcagaagtcacctggcatcacttctgccattctttatttgttagagcagtcaaggggaaggaatacgcccccggactctcagtgagaggagtggcagtcacactgaagtagcagtatgtgggctggggctgccttctgcagtcattcaccagctgctgcaggtggatacagccccatgcgtgcatgctttgtctccctgagcacacagcatgggatcaacaaagcacctgatactcatcccaggtgtgtgggggctgctgaggcatcttcaggaacagacgcccccaaagtgtccagggtcgaattttgcagcgtgaagaaataggaagagccagaccgaggagggcgcatccagatggaagaaaaaatatgtgacataccaaggaggtgtgccctgggatggcacaggacaggcagtcattcattctttattcacctcatcactaaatggagggcctcctgtgctccaggcactgctgcttcagcagagaggcctggtctctttccccagtgagcatcccagggaatgggtgggaaaggagagctatacggaaacccacaaagtagtcattgtcctttgacattccggccacagggatgggggcctgagacagagtaagggagggataagaaggggcatgggtgaggaggcaatactcaaactgagacctagaagaagaggactggaccttgtgataagtgcgctccaggcaggggaacagcatctgcaaaggcccgaagtcagacccgccagttgtgattcattttggagcctgtagaggatagcatgtgagacgaaggaggaggggaacgcaggctgcccgtgtgctctagtgaggggtcagcccagggtctctgctcctcagggtgcagcctgccctgcaggcgggaggaggccgagtcgctgcgatccagctcctgcctgccacagctctctccgcacctgtcccgcgactgtgcgctcctaccccacctacttctctccctcgcccctcccgctccgactaagccccgcccccgtccccctcccccgcacctctcccccgccggctccgagcccccgccccgcctccccggctcctccctttccctgccgctctccccctccggccttgccctgctcccgcgcagcccggtccctggcccgggtaagcatctcctaattttgttctagaagatagaaaactcttcgtgggcatgctcaacaagcaacagtccgaggacgacgtgcgccgccttttcgaggcctttgggaacatcgaggagtgcaccatcctgcgcgggcccgacggcaacagcaagggtgcgcggggcggggccgggagggatgccccggagggaggggcgaggcggagggagaccagagggctcctctgagtctccggggccatcgccgtctgtctctgggcttcttggtgtctctttctcaatctctgcctcacccgtctgcgttcacctgggatgcgccctctcctcccggcccctccctggccctgcttctgggtcccagctcggcctctcgcgtcctcgcagggtgcgcctttgtgaagtactcctcccacgccgaggcgcaggccgccatcaacgcgctacacggcagccagaccatgccggtgagtgctggccccttggggcgggggcgagggcagcggcgggccgagaccccagcacccgccacgccccgccggctgtccagtctccccaagagacaggaaagcatgacccttattccgggcctcagacaaggacgcggaagcccagggatgttaaggaactggcctgaggttacccaggtggaaaatgcccgcggtggggttcacacctcattcccctgggcgagcgccgatgccgcctcctccaaagcgccccgaggagcgggcggggtgggcgcaggccagaggcaccgacagctgcgggcggaggctctggagcaggtggg

SEQ ID NO: 19764 - DNA, 2300 bp, Homo sapien
cacctcctggttgcaggcagaggacaaggccaacaaggggacgggaggaaagacgcccccgggagaagcaggcggcagcacgagggacgacgtcacgggggcctctgaccgctattcatttcagtccccgggtgtctccatcaataacagtctgccagtgaccaggagggaggaggacgggagagggaggaggagtgatctggggtctggaggaagggagacatgagacagagagggagagagatttctccgaagcttctccaagcctgaggcaggagttggaggtggggaaggcagagggggcactgggagctgagagtttctgtctcccaggcttttctccctgtttccttctttcatctccgttcctttcacaaatacattccctttccacctcctctctgaagccagaaagggaagggaggcaggaatttctacattggaaggggaggaaaggggttttcactgggtacaggctggttggtggaagagtcaggagctgcagaggacaccgggagcattctgtggccggcaaccagagtctaaagcaagcctggtgacaagggctgacataggtaccatactggcaccagcagcctgtgggcctcatgagaggagggcttgggccacgaggtctggcacagagcctggcacagagcgagcactcaggaaataaatggccatggcaatgaccaaatggctggctgtggagactggctggggatggactagaccagccaaggagggctgcctggagtaggtagaacttgatcagattcttgaaagatcaatgggtttcggagaagtgaacatggggaagaggggtataccaggtgaggaggtggtgagagcagaggaatgcgggggcagaagggaacacaggttgttggggatgtggccttggataagatcacgtgagagagagaggaacaagagaggcagccattccacagggtgccttctctggggccatgggtggcttgaaaaggtctgaggtgactgttcaccagaacattcaagcctgcttccgccatagtgagcttttgggctttccccatggttttgagccttgcaggcctcccaagccaccttcagccacatctgcaggcagagaaagaaggcctgacactgggcatgctggacagcttatgggaactcccagaaagactcccccatccccactctcttggccttgtcaccacacctaaaggacagcactgaaaagtcaccccttgagtatattcttctgtcaaatccggattccctggcgaggaggtggggtgtggcccagttagaattaatcagtgggagagctagactgagccttctcagttcgcaggtggggagactgaggccagaaagaggatgtgatttgttaaggtcacctagggaattaaaggcagagcaagggtggtctagtgctgtaagtcggtggcctggatatgccctagaagccctctgacttggaggggtgtgaagaccatctgtcactgcaaatcaaacaacaggggttgggacaggggacacagggtacgtttattttattaggagggcctggcttggggtcctccttacagactgagcctttatttgtaaggcttagaggagccctccaccatccctgagggagcagcgcccagcactcctaccggccagaaagacagcccatggtcaagtgtggctagaggtgctgggggtgaggggtggaagctgccccttctaggaagcgtaggggctggcgctgaaacagggcagagaggtctgaggcaccagggtacggggtaaggagagaaccgtaaggagaggggggtgtggtggggggaagatgcagggtggggagactccgcggagggagcaaaatagaaaagcaaagggaggtacgagaggcagacagccgggaacaccgagaggcagagaagctccgagaacagtgcacgggagagaaagagaggtggggacagggaccgagcggcagggaggggcgggagcctggagggcgggcggcagggcgcgtcggcgggcccgggggcgccccactgacccttcttggcgcttgctttcctccccaggctgcgccttcctcacctactgcgagcgtgagtcagcgctgaaggcccagagcgcgctgcacgagcagaagactctgcccggggtaagtggcgcccgccgtggcgcaagcggccgacgcgccgacagggggcgacttcgggaggccgggcggcggcgcggcgcgcggggagaggacggcagggcgcccgccgccccgcctgagctcgggagcccgcgcgcccccccaaatc

SEQ ID NO: 19765 - DNA, 2300 bp, Homo sapien
gttctaaaaatcatacttgctctttggtttgggcccgggatcctcagagagaggcgtcctgagcggactcggggcctggggctgcgaacctcgggcctccgggcctcctccggcgctggagagctccgtattgtgcttgtaccaaatggggttggcctgggtttgcaggcagctggggtctcatttctttaattaaaattgcagacatatcctctagtaacgtaatgtaatccgagggcaagaaaagagaaaccctgaaacccgaaagtggctagccgagggccggcgggggttaggccagccgctcagccccgccgccccagctccccagccccgcagcccgcgggggagcgggcgcgttatttcaatttgccaggcttctgaagcgaagaggctgccctgaaaaagcaaacatgagagaggacggggtgcaggtaaatatcattaacgtgaaaatctgctaccccagccaagttcaccaccagtattcacccctacaggcggggccgctcggaccctgctcccggctccgcgcctgccactccctttcccgcgcagccgagatgccagccccagtgggcctggcggggagtccggcggggtccggaccgggcggctcgacccccggtccccacggcaggaacgactcagcctcgcacctcgggagctgtaggtgccgaaaacgaaacccgcgggggcagcgcacgccgcgcgagtctcggtccggcggcaacccagatagcgattcaggggctttattcttttgatggtgattaaaaaaatatattctatttgaacccgtaaagcagacgagggcaaatcaagccatcccccgcgctggctcaccggccaccgcgcccagcgccttcctccccctccggcgggcgagcgggcaggggcgcccgactcctaccttcctcccgccagccaccgggggaccagccgcgctctccggggcgggggaggccgcccgggacggggacccccaccttccgccttcggaagcgggttggggcgggggtcggaccccgagtctctactccccgtccctctgccccccggcgcggcccgacagctcccagccccatcctggcaggtggcttgggtggcggtagatgccgggcgggaggaagatgtggggctgctctggcaggttgggggtgcgaggaggaaaaaaaaacagagaaagacacacacagagagacagggagagagcgcgcgcgagagagctcttgtctatagatttatccacataatatatatttatgtagctttttttctctcgacactgatgaatgcgcgctcggatccccgggcggactccctccaagccggctcgcttttctagtctaaataaataaataaagccagatggaagaaaaaagcgcccattccacctccgccgccgccccgcccgccatccctgcctttgcttcgcccgcctggcgccctaatagagcatagcttggtggataaagcccccctacatacccacacgaaaataaaaatcactatttttaaaatacaaaaagttgcacctgctgctattacaaaaagaacccccaaaaggcaaagagaggaggccggctgcccggctcctcacggacacccgctccccgcggccgccgggcccggaatctcagcgcctcccgaagagccatgcgcctggcgctatttatagccgggggccgtctcggactgtaccatcgccacggcgcggggccgccgacgggggaggcgcggtggccgccgccccacgccgccctgcccccggccgccgcccgccgtggcgcgggcccccacagcgcgcccattcccggccccccgcgccctcctccgcgcgcgcacactcgccacccccacccctggtctggctgggaacttgaaccggtccagcctgtttaaacggaaaggacagagatcctgtctgttcaatgtaaaaaaaaaaaaaaaaaaaaaaaaaagaaaaaaagaaaaaaaaaatcagatcagaccgagagagagaggagagagggagagagagagggagagagagagggagagagagaggagagggagggagggagagagagaggggggagagcagagagagagcgcgagcgcgagcgagcgagagaagaggagaaagagagagagcagagagcgagcggagagcgaggtgtagagaaaccgagggggagagaacccgagtgtgtgtatgcgtgtgcgtgtgtgagcgcgagcgagcgagagagaggagcgagagagtgtgagcgagaaagaataaaaggaaagaagattttctctatgtatataaagat

SEQ ID NO: 19766 - DNA, 2300 bp, Homo sapien
atttgcaaaaggcatttctgataaaaggctattatccaacataataaatacatcttaaaactcaacattaagaaaacaaacagcctgattaaaagatgggccaatggtcttgacagatactcaccaaagaagttatacaaatgagaaacatataaaaaatgctccaacatcatatgttgctagagaaatgcaaattaaaacaatacaaagtactactacacatctattagaatgtccaaaattcagaacactgacatcaccaaatgttggtgaggatgtgaagcaacagcaactctcattcattgttgatgggaatgcgaaatggtacaaccactttggacaacagattggcagtgtcttacaaaactaaacatattcttaccatgtgatccaacaattatgctccttggtatttacccaaaagagttgaaaacttatgtccacacagaaacctgtgcacagatgtttatagcaacttaattcataattgacaaaacttagaagcaatcaagatgtccttcagtaagttaatggataaactgtggcacatcgagacaatagaatattaaaatttagcactaaaaggaaatcagctttcaagccataaaaagacatggaggaagccaaagtgtatattactgagtgaaagaatccaatcagaaaaggctacatgctatatgattccaactatatgacattctctaaatgaaataaccatggagagagtaaactgatgagggattgctaggggataggcagaagggaaggatgaataggcagcacagagggtttttagggcagtgaaactactctgtataataatactataatgacagatacatgccattatacactcattcaaacccataaaatgtaaaaacaccaagaatgaacgctaatgtaaactatgaaattttggtgatgatgatattttaatgcaggttcaccaattgtaacaaaggtaccaattgttggggccactggtaatgggagaggctatgcatgtgttggcacaggaaatatgagaaattattgtaccttcctcccataaaacataaagcataaaattgtccttaaagcctatgtaaaaaagaacaaacaaagtgaacaaaaaaaccttccttcaaataaaattcagggtttagatgtcttgtttagatgaactgtatcatactttgaaagtattttacaaactctttcagaagatagagaaggggacacgtcctaattcatttcatgaggtcagtgtaactctgctaacaaaaccagtcaaggacattatgaaaaatgaaaattacaatattcttaatgaatatagacacaaaaattgttgaccaaatattagcaaatagaatacaataaaatatgtaaagaataatcttttatgaccaagtgaggttatcccaggaatgaaagtttgtttaacataaaagcatcaaccaaaataattacatatattagcatttcaaggagagaaatcacatgatcttttaaataattgcagataaagcatttgatgcaaattaataccaatttattattgaaaaaacctctcagtagaatatagcagaaggtagcaagaaagtgaaaagaaacttcccaccaaaaggctgccacaaaaaaagacaaaaatatgaatgatacaactgaactcaaacttaccagtaattacataaacacgggtttaaataatcaattataagacggaaacaagcagggagtgtactgatctgtgtaatgtgtcctgaaatacaccaaatagtaagatgcacagatagttatacagaggaatgaaccaaatagatatatgataaaataagtatgtttaaatattaaaagtagagtatagatggtgattataagggctttcaatgcaaaattctttcagatttgctgtttgaacattgtcatgataaaatgttggagggaaagggaaaaataaaatgtacatttatatagctgttaatcattaaaaagtaatagcaacaactggatttaatagaaagaaacaaaattctgagaatacctgcctctaagtaacaaaaaagtagattttgtttaaatataaataaaacaaagagagggaggagccaagatggccgaataggaacagctccggtctacagctcccagcgtgagcgacgcagaagacaggtgatttctgcatttccatctgaggtaccgggttcatctcactagggagtgccagacagtgggcgcaggccagtgtgtgtgcgcaccgtgcgcgagccgaagcagggcgaggcattgcctcacctgggaagcgcaaggggtcaggg

SEQ ID NO: 19767 - DNA, 2300 bp, Homo sapien
gcgcctggctgaaatttttgatttttaagacctttaacttccctaatctgcctatctaggtgcatattcccttacttatttatatcatatgtggtttcatgcctagatgtttgtgtcccactcagtatcataaaactgactagagattcagtatttagaatagaattccatcccaacatcaatttcacctgagttctacaacccaggttaatctcccatcctctcaggtactattgctttaaatgtctaaaatgtattggcacatagtacagccctccttctatctttatctttctctaaatttacacagtctctagaagtaatttatgggctccctgaggtcagaaaccagtttcatctcatttcgttttattttactttgttttaggtatttatatctaccttgttctaaaaaaagatttaaagtgactaaaaaaatacccacaattctgaaaaataaatgcataaagaatgaaaaattaggaggacagaaagtcacagtagaaaataagatgaattcaagggtgagattgatacatacaagtgtttgctgtgaggttctctgcaatgctctagataggttattatgcgtcatctttctaaccgcagacccaaagatgaattattggtcagacgcttgatttacaatagataataacacagataaacaagtaaacaataacatccagtcgctcagggagagcctacttatttctcattttcagaaataatgtctctaggggtctttataaacctgatgctgtatcaagtagtgaataaagtttttttttgttgtttttcttgttttgttttgttttgtttttgtttttgttttttgagacaaagccttgttctgtttcccaggtcggagtgcagtggcctgatctcaactcactgcaacttctgccttccgggttcaagtgattctcctgcttcagcctcccatgtaactgggattacaggcatgcaccaccacacctggctaatctttgtatttttagtagagactggcaattttttaacagtatctccacattaagtgtcagccaaagagtttcatctagctattttgtataatggccttaagctcaggctaaggcacaggatcaagaattagattttctacattgttatgctcacattgattcaggccattgatacaaacaatattcaaaggaaaaacaagctgcagtatgcctctggaataagccagcacacaaattgaacacacacatatacatattctgtgaatgttcgtttcagattactttgtgcttttatttgtctctgggagtaaatgggacatttctaatgagtgctcatcattttggcagccagactactcacagatgatatgagccgctaaccaccagggacaatgtttgcccagatgtgactctatcttatgctacaaagcattgtaaatgtcaaacccctggttggtatgcaattctccatttaccatacacaaagcctgctggagaacaaaaggtgccagatatggatgtgtaaatcattataatgggaccaacagatcaacaacatcaccccttagaaataggatggcctgaggtcacacttcttagatcactagccccttttcaaaatgtccttttttgtttgtcctctttttcaagaggcaccacaggctttttgtaattaaagttgtattgattttgtatttttaaaaaaggattataaaaagactagcatgaaccagaacaaaggcagataatggatggtaaacatgaggaaagataatagtccagcaatgcgctcataataattcccacatacctgcttcccaaagttgattcagatgctactttgttttaaaagctatcctatgtaccagcaattttcaatagtgatcctaggcagttacttaggttgattatagcaattttgctacatcatgatatagcaaattgctatatttttgctatatcatgctatattatgattgcggtctttttattttccaaatctttaattcattttaaaagaaaggtttgttccaggatggcaaatacagtggttgaagctgggggcatgatgataaaagaactctagaacttcaggattctccattgttctggcattgctgcccaccagcagaggatcaggctgacatcttcaggaggcatatggaggtaatggttaactttgctacagtgaagaccaaggtaaattgggtgcactgaagagaaaaacctgaccacttctgcagctgtgcatctggagtctggtaggacccttcagtcccttttgagacattaattataatgtgcaatgctaat

SEQ ID NO: 19768 - DNA, 2300 bp, Homo sapien
gaaacattcatatcacatccgtgtcacctaggacacatgaaacatcacaaaagacacatgtgacacacataccacctatatgtcacccatgaccaattcatgtcacatataacacacatgttacataggtcgaatgcatgatgtatatacgacacatgacacatgtcatatataacacatatggaacagaatgtcccgcattcctgttacgtgacatatgacatgcttcacatacaacataaaggaaacaacacaatggtgtgacatatgtatcatatataacacatgttggatatgcatgtcacacacgacacatgcacaacacatgacacatgcgtgacacatgtacgacacatgaaagacacgtgcacgtcacatgcatgacacatgcacgacacatgcatgacatatgccacatatgacacatgacaaacaagtgacacatacacttcacatgcatgacatttcctacagattacaaaggacacatgtgacacatacaggtttcctgcaagttacatattgcacatacatgacacatgcatgtcacatgtcgcacataacatgcattagcgtgtgatacatgcatgtcgcatgtcacacatgacaaacgccagagatatatggtacacatatgccatatatgacacttatacataacacctacatggaaaacgccatatatgacagctacatggcacgtgtatgcaggatatggcacgtatgacacatgcatattacatacatgtgacagatgacacatacatgtcatgtacatgttacatatgacacactacacattataagacacacaggacacgtcacacgtgacacacgtaagtcacatatggcacttgcatgttatgacacatgtaacatacataccacattcgtgccacatccgtgacacagatgacagggacatgaaatataactctcatttgacacaagtcacatatgacacatgcaaacgtcacatacacgtcgcacatggcatgcatatttacatagaaactaacgtcttacgaacgacttgtatgtgacatacatgtcacacacatgtcacacacaacacgtatgtcgcgtgtataacacaacacacgttccatacgacgcgtgtcgcctatgacacatatgacacacatttgtcatgtatgacccatatgatccctgtatgacacaccacatgcatgccgcatgtcatatttcacacctatgtcacgtgactcatgtcttatacatgtcgcataagatgcatatttgacacatgtcacatatttggcatatgaaacgacatacatttcatatgctgtatgactaatgcatgtcacacatggcatatgacaaatatatgccacatatgacatacatctatatgtcattgtggcttatttgtatcataagtgatatatatgtgtcgtgtgtgatatatgtcgtatttttgtcttgtcatatattatttcacagattacccatatgtctatatgacacatatatgtcacatatgacacatatgtaaaatatattttttccttctacccaatgccaagttcaagacaggcacgttttctcagcatcttcttttgtgaatcagtggacctctttgggttcctacttttatggagtggttcacttttagtggtcaagttgacactccactttgaatcagcattgtttcatttcttgttcttatgctttaggcttatattagacaaagctgaaatattcaatgttacaatcaggtttgaaactcagttacctccctggtgtctaattttcacttcatttggaggaaaacaaagttttaaagtttttatgtaatactttaggtcttgtctttttaattcaggagggtcaccatgttattatttaggaaaatgagattacatttgacaatagaccaatctaattttttcttaatgtagacatctgggctatatgcaaagttgctgtcttaatttgtcaattagaaagaaatccctttgagacagccaagtgacagagggtccctggagaaattctaaccagcctctccactgaggtgaagcctcgggaagttcgccaggtttgcagcattgaggagcctggcccctccccttcctgtgtggaacttgggattcgaacggcaggcgggaagtgctctagcaggggagtctgaccttgtgagggaatacctgtgtccccccttttttcccctttttacccaataaaaccctgccttactcaccctttaaatcatctgcgagcctgaattttcatggccgtgggacggacaagaactttatcttcagctgaactaa

SEQ ID NO: 19769 - DNA, 2300 bp, Homo sapien
gcttttgttattgaaaggtaaccaagccatactttccatgatgaacaataacatgttcagccataaatgactctactcagtaaagttaatagtaattaaataagccaaccaaactagcttcttctgcaatttggactgaaaatatggagaattttgaatagacaggaaataagcataaatacaaatgaaggcacaatgggaaaatttatttgcctacctcactcgagggatgggaattgtgttggagataggatcaagaatgggctgataattatgacttctcttaagtggcctccctgataaataagaacaaagaaatgcagtgagttcatattttaatgggaccaaataaaaaaaattctacaaacaacctcctggataaaaatggtggcattaaaatagctgcattaatttggatatatcaaaatgccctgagtgatactttattctacagtttagcaagagactccttgggataagtaactcaatccaggatgagatacagaatattgatgagatattgacaccacatttagaaaatacatgtatttatgtatctctgtttgtatgtttatgtgcatatatacactaattcttttagcaagtagatatggagagaatattacttgctttcatagcatgcttccaggagtttcagagaatacgcctctgaagaaagagaaattatgtcctctgacctcttttcttagggctgtttggaaagagagcacacacatcataaagaagagttcaaggtaaacctagacaagtgagtggatttgaagccatcatatcatacaatcagagaatcttaggttttgaatgaaatgtgaagatatatttcaaatgaataattggaagagtgaatgaaagaactaatgaatctaatagaaaccctactgattgcctacatacaatgattgccatgaattgttatttacttttctatgtatactaattaacacatctgcaccattctctcagtgtgtgcatatcttgtgtataggaggtagttaagaagttctcagtataactttattaaatttacaccctcagaaaatgtctgccaaatggggagaaatgtgtattcattttgctttcaccaacgagctagtaaagacttgctgaatgtttcatgaatgataaaagtgcaagataatataggataaaatgtataccaggcataaacactaaaggtgaaaaagatctgtaaatttagaaaaacatcatctgtacaataagcatcttttagagagtcatgatgtctcatggagagctatctttctggttgatatagtcctagtacagacaaaaaattgtattttcacaaaataaaatgtgcatttctaatttcatttacttcgttgtgttcctttcaatatttaccttcctaaaacactctataaatgcgaatacagttgaaaagttgcttatctgtcacactccctttcatggattccatgtcactttgttgttgttgttactgttttaagtccctctgactccgtctccttcagctccatcggaaaggtgggcactgtgtaatattttctttcccatcagagtagacctgaactctctgaggtcaagaccatttttgctgttgttgttcacaccatgttcttggggcccatcccatggtggcccccacacagggcacgatgactacattgtagaagacctgtgctccagtgtggatcttcctctttagatccagacttactgatgcacagatcaatgctcagtgtggatatcttcaggctcctcaatcaggacttccaaagtacagataaacaaacaaacaaacaaaaatacatcattttccactcagaataaacccaaacatcttccatcactgcaagtatgttgacactgcctgaatagcggcccaccatgtcagagtaaaatcatgcaagtagaactcccagtggcctatctcaacaccacagagtttcctaaaaagagacctaacacaatgagcattccttagagagtccaggtattcagatgatctaccttggcagacgttagttcttgcttccattttgtaatagccttctggaatttgttgtctttgcatattctagaatctctgtctctgtctctgagtctctgtctctctctgtctcctcacagtctgttactacttaatacagtgcttattggcctgagattggacattatttaaaagcaatttggagagttttctccatttcaggcaagaaaacatgcactatttttctgatatggcatgggacatcgaaaaatagttttgaacaaaattttgaaatttttggccc

SEQ ID NO: 19770 - DNA, 2300 bp, Homo sapien
acagaccagtctttttctggtcatcactgttactctaggcaaaatgttaccttttggcaataaatctcacatattccaggaaatatttttccgtgctaaatatcccaaattcttaattattttatccattacatgtaagatgtaacttccagactctggatcatcctagttatctttttcatatttgctccaagaagtagacagaaagtaaatagtgggacaagcatcctctaattccacttgtttatgacttgtcacttccattaatatgtaaaatatatgaagacaggcacccatattaggcacatgtgaatgaatattgtctgttattagtgttgttcctgagacattttttttaggctaattacctgaattctttcccaaactcttttaattatgaaattaaatttattttgtgtctccaactctcaaatacctaacaattagtgatttcttaaattaatctctatcagagtttttgaaagaatgggtatgtaatattcacgtactatggtcttaatctgaattccaagactccaagtgtttcttagacaatgcagcctagactgggacaatgacttgcatatacagtgtgtgaaatgaagcctaaatttttcagctggcttattgttccacaaaaatgtcagcaacatgaaggaaatcttagaatattgtgctattaatgcccatctttttttctaaatagatattcctggtcaactaactgtgttaatatgtcatgatcactacatgatcagtaccttttttatgtttgcctttttaatgtgtttgctggagccggagttaaagatataaactctcttgtcaacaaaactttctgtggtaacttttctgcataatatattttttagtttacaacctctgtaggtgctagttatatcaattacttgaactcttcccccgctcccctccattcttcagtactacaaatattgtctacatcctcatggatccattgaaaccacacagtacttatgattttttgagggcaaggacaacttatatctcctgaatctaacacagtggctatctcaacacaacagctgtgttagtagtaaaggaactgcaagggaagaagagtaaagagaggagggaagaaaaggaaaggggaaaataatggagaaaatattgactagcagagaaggatctgaatgcacgttttattcattagaccgaggcattctctatagacccgtaggtccaattttatagcttttctttatgatcatcacacttcatgacaaaaacaattgagtgatatctctcctaattctcactgtggcagagcttccttattttagggagagaaacggtttacaagcctttgctattcattatactggagagacattacaaaggcgaaatgtagagaaaatgggtttgggctggaactctctcttctctggctgccagcagtgaagaaggaaaacagtattgtaaatgtgattttattgtcctgtgactattaagtgggtagcacatttggtcctagcacttacccagattgttagtaaatgaaaaagagaatcattcaagattgggaggaaatccaatcggtcttatcattatgaaagcacattacttttgtgctatgattccatcaggttctaaatattgattttgctagaatgcaatcaaataagtagttaaaaaaaaacagggtttggttttcatatttatggaataaagtcttatactgaaaaatgtacacattgtctaatgtgcattttttgtgtattcttcctttatgattccacagacctttatgtttccataatcactcttctatgtttccacagaagaggaagaggcattcaatatgtcatatacaaacatggagtttcccaaagagaccttgagatttgagatcaatctcaaagtttgtgtgatgccatttcctatgcaatatgcatttcattaccttcactttcaaatttttgtttcttactttcaataaacctatgtaaaaatcacctcttccagcaagccttctgaaagagtatcctatgcaagtgtgctcactgaccttcattatagatgcttttaagaagggattgtaggccgggcgcggtggctcatgcctgtaatcccagcactttgggaggccgaggcgggcggatcacgaggtcgggagatcgagaccatcctggctaacacggtgaaaccccgcctctactaaaaaaaaaaaaaaaaaaaaaaaaaaaaaaaaaaaaaaaaaaaaaaaattagccgggcatggtggcagacgcctgtagtcccagctactcgggaggctgagg

SEQ ID NO: 19771 - DNA, 2300 bp, Homo sapien
aaacctgaagccaatagggagactctgttagccaaatgcccattttctatttatcattattattattattattattattattattattattttccttgagataggatctcactctgttacccaggctggagtgcaatggcatgatcttggctcactgcaacctcagcctcccacgttcaagtgattctcatgcctcagcctcctgagtagctgggattacaggtgtgtaccactatgtccagctaatttatgttatttttagttggtctcaaactcctggcctcaagtgttccgcctgcctcggcctcccaatgtgctgggattacaggcatgagccaccgcattcagccctttgcaaatacccatattctgaaaccaagtattgacttgggtttgtttatggctggtatctttattcaaagaaatccaaacatatggatggaattgtatcaggaatctataggcagtaagcccattcagttggaaactagctttgagtgctaacttgcaatgcagttagaatgctggggataaggtaacactggctgggggaaactgacaaaatttgggcatagacaatgaaaaatgtggtcaatagctgtgggtacatccagacttataccagtggatgaagacaggcttcctaatcttctccctcctgtttagcttccagtccttgttgactccaactgaccaccactagtaactaagtatcactggcagactaccaccaggagtggagtgagtgctgttaacccagcagaacaagctgtattcatgcagcaccaactgtgctgatgacatggtgaagacgatggggctgacaggcacataacacacacacacacacacacacacacacacacacacacacaaaatattgtaaaacactccctgaatgtaaaagcataatgctccctgaacttaaagaaaaataagacattggcctaaatgttttcagactgtgagtataccaaattagcaaaaaataaacaatctaggaagatattttcagctttttctttgatttctcatgcttctgtctacactgctgtttttccctgagactctctgcatatcccagtttgggaaaaaaaccttgccagagtttatttggaaaacccatgctgtacccatctgaattttattttggtgtagtgtaagatgtcaacctaactttatatttcttttgtatgttcagcctcctttcacagagactgaatttcaatcagctgctctcagttgacaatgataaaattatctctatatgggcaaatgcgtgctctttgtcgaaaaagaaagcttcagcttcatgttccaggtgagttaattaggcaatgtatgaatgctaatatctctttcacatattttgcttaagatctgtcttaggactctcgtctggcccatatggttttccaagggcagaagggcctctttttgatgagaggcagttttcagtaactcttaaagtgataacagcaaaggagaggagagagaagagtaagacaaatcgaaacattcttcaattgcttcttggccttttggctaagctcaagctcaaaacaggtcttcaaggagaaaatacatcacaaagaaaaggatgttttatttcttaccttgtcctagaaaaatttccataaactctattggcttaattctgtaaacttgaccaatatcagagtgcttcctaccaaggagggtagctgatgagcgtgaccatggtacatcctagaagaatgtgtgatgaagaagctttcaccgtgtaaaagagttgaaaattattcaaggagacattatggtcttggccataatttaagaaccagtttaaaataatttttatatagaacttagagtctaatttctcagcacaattcttcttccctcctgagtgtgggctgctggagtgtcagttccaaattcttatgcatgagtaatcttagcatattcagtaatatattcctcttatgagaaagtaatcaagtacaatataactgatgactttcttgattcagtaatcagtaatttgtgatcaattttacctgatggtgacagcttggtgtataagttagtgctaatgtatattactgcatttcatttctgtggagcctgtcagctgagcaaaggagggaaactcaggatggagaactcctccccctccatccataagtggcacaccactggcctcctggtgttattaaaggaaaattggaaaagtttccagaagattaagcagaaagcttacaacttgcacaagactctcaattttccagtggctctgacagaaggataaatcttcggct

SEQ ID NO: 19772 - DNA, 2300 bp, Homo sapien
tatatttaatttgtaaatttgtttggttgtatatgtatataatattatcttaggtttatacattaaataccattacataatgaaagtaatttattcaccactgggatcagataatttactcctttacacattgtcaatattttattcaagattgaggtttcacatcaaacctcacactcattgctggagttatgccttaaacagagtacttgtgacaacagtgttactgttgaatggctgtgataattagaaagttcaatttgtattgtttgttgaaattacatttcctgtaagttccaaccattggtggcagttattcttaggaacaaatcaaaggtgctctttttgtttaaactttaagttataggaggataactatcatgtttttctttattctacccaaatccttttcttgcctccataaatatttttgagaacttattttgtgtaaaacattctgcattagccattttttttccttttccaggttaaacagctccacacctttcaccctttcttggaaatattttttttctaatccctcaacattctaattacgccattttgcacatactttagtgatgtccgtcttaaaatgcagcacttagaaataaagacataggctgggcgaggtggctcacgcctgtaatcccagcactttgggaggccgaggagggcggatcacgaggtcaggaaatcgagaccatcctggctaacacggtgaaaccctgactctactaaaaaatacaaaaaattagccgcgcgtgacggcgggcacctgaagtcccagctacttggggggctgaggcaggagaatggcatgaacctgggaggtgaagcttgcagtgagccgagatcgcgccactgcactccagcctgggcaacagagagacgggcactccagcctgggcaacagagcgactctgtctcaaaaaaaaaaaaaaaaaaaaaaaaagaaatgacatagcagtttgggaggccagggcaggcagatcactggaggttaggagtttgagacccgactggccaacatggtgaaaccccatctctattaaaaatacaaaaattagcctgactgggtggcgggtgcctgtaatcccagctacttgggaggctgatgcaggagaatcgcttgaacccaggagatggaggttgcagtgagccgagatggtgccagcctgggcgacaatagcaaaactccatctcaaaaaaaaaaaaaaaaaagaaataaaggcatagaaaatggagactttcattcaatatcatcattaataaccagtaagtaggaagtattaaactcagcaatgcattagacagctagcggggcaagacacggaagtaaatggcacactggtcttaccttccaagagttttcaatctaattggaagggagtattacaattttagattataataattataaaaacaaacattataggagctcagagggtttagagatctgtgttctgtagttattacaggaggcctctagattctaacttgggttagggcttgaaactacattgaatttgaatattcccagtttaaacatgcacgcaagtattatgtccaaagtagcatgaatactgacaacaccaaacatgaaacccagatttatttattctctatttagtcctttccctactctttagagcagaaagagaaaatccttgcttgagatagcaaattagtgctacactttttgggaaggccactggaatttaaacctggcaaaattccaatttttgtgcttgtaacctgtttagccggcagccagtgaaagctgttataattctttttgaattgaattttctttcgtattgttttaggtacagctcaagctcaaatgatagcgtctctttttctttaaaaaaaaaaaaaagtgctgtcaagacaggaaaactggaatgtaaccagattagccgtttcccgtatacatttgcccttaagcaagatggtgggcgccttgtgcacatgcgcggaagggttgtttcggcggggagttccgccgcgtcggaactcgctccgggcgtggattggcggcttgctggcgggggcggaaccggaagttccgtgttgtggggctcagctggttcatttatgttgtttttcctgtacctaagttcccgctgtaggtggtacctttgcagacggtgcgatgggggaagcagagaagtttcactacatctatagttgtgacctggatatcaacgtccagcttaagatgtaagagaacactcgggacagggagtgggattgctggggcgtagggacgtgggggcaggggcctgttgggagtg

SEQ ID NO: 19773 - DNA, 2300 bp, Homo sapien
agttacatattctttgtgtttgattgaagactagatttcattattaaatttgaaatgagttttgatagaatctttgatctcttatttcaagtaggcagaattttctgaaagcagccaaacagtaggaaatctgttcgatgaagtttccaacatagcagctgcttctgttcataaggagcacacttttttttcctataagcaaagtacagccccagttcccagtcttataaacattcaatcaaacttagatttgatttgtgttttcccactatatctctgattcattgaatcaatagcatatgctgtgtctattcattccctaaggagtaattgtttttcccatatttacagtctgcctattacatattcagaaatactcatggggagaaaagctattgatgtgtggactcttgcctttaataaacactgcttttgtgaatgtaaggtaacaataagggaaataatttcaaatagttggtttaaaatgatcattcttctcttcctttgagcatataaaaataataaaatgtgagaatttaaatgcttctctaagcctactctattataacaaatgtattaaaatagaaattttaattgtgctgtttcctttgaacacttgaatttccttttttcatttgttccctttctggtgatttaaacaggattcttgctgtagctaaatccttaggggcctatagttgtgcagacaatccttttaaaatgaatagtgtcaaccttttaagccacagaggggcgttacagtctccagtttgtaaaatgatgggcatcagaatctataaattgttgcagttttttatttttatagtcattctagggtgttgaaattgaaagtaaactttggctgctttgacatgttttctataacttttaagacctttcaaggtaataaaggttatttatgccacaaaataaaattgccaggaaacaggtagcccactgatgtcatcttacaatgggtacctggacaattttgtttgcattcctactttaagatgacagctttcaaagaaataccttagagtgctttagaatctagtttattgatgtgaacagaaacctcagaaatgattcaaatctaggtcttctagtcttgatagctaaccttgtctctcatatttggagatgacagtgtcacttttctttttttaggtggcctttttgtttgaatagatgtttggcttgaatgatttttttttttttggagatgaagtttcattcttgttgcccaggctggagtgcaatggtgcgatcttggctcactgcaacctctgcctcccaggttcaatcaattctcctgcctcagcctcccacatagctgggattacaggcatgtgccaccaagcccggctaattttgtatttttagtagaggcgaggtttctccatgttggtcagcctagtcttgaactcccaacctcaagtgattcacccgcctcggcctcccaaagtgttgggattgcaggtgtgaaccaccacacctggcagacttgaatgatttttgagaggtgtttgatacttgatgcttattatgagcatcaacatattttttttcttttttttttcttttttttgagatggagtcttgctctgtagcccaggctggagtgcagtggtgccatctcggctcactgcaagctctgcctcacgagttcacgccattcttctgcctcagcctcccgagcagctgggactacaggcacccgccactgtgcccggctaatttttttgtattttttttagtatagtagagacggggtttcaccgtgttagccaggatggtctcgatctcctgacctcatgatccgcccaccttggcctcccaaagtgctgggattacaggcatgagccaccacgcccggccaacatatattttcaataacaggaaatggctgcagccatagtgtttacttggtggtcagaaagagcaagatacagcagtgagcccctacattgtggtcagctatatgttcatttggaaataagtttgctgcataaacacaggaaaagctgaataccctaagatgacggagataatcaaggactttaacaatgaagggtagaaggggatggcttggatttgaataataccatattgacagtttcaccatttagaactgctgttttttgttttaatgttcggctttagattcatggaccacaaattgaactgagtgccaaggaaagtttgaggtagtgctatgttctctggtttggctgcagccccacttctctgtctttccttctatttaagtgattcaaacatttgtttcctgcctgcct

SEQ ID NO: 19774 - DNA, 2300 bp, Homo sapien
tgtgtagggagttgctactttggctcatggatgtctttgagaatctgatgaaagtgatggattatgcacttcagaaaattgcccgtatgcttacacatacactgaaatttctgcatacacttgcagaggatctgtggactcctgttttccttgtatgagctccttagagctgaaaaggctagggacccttatttctagtagttttaaaagtaattttgtagaccttaatgtaacagccaaagctggatattcatgaagactggaccccttaaggcactgggataagtgcatgttatcctgtggttgttttcttgctttaaatttcagatgaaatctaaattagatgaaatcgtattgaatctcaaaaaagaaatcacaacaaagattctcctgcctgtcatttatctttaggaagataacttccaattactagggctcaaggtaatttataaaataacattttcaaataaaaggatattccaaatttaaggtaatttaaaattcagaattttattccaactagagtttgtaagttttaaacatacattctctgaaccattttccatgtttttgttttcccccagcattttataggaaagttttcaagcatacagcaaagttgaaggagttttacagtagacaaccgtgtatctaccactttaattctgtcatcaacattttgccatttgttttgtcacatctgttcatccatctatatgatgttttttgggccattatttctcttggttattaccattttttttgtttttgtttttaaatttctttgactcatttttttttctttggattaatatatttctccaaatttttgtcttatataatttcttctcaatgaccaaactcaatagggtctctctctctcagaacaattttctgaccatttatgtccagaatatccatcttagcatgccactttatgtgaggttttatgattccccctttctaaaaagaatataatttctttattttttttttgttgatttaaacatatacctaaactaatttagaccttcatataattaagggaaggactgtggggaaaacataatattattccagaataaaagatacagatatttgagatctcctctcattttataaatgaggaatttgagtcttaaagctgcacaactagtacagattgagcatctctaatccaaaaatccaaaatctaaaatgctccaaaatctgaaactttttgagtgctgacatgatgccgcaagtggaaaatcctccagctgactttatgtcatgcattacagtcaaaacacggtcagaactttgtttcatgcacaaaattactaaaaatattgtgtaaaattactttcagtttatgtgtgtagggtatatgtgaaacataattgaatttcaagtttaaacttgggtcacagccctaaaatattttattatgtatatgcaaatattccaaaatccggggaagtccaaaatcccaaacatttgcaagcatttctgttatgggatactcaacctgtagtatacttgccattaaaaaccagggctcttcactttgcatctggtacattgttatgttgtactgtttcaccttatttatttcagtatacctctaaaaataaaaaatgatgatagatatataaagaatgtcttctttgtattaggcatggtgccagactattgacctgtatagtttctgattgccttagcaactctgcagaagagatggtatcttattttacagatgaggaaacaagttaaaggatatgcataagactgtccagcgagtacctgggagagcttggaatgttttaaccacatgactgattgcagagcttgtgcgctttccatcgtgtagtcttctgactactagctagttcactgttctttccagtataccctaatgtatctcattgaaaacccaacttgttttttaggtcctatttacctgtgtatttatcttatatatcaacattttcttgtatgtatagtacaattttatgcattaattcatggccaaatttgaaatcaatatttttattttccagagtgcccttatgcctgcacagttgttttttaagacggaagatggaggcaaatatccagttatatttaagcatggagatgatttacgtcaagatcaacttattcttcaaatcatttcactcatggacaaggtgaacatgaccttatgttggtggggaacatttttttcgttttggaatactgtggcttagttcatttgctgtttatggaacagaagtatttgtaacattcaggtacgatcctagaaagctcaacagtct

SEQ ID NO: 19775 - DNA, 2300 bp, Homo sapien
tatgcagtttttcattgcgtccaaattacttccaagttatttagactccctcgtatgttagtgtagaccctttgcagtttggcttttacctgcactttcaacccttatcatcttcaaaagccttcaaaaagaaccttctttgtagctctgttgattcaccgccgctacctccaggcaacacacctcttctctttgcatggaatgagttccctcttatttccccaacttttgagtgtgtgtgtgtgtgtgtgtgtgtgtgtgtgtgtgtgtatgtaagagagagagtgtgtgtgtgtgtgtgtgtgtgtgtgtgtatgattctgtctatattaatttggtcctcgggcattttgtcttaatttgagatctcccacagaatctgagacacttcctggcacatagtaggcaccaaataaacatatgtggttttatatgagtgccgagtaccatttctttaggaagtttattttctctgataattgcctttagtaaaaatatttaaattgcttcttaaattctaaattacattatttttattcacatgaaaaataaatcttgccaatttttttctagagtgacactttaaaatgtgtcagattaaaagccatcaacatcttggcatttttcacatttgtacatgtacacatgcatgtgcacacacacacagacacacttgtcagcaaggtgttttgccttcactttttctctgagtaataatgaagtgaaggtcttagaaacagaattcatgtaagcagcattcataattcctccaagagaatgccagtatatttgtatcaaacaaaaagggcacgagttatggatgactcagtgtatattcagccaaacaaagaaatcttcgttgattttattcctactggggatatctcagtattgaacaccattaatagtgttggccccaaaacagctcttcactaggcctctcgacttcttcctttgatttgatttccagaccatttctggaatgaagtagttgcactctctgggataagctacaggttttcacagcctctcaaaatgtggcaccaagaaccaagcacactactcaaaatcactttatctaaatcactttagaattcagtggaatttttgccttcctagtgctggatgagatgatttttgcttgtctcgtgttaattacattcatcttgagcttacagtcagcagacaccctctccttgaattattttctcatataaactgatttttaagtgaagcctcaggaatcctatacagtatagttaattgcaatcctcttggtagcatttagcaaactaattaatgcactttttattttattagtagtcttttttaaaactatagactattgtttatctttgtgaataattaagtaaattattttctgtttatttctttttaatttttgtagtactggagaaaatgaaactgggattgacccatcaagatgcttggctcaataagaaaaccacgttaggagcaacctttgtatattggagacttcagagtaaccagcaaggaagagaaatcttaatcttcaagttaccatattttccaaatattacatggtacctgagttctgcttccttggatgtcattgcttaaatatagtcttgaagggcttgttttgaaatattgtatatattttttcaaatgtatacattgttaataaattaagaaatgagaaacattcttatttatgtacatgttatgagagttctggaggaagtaatatgttgaaatagtaaaacattttagtttttgagtttaaaatgttattttttcctcttatatcttcatatcaggacagcagtaacctgaatttagattgtcacagtttacaagtttttgtttgttccttctttcctctctcttctcccactcacttttgtgtgttgtttgtttttgcctaatttacatgtttaaagttctacttaaaatttttcttcaagttttacatgtgatggctcattcttctgcagttcaagaattgcttatatttttagaagatactcattttctcttacaaataattaattttttgtaaactacagttaatagttcttctagcttgtaagtgtgtaaagtagaatatgaaaatgtggctatttagataactggccaaaaggtcatatgaccaccagttttagtattgagcataagatatttttacatattcatgtaagacaatgtaaattgtctttctgcaataaattttttggatgcaaatttagatttcaaaagctttttgatgttataaaggagttgaggaacaaaaagctctttgaaatagctcacctaga

SEQ ID NO: 19776 - DNA, 2300 bp, Homo sapien
agccagtccaagtcccaaagctgaaggaccttgagtccaatgtttgagggcaggaagcatccagcatatgggagaaagatgtaggcttggaggctaagccagtctaatctttttttttttttttgagatggagttgccctctgtcacccaggctggagtgcagtggcgtgatctcagctcactgcaacctccgcctccgcctcgcagtacctgagattacaggtgcatgccaacacggctaattcttgtatttttagtagatacagggtttcaccatgttggccagttggtctggaacgaactcctgacctcaagtgatccgcccacctcagcctccgaaagttctgcgattacaggtgtgagccactgtgcctggccaagcctaatctttccacgttcttctgcttgcttttattctagttacactgtcagctggttagatggtgccctcccagattgaaggtagatctgcgtttcccagtccactgactcaaatgttaatctcctttggcaacgccttcacagacacacccagaatcaatacattgcacccttcaatccaatcaagttgacatccagtagtaaccatcacagatggctaatacgggagatattcatgaagggtctgggaaggggatttggaagagatatggacacaaaggaaggaggaaagaaaaggggaagtgagacgggaaccaaaccaaacaccctgtattgcacaattgagcctggagttggcctgctcgccacagagcagtcacaggttttcaggatgctttagtgatagcagccatcagtacctctcattaggagcaaaagccctgattggtaatagtatattctacttatttagagaataaaagttccctgttagaaccagccttctcagaatggcattcagcttttcagaaaagcacagcaccagcatatttcttatctgccttgaaggttataataaatcccttcttctgttaattcataaatccttcagccacatgccattttggggccatatgctttctttcctccctctaacccttggaaagatctttcatatccaatctctgtagataatctgaatgtgaaatcaggtatggttatctaatccctctaatcagaaggtcagcagttacctgcagcttttccatctgtcctccagctgaatgctgccatttagtaaatcaaaaattggttacaaattagcaaagctgactggctcaatgaaatctagcctggagtctttgctggaaggggggaagtttaaatatggtttgaagggagatttgaggtgaactctatttatcaaagccgtggagtagcagcataaaagatgagagatgttctcctgggtaaaaatgtcaaatcacatgggaaatgggaatatttcacatggtgattactgaattttacaattgttcgcaaattgattcagcccagaaatcaactgggaagtctcccacaggtgtctagcactctgcaggtattagcgtgatacagggtaagtctcaaagtacaaaaaaaaacacacatgtgaaacaatttgcaaacaatgaagtgctaacctgtgtggtgtgaattacagatgcattaggacaccagaaaaggaagaaaagacagtggcagctgaagacatttcaggaatgcttcactgagaacctaagtcttgttctgggccataaagaaaaggggagggtgtggtttctataccagagataagaaaggagaaaattggacgtggaggaaagatatgagtaccaatccgagcgaacaaggaagagtgagtaaatctgtccagctggagttggaggtacattctggaaaatggtgagagaggctgtgtagggtagggggacacggaaagatgggccaagacatttggagctgatatttgatatggtttggctgtgcccccacccaaatctcatcttaaattgtaatccccataatccccacgtgtcgagggagggacccggtgggaagtgattggatcatgggggcagttttccccatggaattctcgtgatagtgagtgagttctcacgagatctcatggttttacaagcgtctggtatttcacctgattgcacttctctcttctgcctcctagtgaaaaaggtgcctgcttctccttctgccatgattataagtttcctgaggcttccccagccatgcgtaactgtaagtcaattaaacctcctttgtttataaattacccagtctcagatagtatccttatcgcagtgtgagaatggactaatacaatatttaaatcaaagggactcactgatgtttctcaaaaa

SEQ ID NO: 19777 - DNA, 2300 bp, Homo sapien
tgagcactgtgaaaaggaacaaagagcagagaacttgtattcaggcagaaaaagttaaagagctgcttcagttatggaggtcaaatactggaagaggtaaatctaaaagtaggacctggagggtggtaatgctccctgcaaaggtagagaacactgttgactttgttttgtgaggatgaggatgatatacttctagacctactgaggttgagatataatcagggtttggatggagacaacccagaagcagttagaatcatttctgcagctcaaagaaaaaactgggtccagaattacaaacttggcagttacctatagaaagatgataagtggacctatgacattgactgaattcacaatcaaagagtaaaaaagatagaaaagtgggaatggaataattgggcaaagtttcatttacaacctgatggatgatctgtaaaagaaagagattacaaattggaccccatcaaaatttaaaactgctgatctttgaaagctactgttaagaaaaaccacacactagaggaaaatatttgcagaatatttatatgataaaagacttacatccgaaatatataaagaattctcaaagtgcaataaggaaataaacaccttggtataaaaataagcaaaagacttgaacagatactttggcaaagaagatatacagatggccaataaacacatgaaaagataatcttctcttcttgggcgagtgtttgtaaacagtagactgacagcagcacagattcaaaataataacatactcttcatatcatatacctgtgtggtacttatcacttgtcagacacagttttaagcactatataaatattagctcacttaatgagttaacaaagtagggttttaattaactattcagtgataaagaaattgaggcacagagaggtgaaggaatttgcctaaggtcatatagctggtaagtggctaagcccagatttgaacacaggcattctggcttcagagactgtgctcttggctataacaatttgaagcctctacagaaaccagcaagtatatattgagtgcctactcagtgcacatattatagaatcacaagaaatggactaaatatagttcttttcctagtggagcttaaaatctagatagaaagacaagtctagtctatgcacaccaaacacttgtctgcatctgataatgattcaagctttagaaaatagacaataaacatgttaaacatcatcatgttgattaaaagacaggatcttattatgacaattaggaattattgaaaacattcttgaccctctgtagtttagaagttctttagagaaaaacaaagaccgcaaagctttataagaattcaaacaggtaataatagtttggacatttaaaaatattcttctacaatcttttatgctagtataattgtcagtaaaaatatttatcaattatctctttcatgcttgatagtccttgtgatttaagttgtttctaataacttaacgtaaacaagcatgagccttgtccaaatatgacaatgatctaattcaattacccccctatgttaaacctgcaactgtctagtgagctgaacaattcctgttagccggctgttatttcaataacactgaagatccatccttatgagccctgagttactgttctgttttgtttttgttttgcttttccattttcccggaatgaaaactgcaatagaagagtgataaaatgcaagactataagcagaagaaatccttattaattgactttgattaaaagaaaatagcatctttgaagctgtacctacagaagtcatcctgtgagacatagcaactcctgtgaggtctcagattcactccattctagcagcgcagcctgaaaaggggtcgaatgtgtgtgtgccactgacaactgtgactgtgcagggggtaggcaggaaagagaaaggagagaaacagacagtggggaagggaaatggagaaagaatcaaatgagggaggaaatgaaaatgagagagagagagagagagagattgtaggagacgtgaaagagtgaaggatcggaaggaagggtgggggatgcaaaagccagatttttattggaagcaattgaagtggttgctatgagacccgctcgagcggaggaccagcagccagcccgacgctgatggttcttacctcgtactaaaacctttgctttgacacagttttagagttgcttaatattcgagcaagcacctgacacgggtgactttctccttctttttttcctccggtccctcgggtaagatggaggtagaaaatgaagccagctgc

SEQ ID NO: 19778 - DNA, 2300 bp, Homo sapien
aactcctcctcccaagtctcccctgctagagcggtattttgcacgtcagtaaattggttacttgtttgatggatctaaaaagaataattcagtaatgtggtagggtgtgaatctcaatcataaaaacgtacaggtttttctctgtgtggggtctgtctactgcccactcctcatctggtgttgctagaagcttgtctaaagagattgaataatacctaaaatgttattcatcaaatgaaaatgagggaaacttcaggcattttaattaataacagttcttttcagtttgcttataaagcaagcaatgaaatagttacttagtccacaatagcattagctctgggcaagaggtaatcttatcacgatgtttcctcagatgtcagacagcaaaggatggggtgggttccgtagaaatagagtttaaacaatctgtacagtttacagataacaacattataccatctgaaggtaaaattaatgagatactaatttatagaacaaacacataaggtatttatgtttacaacaaatgagcttaaacatatgttagcaataacttagctagaaaatatatactttagtaaacatcacaccatgtatttggtccacctatgatatgcatcacaaataaatgccacttattctttaacctaatggatatttgtttctagggacaaccctacagggtgcatgcatgcataattaaggaaataggtaatctgaataaagtgaaatgataaagacacaaccacagactctgccagcagaaaaattaaatacagcaaattagtttgtgtgttttcaaagcatgaagatataaagtttaaaaaaatctgttagaggaacactccaatgccaagtatgtgggagcaaatagaatagcaaagaaaaaagactggtttataaaattttccatgatgcaaagaactgaagccaatttctccccagacagagccctgatgctctgggctgctgctagccaatgtgcagggacctgtcacttgcacagtagctttctgagactcaccctgtatcccttctcccacatcccagcacacactgaatgccatttccttattaactccagagcaaagaaattctttgcagagcaataattgacagttggagttacagcttgacttctttcctttgaaaaattgctaagcatttgttttagaaaggcacactcttcagattccaatgaatcagaatccgacaccatatttttcacagtttttcacctccgagaatatcatcagtttagaaaaaggaatgctttcctttgaaataaccaatgttaccaatgttactttagatgttggcctgattttggaaactattttgtacaaacgtactagaagtcaggccttttaaccataaatgtcatttcagaagcgccttattatttgcaaaagtcataactgagagtgactctgaatatccaaggaattatccccatctgttcctaagtgctttaactggtcaaatgtcagatattaaagggaagagagctgagagaccaggaaagatcaactgttccagcaaaatatttagactaataatttattagaacataaaggattatactgggaaaactatcttatatcaaatgcatcaatttgtagtgaatcttttctaaatgtaataagtatcataggtataacatgtcaaagaaaaaaattaaaaagcaagaaaacatgtttttgcatgttaaaaagagtaatttgaagcagaaacttctcctctgtaagttacgttattctgaaaactcagaaacatatttttattcatctaggtgatcaggagattttatattaggaactgacagggatcagtttcggggcttatctcggtgagcctctgagcccccacaaaacagcaaagctaatctctagtggtccaacagttaaaataattgatgagcatgtgttgaatcctcaagagaggagggaggaagcaagaaggaaagcttgaagggaggaggggaggggggcaggtgctgatttcagccctgtagcgtcaggattgcgtcaattcgggttccagccacgtctggagtctcggagacgagcttctcagaagagccaaaacaggaaccgaggtggcaaatcactgtgcgagggcgagtggacctccctctttgcctcctccctgttccaggagctggtgccctgggctctgcgctgttgttttcagcgctccgaaagccggcgcttgagatccaggcaagtgaatccagccaggcagttttcccttcagcacctcggacagaacacgcagtaaaaaatggctccgatcac

SEQ ID NO: 19779 - DNA, 2300 bp, Homo sapien
ggaatcactttgagatcatgagacacagtgaggcaagtttaggatagatcagtagtcattccactaatgactacttcataactacctattcaccttaatgcctcttttctttttgcttctttctattctcagtgcagtcaacttaggtcaggagctatttgtaattattttgacttagattactgcatgaatgggaatggaagtgggaacaaattagaaacattctactctacaccatccccttcgcatccctgatttcatggagttctcagacaagcctacaaaggaagaaggtactaatgcctcccctttctatgaaacacaaaaattagggaagtaatcttatgttcttatttctagagaggaaatgcattgaatatatgaaagattttcgaaagactatataaatacccaggtgacgaatcaataagggatttctaaggaagtttggagaagctggaagattttctgccttttgaggttgcagtgatgcaatcaatcccttgtttgcagaggtttaaccctgggctgctgccatcaaatggtaggttagagccttgtgtgcagaggctgtggccacatagtcccaggagctctgcttgggtagaccaatgccagcaggcctggtgtggccctctcttgagtttattcatgtatactagatccagagggcacattggaagctctattctactacttttcaaacagtgaagggagtccttgtattcctcaggggtctctcagttcgttcactccaccatcccttcccaggccaccttcctacatgtgcttgcatcagtcaagcagcaaggattcagaaccctcaggaatttaatgaagtttaatggctccttttttatttttgtaactatgttcttacacaaattctccatggaaagcattttcttcaagcatggtttcctagaaagagcattggccgagctgtggcctgaactgattgaataattcattttacttcttagagtctcagcttccctttctgcaaaaatggataataataagtgggctactatctcatgtatttgtaggtaaagttcaaagagatagataatgggaaaactttatggaagcaaagatgttattattgtcattgttatttctactcccacactcccactctgatctgagtttatagcacccatctccttcaacattttattgttgaagatgcattgctaacctggtgaaacagacaggagagaacagagactatctaggagtcatagtcttcttctcctttccagttcttttcaccaatataggccagggactattgtcacagaatctgcagaaagtcagttctgaaacacctttctagactcagctttttttattgcctttgagtgtaagctgagagtaagtcccatcacttccatcagctcatttaaaacaaaaatctctgccctatgtctttcttgacttggggaaataatcttgaaagagctctatgatatatgctcatgttattagaggtttatggttttaattaattagtatctttgtctgtattagggctgctataacaaaagtgccatactggatggcatgagcaacaggaatgtgttgcctcacagttctaggattcagaagtccaacatcaaagtgccagcagggttggttccttctgaggctgtgacagagaatctgtttcatccctctcttagcttttgatggtttgctggtaatctttggcattccttggcttatagatctttgccttcaccttcacctgcatgctccgtgtgtgcatgtttgtgttcacatttccaattgtataaggacatcagttgtattggattaggacccaccctacttctgtatgacttcctttgaactagttatatctgcaatggccctatttccaaataatatcacattatgagatcctggggctgaacttcaatatatgaagcttggagggacacaaatagaccgataacattacctaccatcataattatcatgtttgtgagaagtggatttgcagaggtgcttggactcccagggtctagctttgacatggcctctctagtgttcagaggaaagagaatcaaagctgctccattgtgacatcacaatgcacttttctttgtgcattcacacgatgcattttcttttcttatcaccaaactgttttgaaagataaaagtacttcctgaatatgtggatggtgagccacgtgaatggaagacatggagatatggactgttaacaccttgtcaaacatttattgtcccttccacctctaaacttctgtgataataggtgaacaggaccca

SEQ ID NO: 19780 - DNA, 2300 bp, Homo sapien
ttgatctctacttctatcatcagctcatatgctctgctattttttttcctaactaagcattattttctcagcaataacaatgacgcggtaaaaaagcatagtagaagacctatcgaaaattgctccacgggaggtcctgcagtgacagaagaaaagtttgtagccagtcagaacattcctctgaaaaaaagaggacagagcacttggatcagtaaaagggtgaactatccgttctgagtcagactgaatctgcatccagacaggaatcgggatgggattggggctggaaggggttcacccttcaatccccagtctctttcactccacttcactgcagcgttcctatgaaaaacttgacgaagaagttctgtgaaggaactcaaaccagcagccaatgcagggaggcagccactgatggcctcagtgagggaatgcccccgacgtacctccaaatcattcctcagtccaaatagcctaaaactctcatgaagaacgtgataggagtcctctcagaatccgagtcctcggtcaactttaccccaagttctttgagcggaaccatttgcagaccttcccgaatccgtatctatcctatattgttttacaatgtagacatgtctctgaagggttccattcgtgtttccctgaaaagaccccctttgtaggccaaatacaaaaactcagagattacaaatgccaccatattttgtaagaactgaagacattccactttgttcttcccaccctgaaaacaactgcatgccagtctgcgtttgtcatctctccgtgtccttcccttcatcaagtgtccaattctcttgaataacgagaaaatgcacatgagatctgaatgcatacaagtcgcttaacaacaacaataaaataataataataatttaaaaaaaccctgaaagtgaaatataattaccaggttaaaaaaaaaatgcgcccagtttcgagagcctatcacagctcacgtctgggcgcgcagtacccccccgacactgctcctgttgtgtcagatagtggcagtgttgagcccaggaatacgcgcggagcccgcggcgatccccgcggccgctcagtcttcgcggcggactccggcgcgcaggagccactgggccgcaagggcgccggggagcgggaggggcgctgggggcggcaaggggtcccagatcccaggccacgaactgttttccttttccccgggcaagagccccgctcccttcaactgacagaaattcactggggcaggggggcgagtggggagagaggtcgctcagggctcgctactggctgcgcctcccccggctctggtctgggaagcggctctgggccctccgggcgagcagcttgggcgccggcgccccctgcgaggaagatcgcggggtgacggtcggtacccgttcggctgggccgcgctgccgctccgatccacctcccttccgcgcccgcgccctcccccttcctttcactaggagtccgggattcggagagggcgcgggaggcaggcacacgggcccgaccccactccagcgctcaccggggacgcgggcgggcggcgacgggacgcggcgggggcgcggggcgggcgcggccatggagcagcagcggcggcggcggcggcggcggcggcaacactagcgaccgcgggcggacgagcgggcgggcagggccgccgggctcagcggaccgaactgcacagctcagcaaaagcgccctcgccctccgcgcgccgcctcctgcgagcccaaacccaccaacattttttaacgctccaacccatcctttgaagaaaagcaaaaaaaaaaaaaaaaaaaaaaaaaaaagcaaaaaaagaaaaagcattgatcggagagacggggatatatatatatatatatatatatatatatatataaaattttttttggctcctgctaaaattagcagggctcgccgcgcgcctgtgtgccagtgtgtgcgagtgtgtgtgcgtgcgggcgtgtgtgtgtgaatgtgattactccaggactcctcgggctccggagacgccattttcccccttgatatctctctccataaatcggtggcgcggcggaggcggcagagtcgggcgggaagcgcggggccggccggggcgcccgccgctcgccgccgcctccgcgcgcccgggggccccggcgccccccgagctagggcggccagctcgcggctcgccgtttgacagatgctcatcgccatggagttgccgcagcagcacctttgggggctcgggcgagcgacgggagccgggatctgagcgagcgccggggccagcg

SEQ ID NO: 19781 - DNA, 2300 bp, Homo sapien
tccactttgttcttcccaccctgaaaacaactgcatgccagtctgcgtttgtcatctctccgtgtccttcccttcatcaagtgtccaattctcttgaataacgagaaaatgcacatgagatctgaatgcatacaagtcgcttaacaacaacaataaaataataataataatttaaaaaaaccctgaaagtgaaatataattaccaggttaaaaaaaaaatgcgcccagtttcgagagcctatcacagctcacgtctgggcgcgcagtacccccccgacactgctcctgttgtgtcagatagtggcagtgttgagcccaggaatacgcgcggagcccgcggcgatccccgcggccgctcagtcttcgcggcggactccggcgcgcaggagccactgggccgcaagggcgccggggagcgggaggggcgctgggggcggcaaggggtcccagatcccaggccacgaactgttttccttttccccgggcaagagccccgctcccttcaactgacagaaattcactggggcaggggggcgagtggggagagaggtcgctcagggctcgctactggctgcgcctcccccggctctggtctgggaagcggctctgggccctccgggcgagcagcttgggcgccggcgccccctgcgaggaagatcgcggggtgacggtcggtacccgttcggctgggccgcgctgccgctccgatccacctcccttccgcgcccgcgccctcccccttcctttcactaggagtccgggattcggagagggcgcgggaggcaggcacacgggcccgaccccactccagcgctcaccggggacgcgggcgggcggcgacgggacgcggcgggggcgcggggcgggcgcggccatggagcagcagcggcggcggcggcggcggcggcggcaacactagcgaccgcgggcggacgagcgggcgggcagggccgccgggctcagcggaccgaactgcacagctcagcaaaagcgccctcgccctccgcgcgccgcctcctgcgagcccaaacccaccaacattttttaacgctccaacccatcctttgaagaaaagcaaaaaaaaaaaaaaaaaaaaaaaaaaaagcaaaaaaagaaaaagcattgatcggagagacggggatatatatatatatatatatatatatatatatataaaattttttttggctcctgctaaaattagcagggctcgccgcgcgcctgtgtgccagtgtgtgcgagtgtgtgtgcgtgcgggcgtgtgtgtgtgaatgtgattactccaggactcctcgggctccggagacgccattttcccccttgatatctctctccataaatcggtggcgcggcggaggcggcagagtcgggcgggaagcgcggggccggccggggcgcccgccgctcgccgccgcctccgcgcgcccgggggccccggcgccccccgagctagggcggccagctcgcggctcgccgtttgacagatgctcatcgccatggagttgccgcagcagcacctttgggggctcgggcgagcgacgggagccgggatctgagcgagcgccggggccagcggagccggagccgccgggacatgggtgagcacgcgcggcgaccttggcccgggagcccgggcgcccagcctccctccgcgccgcgggcccccgcactcccggaaccgggggcgacgtgtgtgccctgcatgcaaaagttcacgtcgccttgctgggtctttgactttgcacccggcgggaagggggagaccgggccgagggggcgggatgccggtccgggcgaggttgcaggagatgggcgcgattccggcgggccggcgggtgggcggcgatgctggctcaattggagtggctcgttggtggcggcgatggtggaagctttgggctggagggctgggagcttattgagtttcgcctaatctgatctaccccccctccgccccccgccttttgcaccctccctcggtcctgcagccggctggcggggctggcgggtttggcgttggtggagtggactcgggagggggagggggtaaggaaaggggtgggaaggcaggattttttttttctctctttgtaacttgcaggttaagtggagctagagagctacattgtaacctagttggatttttttggggggggaatgtatcagaatctaacgtgtcgttaatagaaagaagaacaggcaagaagtggtccagccggcgaaggttggtgtgtgcttgtgttgtgcctgtgtgttagtctttttcttaaaaatcttaatcaatggatttgagtctcttt

SEQ ID NO: 19782 - DNA, 2300 bp, Homo sapien
ggacagtttatttgaaacggaaacgaatcggaaatccttcccacaacagtccttttagacagatacacaccctgagaatccaacacagacacacataaagaataaatgcagcattagggggcaataagaactccccttccacactctcaatacctctagcctcatctatttccaattgcacaactttcaatctccaatgaaaatatttccagttggatccgatttcagacttgtagtaagcggtctggatgggggggcggggggaataggtgctgtactgtgcaggggaggggggctggaagacagtatttcggcagttaacttatttttttagaaccagcatgctctaccgatcagaaattgctattacccaacaatgcttccatcacaaacagacactgaaaacagcatccccgttatcaccatcttgccaaagatctgcccggtccagtttacctgactttgtccctgcggaacttctcagacagtatttcggtcaaagagataatggtttggaagacaaaaacaataaatcgataccgaagggttccctttccggagtgatttcccactggaaaccaccgaacggggaagcctgccgttcattcccaagcccacggctcctctagaaacgcacacaatgcgtgctttcaaaaaggcattcgtctgcttttaagggaattcctatcttttcagagtcccaaaaccagagagcacaagaaagagactcaaatccattgattaagatttttaagaaaaagactaacacacaggcacaacacaagcacacaccaaccttcgccggctggaccacttcttgcctgttcttctttctattaacgacacgttagattctgatacattccccccccaaaaaaatccaactaggttacaatgtagctctctagctccacttaacctgcaagttacaaagagagaaaaaaaaaatcctgccttcccacccctttccttaccccctccccctcccgagtccactccaccaacgccaaacccgccagccccgccagccggctgcaggaccgagggagggtgcaaaaggcggggggcggagggggggtagatcagattaggcgaaactcaataagctcccagccctccagcccaaagcttccaccatcgccgccaccaacgagccactccaattgagccagcatcgccgcccacccgccggcccgccggaatcgcgcccatctcctgcaacctcgcccggaccggcatcccgccccctcggcccggtctcccccttcccgccgggtgcaaagtcaaagacccagcaaggcgacgtgaacttttgcatgcagggcacacacgtcgcccccggttccgggagtgcgggggcccgcggcgcggagggaggctgggcgcccgggctcccgggccaaggtcgccgcgcgtgctcacccatgtcccggcggctccggctccgctggccccggcgctcgctcagatcccggctcccgtcgctcgcccgagcccccaaaggtgctgctgcggcaactccatggcgatgagcatctgtcaaacggcgagccgcgagctggccgccctagctcggggggcgccggggcccccgggcgcgcggaggcggcggcgagcggcgggcgccccggccggccccgcgcttcccgcccgactctgccgcctccgccgcgccaccgatttatggagagagatatcaagggggaaaatggcgtctccggagcccgaggagtcctggagtaatcacattcacacacacacgcccgcacgcacacacactcgcacacactggcacacaggcgcgcggcgagccctgctaattttagcaggagccaaaaaaaattttatatatatatatatatatatatatatatatatatccccgtctctccgatcaatgctttttctttttttgcttttttttttttttttttttttttttttgcttttcttcaaaggatgggttggagcgttaaaaaatgttggtgggtttgggctcgcaggaggcggcgcgcggagggcgagggcgcttttgctgagctgtgcagttcggtccgctgagcccggcggccctgcccgcccgctcgtccgcccgcggtcgctagtgttgccgccgccgccgccgccgccgccgctgctgctccatggccgcgcccgccccgcgcccccgccgcgtcccgtcgccgcccgcccgcgtccccggtgagcgctggagtggggtcgggcccgtgtgcctgcctcccgcgccctctccgaatcccggactcctagtgaaaggaagggggagggcgcgggcgcgg

SEQ ID NO: 19783 - DNA, 2300 bp, Homo sapien
ctccgtaaagtcaacttgagtataactttttaaaaataatgtgtattattgggcagataaatctagatgagacaaaaaatcttatcagtaaaagaaacatcaagtgtcatctggtctaacttctccccacctcccaaagtggagactttgtccatcttgtagcatgggtcacaggtggctgttttcagttttggctcaacagtgtcagtgaagatgctcatgctctcactagggcagcttcttctttttcagaaaagctgtattcgttgaatcttccccgaagtggaagcagttgtaaatgtgtctttctgcaaagctgagcattttccagtagctgaatatgctcctgggcttctctggggagcagggtccgtgttggagccggggctgccttcctggctggcttcctcacagggcgtcagctaaaaatgtgctgattctggagacagaagacaaacgtctggtcttcaggcttccagttcttggttattctgaatatgtctttgcaggcatcgttgggcattttttggtgggcacatttgccagccactttaaattgatgggctcagaggtagaaacctaagatgtacagtcatgtcttctgctgggaaacttaagtgttcagcagctgagaaagcttgagtgtgatccagcgtacagcctaagggtgggaggatgtgatgtttgcagccccagggctcttggttttctcctgagactgagcgtttgggcttccttttgggctttgaaaattatgagtatgaaattgggaataatagaacgtggggtgaagaagggtgaaggagagtttagctgatcctgtgacagtttggagagagcctaactgatttttctcttctcatcttggaggaaggtagagaggaagatcctggggggactcctgacacttccacaggcctataaaatgctccttctctccctttttctcttttgctgctatggagacacaatactacttcatttaagaaaccagaaagggaattacaactgtctagaaaggctatttttaatctaaataattgataatgattaaatttctctcttttgtgtcagtagaaacatttgttgaagttgttttccattaatcacagtgttataagtgatttgccactgaactctttttattttctttttgtgtgcctcaaacctaagctttgcatttgcttgaagaaatagagaggtctttgcataattgaaataatgcatagtgaaaaatgataaaggtaaaatggttaagagataggctgaatgcccctcctccaagtgggtggagagcttggcccaggcagcctgggggttgtgctcagctttgcaaactgttcttcacatgtgacagagaagcggtgcaaaaagccaaccaaatacagttccagcagacctgagcctcaacacttcagacttccctttcgtcatgattggttttaacagtgactcagccagctgaagcttcagtataaagaaacctctagcttgctaccgggctggagaactcgcacctcttatctttattcttgggcctacagctataaaattaatagcaatccattatgaaggcgtgtgtgaatgtgtttttccctctgctctagtaaaatccaatttggggatgtgcttattctggttagctgtttttccatcatttcttttttccggatgccatagatacgtggaagggggcctctggaacttagattgagtaaccttgggggtcattttcctttctgccatgcctaactgtctctttgcttctcagttgcagatctgatctcttctgaacacctcatcgtgtctccatccctgggaatctgaccctagcaactggaccactttgttcttggaattttgggtgtcctcttttctcacctttcccttttcccttttccccttccccctcctgagaactccggaagactgtagagattgtcatggagtccagggaaaccttaagcagctcccggcaaagagggggcgagtcagacttcctgccggtctcctcagccaagcccccagctgctcctggctgtgcaggagaacctttgctctccactccaggacctgggaaggggatcccggtgggcggagagcgcatggagccagaggaggaggatgaactaggctcagggcgggatgtggattccaactccaacgcggacagtgagaaatgggtggcaggagatggtttggaagagcaggaattttctatcaaggaggcaaacttcacagagggaagtctgaagctaaagattcagaccacaaagcgggctaagaaacccccaaagaat

SEQ ID NO: 19784 - DNA, 2300 bp, Homo sapien
attgtgattctgccattgagtcccacggctctaggccagtttacctccacagtatgagcctcagtttccacatctttacaacggaagcaacaatatttcacataattgttgggaggactgaaatcatgtcaatagaagtactttgcatgcacagtgaatatttgagaaatgtttgtttttattttaataaagaaaaaggaataatgcatcttgggcacggagacatacccatagcattaattctctataatctttatagccaagtagaatgctagctgtcagtgaagaggctgagttgaaggcaccttgcatcctgtgctcaatttcttatctcttcccctcccgcagtcggctcctccctgaagaagaggttcaagcggcgggagatcgaagccatccagtgcgaagtgcggaagatgtgcaactacaccaagatcctgtccaccaagaagaacctggaccacgtgaacaagatcctgaaggccaagcggctgcagagacaatcaaaaacaggcaacaacttcgtgaagaagaggcgcgggcgtcccaggaagcagcccacccagttcgatgaggactccagagaccaaatgccggtgctggaaaaatgcatcgacctgcccagcaaaagaggccagaagcccagcctgagcccgctggtgctggagcccgccgccagccaagacaccatcatggccaccatcgaggcggtcatccacatggcccgggaggcgccgcccctgcccccgccaccgccgccgcccctgccgccaccgccgccaccacccctgcccccgccaccccctctacccaagaccccccgaggcggaaagaggaaacacaaaccgcaggcccccgctcagcccccacagcagtcgcccccgcagcagccccttccccaggaagaggaggtgaaagccaaaaggcagaggaagtcccgagggagtgagagcgaggtccttccctagggcgggtctgggcgtctgcacctggggcctagggaactgacacgtgggaagcgcagtgagccggggcgggggcggaatcccccgctgcagggacacccacgcccttctctccagaagccgggcaggcagaatccggccagacgacggggctgagccatcaggagctcttgggaaagcaaagcagggagacaccttcagaagaagcttgtctgagcttcaccgcagctcccaccacgcggcgcttcagtacggctggatcctccgcaggcgagcggaaggcccccaggaggagcaggctggtggcactctcctgacctcacgctgccaaggtgcgccctcgactcccgatttcatttgctggccaggaaaatcgaaagggaaacaccctcaattaggaaacattccaaggggagaaaagctgcaaattgctcaactggcattgctgtaacccgttccatttaattggtttttatttcttttgattttcaagctctgctaagctttggggtaccaacgtcatcttcaggtgacctgaatctttcccttaaccgtacagtttctcgatggaattgtgtgatcagaaggtggaattctagtgataggcgacctcagacccgcattcatgttctgtgtgcctcttctattgcacatacactgatttttagcattgtctattcctatttttcctttgcccattgtacttccatatatcttttcattaacttacttgctgccttttttttttcttggtacacatttaaataaagtaatccttaacctgtgctgtaaagttcacccttggcatgctgttccaagaacctgggtttgaatcccaatcgttgtgaaacatactcagtattgataaaacctttttaataagtgatgcagagcagccaaggatatgttgacccagatgtcaaccaggctatttttatacttaaaacatgtcagcagagcataggcagaataaaatggtttaaataccccacagcaaatagagtaactgacaaaccaccaaaaactgaaaccccagacccaccagaaagacaagtgtctagcaatgccttggtacctgatctttttcattcaaataattgtcataggttgttcaaaaaaaaaaaaaaaaaggaaacaaaaacacaatagaagtccattatcccttgataattatttcttaaaagcaaatgggagtaagtgttcttatctggaaaaataaataaataaaatgctcaaagggtatcaccacttcaattttatcaagccaccttggacaaagtatccaaattgtggttgccttaataaactaaaacattattgtacataatgtaatta

SEQ ID NO: 19785 - DNA, 2300 bp, Homo sapien
tgggaatttgagagggaaactgactttcgttagtgagttgcatggagggtgtgatagaccatcaaaaggtttgctcctgagcacaccatcctccaaattcctgaaaccacaaagtgtgttgaacagttactgtctacagtcacgatttaggtcagctggaaaaatttcttctggaacacagagcatttgatgatagacatgtctaggaagcatctaaacattatcgtgggagtcaagataaatgagttgtcagactaactccatgtgtttcttcaagcaggagagaatatatgttttgggaggtctctagtggcctttcctaagaagtttaaaatactgtacaaactaatctaaaagtgaatttgcatgacagttccagcttgggtggattcccctcaccagcattggaacctgctctcaagaatgtcaaacttgcaacagtgctcatgtctgaggataaggttctccaagataggatggtaataggacttatgatctgactcacagtgtatgctcaggtcttttataattgttttctttcttttcataaactgtattttaaaatgtgatataacacaaacattgcacaacataggcacattgtcctcaagatctttcttggccctgactcagattctattctgagtttaattggctggacccagtaaagatgatgatctgctctgatatccacagactgaggccaaattccagtctcaggactcaccagacttgtggcatcggagcagttcacgtaagtcccatatgtgccatagttgctgcagaaatagcaatgccaacatctcgtaacaactgggaagaatgaagcagcaaatacgaggcggctcccaataccaaaactcactcccaatgcaagatcattaaatgttactctcatgccccctaaactagatgtggttacttatcctgttcccccgaggcctcaagcctatgcccctgtccctgagctggtttggcaagaggcccaaagagggcggcaccagcctggctgactctgtgaggttcagtggctctctggtcaggcctcataactctcttgatgtggtgaattaggctactgtcaggaaccaggagctgcccttcgggattcctagggagatgttatggtcaatgggggaaaagtcagctagcaacatctggccctgcattgtgacaactgctcagagaacatccttatctctgcttcctagtgctctataaagagaggttattgcctcaatcagcctcttgatatattttatgttgacagtgtgggacgtaatgactttcaaacatattgacagtttagtttttactacacaccatacactactgagtgatatcactattcttgttgatttttatgttcagttgagtcaacattaagcctcggggcagccctgcatgtcagatctttaccacaagcctttgagcacttctctcaataacaactgaccacatccaaaaggaaggcaaaccaagcatttgggggctaatgttttcctcctataaactcaaacaagaaagcacatgtgcaacagaactgacaaacaattattgcactcagtgtgtgaagcatcagggctacaaaccaacttaagttgtgtggctttccttatcaaggcttttatagagatggtgagacatatttataaataaatctgtaatccctgcttcccaggatatggatgtctgggcatgaacaatcaatgggtggtttctgacttgggaactccccattgaaacttgggaacttagaccagctgcctctgagtctcacctttcactcaagcatcccatgtaatccacctacctgctagcagcaactgtgctacccttctgatgactttggctggtccttgttctcagttgttgcctggtgcatatcagataggatgctctttgagctctctgcatgggaaaccaattaagacaatgctggacacataagcattgctcatttcccagttaagttctgtggctttgtgtcatgacctgactggagctcgtatcttctgtgtagccctcttctatgtgctttcctgctgcttcaccatttgtataattgtgagcttggtagaggcatcattgcagatctgctactaactcggcatggccagctcgacagagagccagtttgttaaacagcttggtgggggagttcatccgtcttgatgttgccctgaatctacaacttcatattcaatatgctaaataatcctcttttcttttcgtgtgattcatgatagtgtcatcctcatcaagctttatctttctcatttcttgcaattttctcttaa

SEQ ID NO: 19786 - DNA, 2300 bp, Homo sapien
ggccaataatgcaccagtgatttttctctgttatttcatttatggcaatgacttcaggtcttgtgtctggtcataatggtgatctatgtatgccatctacactgggcatggctaatgaatcctattttatttcttaattaagaatttgaaagtgccgcaaattactgcaattaatatggattttcttcctcatttatttacttatttagatgcctgaaattgcacccttagcttaaaccaaccgcagagttcagagcttgttaaaatatatagcattcattaaaatatttactcttccccaacagtaagggttgcaatttggaaatggtggtggtatctatgtatacaaaatgcttccaaaaaatctattgaattcagtttatccagcttagtaatttaaaaagttgaatttattgacaatcctttgtgcaactgaaaaaaaacaggattttcaaactagcctattgttatgttgacttcaaccagagaaattgttgttttccctttcaaagttcgtgaagactatgagtatcaccacattttcaggacttctgtgtccattgaaagataagaataacaatttgagggtggttgaatttatcagacttatttcaaaacaatggtactttgaaaattgtttagcttcaaatttatctcatagttttcaagattcaaccttagttttctttcctgggttcttgtttggggcttttcttgtttggggctttggtttcggtttctaactggttttcatggagacaactcaagataaagtagttgaaattaacctgaactacagccagcaggactgtaaatgaatacaatcctaacagaaagtgattggggaataacataccaaaagctttaaaaaaatgcatacccattgaaagccagctattttacttcaaggaatttatccttaggaaagaagaacgtgtaccaatgtttaagtacaataatattcattgcagccctgtttataatagcaaaacaaaataaccaaaatgtgcagcaacaaaagattgagtaaattatggtacagacatattaacatatgaagcagctattaaaaattatgtgatttgtatcagttatctatggctgttttacaccaaaacttagtagcttagaacaacaaatttattatctcacagtttctgagggtctggaatctgggcttggcttaactccatcctctgactcagatctctcacaaggctacaatgaaggtatttgatggagctacaatcacctcaaggcttaacatggagaggattcactctcaagttcactcaagtgattgttggcaggattcagctcctcctgggctggtctcccttagctccttgacacacgggcatttctgtagggcagacagttgatgacatggcagttggctccatggcagaaagcaagccagagaataagagagcatgagcaagaagatagagtcttcttgtaacctaatcttggaaatgatatcccaacactgtgatattcaattggttggatgtaagtcagaagttcagcccacactcaaatggagtgatcacacagttatacaatggtgagaacacaagggggtggggatcaaagggaatcatcttagaatgtgtccaccacagagttgaagtttatttactggcaaaggatattcattaatatcttattcaatgaaagaaaaggtcacaaaacagcaaggacaataggatccctgttttgtaaactaagaccgatagaaaatatatttgcatgtatacataaatattcatgaaacactctttaagtgttcctgggttaacagtagttgtatctagatggtggaataacagatgagttttatgtcctgtttccttatttttttcttttttttctgtaaaaggaacatgtattgtttataatttttaaaagagtaaatattattaccttttcaagaagcgatttaaaccctcaaggcttctttattctgacctccattctctttacaggattgtttcttgcttactacttgtggtcaactaagtagagattcataagacctttatagaaccactgacaacactgtgaccaaggaaactgtgagtatgttctagaacttgcttctgtgtttgtgtcttcaaaacagctgctatcaccaataattaaaccataaaaaaccgaaattatttttccctctggggtgattacaaccacacgggagctgtgatgagaggtgagtcctgtgaagatctcctccttgagtcttccccactccattctggttgcttccagacaagtggtaacaataatcacatgctcat

SEQ ID NO: 19787 - DNA, 2300 bp, Homo sapien
tgaggacctatgatgagtaaacagcaaagcaaatcggaaagaaacaattttatgagggattagaagtacagcaggctagggagaggctgtttggatagtccagtgtgcatccagtgtcttacatgcctcaccaccaccaccaccaagggcagacagggagatggggcagggattgtccctctgtcctcctaccccctgccacatccttgtgacagcctttgacagtctttttccaccaagactgcctgctatccatgtaaattcattttcctttcataacgacgttgaagaatatgggaaaatggaaccaaaaaagagggaagacggagtgggtgaggagcccacagggtaatattccctgagaatgctcctgggtttcttgcttcctatgggacccagcaggaacaatcactctttcacaactttctgagttttccctgcatccccacatacctcaccccagaaacagccaatgtgctaattgcaaggtcaggccagtgtcttacgtggcatctgggacatggtataatgcaaacagatttccatatgtggtcccttccagtagtcctcggccccccgagcacccacaccacgtgagaactcagcttctcaggagacgctgacattttaattggaagcatctgttgccttttctgttatttttggccaggtttggtttatttgtatgagccgatgtttgtgtacagacccgcctacacgtttcacaaagcctagccttgcctcctctctcatcttcttctcaagtagctgactgggatgtgtgacggggccacttgccttcaccctgtccattctgatgtggatttctctccgcagaactagggtggggaggaagggccaagctgaaaacttcagagaagcaccttcttgaaaaagatgttctgagggagggaggctcaccgcttcctgcttactgcaaagtgtctgctagcctcccagcaggagattctgcttccagcttcaaggctgcagccagctttgaggctgcagggggaccttgaaggtgtcaggtccagtcctgtacccctcccagctctgactcacacactaactgaggccccgtcctcaagtctctcaggagtcctgctcccactagcctttgagacctgcccttcactttatcctcacttagaaaacccaaccttcttctccccatcaaacccaaccacctccacagagccttcttctagttgtccagttagcctgatcacacaccagcagagccactatctgtcagtaatccagtggcaactgggtgtttgctgaattccgagctgtagtgggttgaatcgtgccccatcaaaaaaatagttctacacagaaccttggaatgtgaatttatttggaataagagttttttgcagacaagttaaggctctccaaatgatataatcctagatagggcggacccaaaaatccaataatggaagagacagaaaaagacatgagagagagaaacaaagggcatgtgaagacaggcagaaattggagtgatgccaccacaagccaaggaatgccaggagccaccagaagtcagaagtggccagaaaattttttctctagtgcctccacagggagcatggccctgccaacaccttagttgtggatttctagcttcagaactgtgaaagaatgaatttctcttatgctgaagtaccgagtttattggtaatttgtcacagcagtcctaagaaactgatattcaagccctgggctagggtaccatggtgtacaaaatcctaggaatgaaggggaactggaatctgcccagacgtaaagtgagaggacctgactttcctcccctgaggggaacctgacttaccccctcctcaaggggatatcaccactcaccagctatataccctggaggaggtcacttgagctccctgtcttcactgtcctttcctgtacattgaaggagatggacaggacaaggtctacgaatccctacagctccagtgttgtcttttttgtgtaagaaagggagattataactacacaaggtgatgacatcataaccccgggtccccactgtgagaggcacactgaaatgagcactacagaccctaggaggggagggttcaagtagagtcagggaaggtcctaggggaggtggtctctgaactcaagggcaggttgccaaagaggaggagttgggagagcattgatgaccggcagagaagtcaatgcgcagaggtcagatgagagagtgacaaggaggaaacaaggcaggctggagcagagaggaccacaggagcaccatgtcatgcttcacccag

SEQ ID NO: 19788 - DNA, 2300 bp, Homo sapien
acatagagtcttcattttccttctacttcttggactcttccaaaggcttgcaataccactggctatacaggaggctccaggatagagtcatgaccatctgaagtccctgagtttggggccatgggtcctctatcctagcattttgcctcagatggatctgaaggtttgggggatgctggcattgttatccatgaaatcaactcaaaggtcatctgtcaccccccaatatcttgataatttgtaattctgtttacatgtttacatatttttgtctcatttgcaagaccagtttgttaattccctggagtaggcatttttgtgtgtgcatgatgccttgaacctagtagccctttgataaagtccagttgagggactgggcctgtgtcagacagcttccagtggcccatcagaatggaggattccagaagattgggtgacccatctaaaggacactggccattctgcagaaacatcttgtagaaagttgagcacccattagtaggctggcaagcaaagaaaagatgaaggctgtattagtctgttttcacactgacgataaagacatacctgagactgggcaatttacataacaaagaggtttaatggagttacagttccacatggctaaggaagcctcacgatcatggcagaaggtgaaaggcacatgtcacatggcggtagacaagagaagagagcttgtgtagggaaactcccctttttaaaatcatcagatctcatgagacttattcactatcacaagaacagcatgggaaagacctgctctcatgatttaatgatctcccactgggttccgtcccacaacacatgggaattcaagatgagatttggatggggatacaatcaaaccgtatcaaaggccctgccctcttccaaatactaatagaggaagagaagagtcacagcaagaacccaagtgaagactagcctgtaaacaagtcaacacaggaagactcaggaggtcagccccagctagaacatgagatctacgcagaacaatttttcagagttctgagatgcctctgttgagcatgttggatgatgatgtttctaagtattccagtctttcttacctttgagataagcagagtacatggaatctattttaagcttgcattataggattggagtggtacctggcaggctcttgtttgttcagggatatttgccccattgccagatggccccagattgccatgtttttctagttggttcttcttaccttttctcacagttcctatttattcctgttgtatgtttctgcttccttattttactttgcagtaagcaaagagagtctgatgggactcacatgagggagagttacagggacactctcaccattcttgtcaactggccaattttattcatttctcaagtagcttaaaagtcccttcttccaggaagatgtccgctccccaaacggcagcagaagctcctctgcatttttctgcctaagatacctacctccctgaacacagttacatgctcaataggctgcctccaccatcagattgtatgcccactgaggacagagtctgtgtccccacagattctttagtgcccaggactgcagggtgacagtgagtgttcaatccatatttatttaatgtggatgtgtgtgacctgagggtcagcctggtctctcccatggaggaaagcacttccctcaatgctagaccctggttatggggcagagcttaccaaagactgatttctgggtgaagcatgacatggtgctcctgtggtcctctctgctccagcctgccttgtttcctccttgtcactctctcatctgacctctgcgcattgacttctctgccggtcatcaatgctctcccaactcctcctctttggcaacctgcccttgagttcagagaccacctcccctaggaccttccctgactctacttgaaccctcccctcctagggtctgtagtgctcatttcagtgtgcctctcacagtggggacccggggttatgatgtcatcaccttgtgtagttataatctccctttcttacacaaaaaagacaacactggagctgtagggattcgtagaccttgtcctgtccatctccttcaatgtacaggaaaggacagtgaagacagggagctcaagtgacctcctccagggtatatagctggtgagtggtgatatccccttgaggagggggtaagtcaggttcccctcaggggaggaaagtcaggtcctctcactttacgtctgggcagattccagttccccttcattcctaggattttgtacaccatggtaccctag

SEQ ID NO: 19789 - DNA, 2300 bp, Homo sapien
ctctgtgtccccacccaaatatcgtttggaattttaatcctcatattccccatgtgtcaaagtcggacccagtaggaggtgactggatcatgggggcagcttccctatgctgttctcatgatagtgagttttcacaaggtctgatagttttataagtgtttggcaagttcctccttctcacacactctctctctcctgctgctatgtgacaaggtccaagtttgcttccccttcttctgccatgactgtaagtttcctcaggtctccccagcattgtggaaatgtgagtcaattaaacctctttcctttataaattacccagtctttggcagtttttttttgttgttgttttttgagacagtctcactctgtcgcccaggctggagtgcagtagcgcaatctcggctcactgcaagctccgcctcccaggtccacacaattctcctgcctcagcctcccgagtagctgggactacaggcgcccgccaccatgcccagctaattttttgtatttttagtagagatggggtttcaccgtggtcttgatctcctgacctcgtgatccgcccgcctcagcctcccaaagtgctgggattacaggtgtgagccactgcgcctggccagcagtttttataacagtatgaaaacagactaatacagtaaattggtaccaagatagtgggacagtgctataaagatacttgaaaatgtggaagcaagtagggaactgggtaacaggcagaggttggaacagtttggagagctcggaggaagatagatagaaagatgtgggaaagtttggaacttcctaaagacttgctgaatgattttgaccaaaatgctgatagtgatatgaacagtgaagtccaggcagaggtggtctcaaatggagatgaggaacttgttgggaactggagtaaaggtcactcttgctatgctttagcaaagagactggtggcattttgccacctccctagagatctgtggaactttgaacttgagagagacgatttaggatatctggcagaagaaatttctaagcagcaaagcattcaagaggtgacctcggtgctcttaaaaggattcaattttatgcatttacagagagattgtttgaaattggaacttatgtttaaaagagaagtagagcataaaagttgggaaaatttgcagcctgacgatgtgatggaaagaaaaactcattttctggggagaaattcaagctggctgcagaaatttgtctaaccagaagccaaatgttaatcgccaagacaatggggaagattactccagggcatgtcagagaactttgcagcaaccctaccatcctgggcccagaggcctaggaggaaaaacaatgggctggtccagggccccactactgccctatgcagcctcgggacttggtaccctgcatcccagccatggctaaaaggggccagtgtacagttcaggccattgcttcagagggtgcaagcctcaacccatggcggcttccatgtggtgttgagcctgcaggtgcacagaagtcaagaattgaggtttgggaacctccacttagatttcagaggatgtatgaaacgccaggatgtccaggcaaaagtttgctgcaggggtagagacctcatagagaacctctgctagggcagtgcagaagggaaatgtgaagttggagcccccacacagagtccccactggaggactgcctagtggagctgtgagaagaggaccaccgtactccagaccccagaatggtaaatccactgtcagcttgcactctgcacctggaagagccacagacactcaacaccagcctgcgaaagcagcaggaggagagctataccctgcaaagccacagaagcagagctgcctgagtctgtgggagcccacctcttgcatcagcatgacctggatatgagacatggagtcaaaggagattatttttgagatttaagatttaatgactgcaccactggattttggacttgcgtggggcctgtagccctttgttttggccaatttctcccatttgaaatgggagcatttatccaatgcctcctgcacccccactgtatcttggaagtaactaacttgcttttttttttttttttttttttgagacacagtttgctctgtcacccaggctggagtacattggcactatcttggctcactgcaacctccacctcccaggttcaagagattcttctgtctcagcctcccagtagctaggactacaagtgtgtgccaccacaccctgctaatttttgtatttttagtagagacagggtttcaccacat

SEQ ID NO: 19790 - DNA, 2300 bp, Homo sapien
ggacagtgctataaagatacttgaaaatgtggaagcaagtagggaactgggtaacaggcagaggttggaacagtttggagagctcggaggaagatagatagaaagatgtgggaaagtttggaacttcctaaagacttgctgaatgattttgaccaaaatgctgatagtgatatgaacagtgaagtccaggcagaggtggtctcaaatggagatgaggaacttgttgggaactggagtaaaggtcactcttgctatgctttagcaaagagactggtggcattttgccacctccctagagatctgtggaactttgaacttgagagagacgatttaggatatctggcagaagaaatttctaagcagcaaagcattcaagaggtgacctcggtgctcttaaaaggattcaattttatgcatttacagagagattgtttgaaattggaacttatgtttaaaagagaagtagagcataaaagttgggaaaatttgcagcctgacgatgtgatggaaagaaaaactcattttctggggagaaattcaagctggctgcagaaatttgtctaaccagaagccaaatgttaatcgccaagacaatggggaagattactccagggcatgtcagagaactttgcagcaaccctaccatcctgggcccagaggcctaggaggaaaaacaatgggctggtccagggccccactactgccctatgcagcctcgggacttggtaccctgcatcccagccatggctaaaaggggccagtgtacagttcaggccattgcttcagagggtgcaagcctcaacccatggcggcttccatgtggtgttgagcctgcaggtgcacagaagtcaagaattgaggtttgggaacctccacttagatttcagaggatgtatgaaacgccaggatgtccaggcaaaagtttgctgcaggggtagagacctcatagagaacctctgctagggcagtgcagaagggaaatgtgaagttggagcccccacacagagtccccactggaggactgcctagtggagctgtgagaagaggaccaccgtactccagaccccagaatggtaaatccactgtcagcttgcactctgcacctggaagagccacagacactcaacaccagcctgcgaaagcagcaggaggagagctataccctgcaaagccacagaagcagagctgcctgagtctgtgggagcccacctcttgcatcagcatgacctggatatgagacatggagtcaaaggagattatttttgagatttaagatttaatgactgcaccactggattttggacttgcgtggggcctgtagccctttgttttggccaatttctcccatttgaaatgggagcatttatccaatgcctcctgcacccccactgtatcttggaagtaactaacttgcttttttttttttttttttttttgagacacagtttgctctgtcacccaggctggagtacattggcactatcttggctcactgcaacctccacctcccaggttcaagagattcttctgtctcagcctcccagtagctaggactacaagtgtgtgccaccacaccctgctaatttttgtatttttagtagagacagggtttcaccacattggccaggctggtctcgaacttctgacgtcaagtgatccacccgactcggcctctcaaagtgctgggattacaggcgtgggccgccgcacccggccatttgcttttgattttactggctcataggtggaagggacttgccttgcctcagatgaaactttggactttgactttcaagttaatactggaataagttaagactttgggggactgttgctaaggcacaattttgttttgaaatgtataaagaacataatatctgggaggggccaggggcagaatgatatggtttggctctgtgtccacacctgaatatcatctcaaattgtaatcccagtaatccccatatgttgagggcaggacccagggcaaggtgactggatcatgggagcggtttcccccatgctgttctcgtgatagtgagtgaattctcacaagatctgatggttttataagtgtttggcaagttcctgctccacaccatctctctcttctgccgccatttgagaaggtccaagtttgcttccccttcgccttccaccatgactgtaagtttcctgaggcctccccagcaatgtggaagtgtgagtcaattaaatttcttttttttttttttctaataaatcacccactctcaggtagttctttatagcagtatgagaatggactattgcagtggggg

SEQ ID NO: 19791 - DNA, 2300 bp, Homo sapien
ggggctgacatcagaatgggggcacctctacatgttcggcacggtgctttgaagatgtcatccctcatcacaactttataaaggaagaaaagttaccccactttacactgaggaatctgaggctcagaaactgtgagtaacatgcctaaggtcatacagcttgtcagagaaaagctagtattcaaactcaggtttatctgacttggaattccatgtgccttgtgctgccttgtgcatacaatatggcaaggctgtaatttgtggccccccacttaaggtgtggctttacagggaccaggagaaaggccagggagggagggtgggtacagaaagaggtggtttttccaaggaggtctgagattcactacacaccttcagccctgaccagtgcgactgaggcagaaggctccatgggtgtcatgtggaggcagcttcaggatgaggtccataaatatgcatcatggccaagttgagtgaaggaattaatgaaaagcaaacatacaggcagaagttggaaatattggacagcactggagtggctaaaagtacaaactttgagtcagactttgagcaagttatttaaactctgagcctcagattgctcatctacaaaatggggacaatagtataatataggaattttgcaaatgctctaccatttgtggcagttattattctcattaccatcattagcatgattatttctatcagggacagtggtccatttgcataaggaagtcatggagacactagtatgattcctttcattcccaaagcaggccactcacactgtctcctgaagattcatttttctccttcagggaaacccgaggagcttattttctccttattttaccagggaaaaaatgttggaaggagatttgcctgaacctggaaactcttattatgaacctagacctatacacaccctacctcagctgctcgggaggcacttggaggaaggatgtcccaagccggcaagaaccctgtggtctggcgggtgtccagcgggtggagccagagagctcccagccatgggccacctagctgaaggctgataagtactatctgcacatccaagcaggcaggagacccagataaaagacctatgacatctgcatggctggctgtgggattacatatatatattatatatatatttaaaagtatatgtatatatgtatatatattacatatatacacacatatatatctacacatatgtaatatatgtatatatgtatatttattatatgtatatatctacatatatacatgtatgtatgtaatatagatgtatatatgttacatatatacacacatatacatatatacacatatatttttttaaaattctgcactcataaaagtagatttgagttagatttttgccataacagaacaagccacaaaattgaaatttaaaaagaagggggaaggaggagatattttaattcagttttagatttccctgctatagaatgtttgcttcctgacttttaaagaggcagcagagtatgtccaagaattctcacctgggaagacagacattccagggaaacactgatatttttgttttctcctcactgggaaaaaggcagctggccttcagaaaacaacttgcatgtaccttatcttccccaccctcccaacagcccctcaggcccttgctggagtcttacatctgtgtagaagttgtgccaagtctaagaaaatttcaccccaggagcagtcgcttagcttccgagtccacacagcagcaacctgccccatggtttttagtttgacaccgtgttgatccttttcagttgtaaatctttccaaaaatatgagtaggggccagaggaaacaggagaagaaaaagatgcattttggtaggattattgctggtcaaagaccttggaatgctgtggaaactgtggcaaagcagttggtactctgtcaagaacagagagagagacatcgggtactgaagccaggggaccagttccttggtgttgctttggcattgatgcctgaagtgggaggagaaagccgagcccacaaacacacagagcagagtggggctctgagtatataactgttaggtgcctccctccagcaccatctcctgagaagcactctcccttgtcgtggaggtgggcaaatctttatcagccactgccttctgctgccaggaagccagctagagtggtgtaagtactcatccttatttctattcatttccaactattcatcatttggggcttgtcttcacagttctaagttttgctctttttcttaatgaagaaaatgtttta

SEQ ID NO: 19792 - DNA, 2300 bp, Homo sapien
taatttgggctgtgttcttgaaataagttcgaggcgagtgtctacaagactcaaaagaaaaaagtgggccactgggaatggccctttccagtgatggatttatggactcctctgtgtgtgctgtcatgctgaagggaatgttcttgtgcacccatcgggagaacaagtcagtcacaactgaagccacgaatttggcagcttccttgcagctgcactctctggagtctggaatcaagacttctgggagtagtgttttccaaggagggaagtgttttaaccaggacacaggaatatctgacagcattttctttgtttccaattacagctttaaagaaaactgggcatctcctgctacttaaaatcaaaaactacctaaaataaagattatagtaagtaccaaataagtgtcaatgctgaaagtctctttattatgctagaccatgagtgtttaaatgctttcttctatatccatatccaacacttcatattatttttaaaagtaatagctgaagcatggaaaattgaagacttcaggtctctccaattgcacaaatttctaatacatgctggcaatagaatatattttatttcgtgtaataaaatagaggatattagttgacctgaaatcttgatattgccttgtattaaaatgctaagcactgcttcattttactagtgatctggggtatgaaaagtgctttttgacttctgctggaaagctcttcaggtgcagcttccaggatattcttgggatgttaacttcagcacacataagccttgctgtagatgtgtcagctttgaggcacagggagacatttgtttgtcagagagtaactgcttctggcaagggcatagggtgaaactggggatagcagagctctttctttgtggttgttcaacccccaccccaagattagttcaaagtgaccgtgaagatagtctgtgcccaccgcatcgctaagtcctagccctctctgcatactccagcacacagaaactgctgcttcacttgtttgttgacttgaaccgaaccttgggtggcattaatgtgcctggcccaagactgaaaaattaagaaccaccagagctgacctattccataagacccagtctgcctgccacgtactgagtgaatctggatgatgcccactctgatccttggttttctcttctataaaatgaaggcttgaactacgtggtctctaaaatcctacctagctctcaaatttctcttggttctaggaaaatattgatgttgagctcaaggaaggggttctccaaggtgtgtgattttggtggtagaggaaaggccggtgccaggcaggggcagaaggagacgctgtctacactgagaaaatgtgacaacccctgcttgtctcttttttcattcttcattgtttcttatttctttgtttttagctttatataacatgagagccctaccactgggtttcttaaccatttgttctttatcaaataaaaatattcataatgcaacatgcaggcacatcagtgtggtacagaactagccagctagtttactataggtaaatatacacacatgcatgcacacacacaatttttacctgagacatgtcagaagtgtttcctaaaattgtggatttttctgagtcattctggtaaagggtaggttttcaggttttaggccaagccagaagaagaaagtaaaaacagaataaacaacagggggagaaaaagagaaataccacacacacaactggaacttctggtaaaagagtgatattcttggatgcaatggaagttttaaaaaggaaaaagaaaatttataaaaagctgccacatttgtggaattcaactaaaaactgtttattattaacaaagtgatgttcaaaatttaagagttcttggcctggcatgatgacttatgcctgtaatcccagtgttttgggaggctaaggtgggaggatcacttgaggccaggaattcaaaaccagcctggacaatacaatgagactttgtctctaaaaaaaaataaaataaattaaaataaacacagctggatgtggtggcacaggaaaaaaaaataccatttaggagtctcttaaaggcagcttgtgaatgcttacaaagcgtggctagtatcttattacagaaaacagagcccacatcatgcatccttcttctcacatttcataaacaaggccaagggaaactgctgtggggcaacctgttgctttggtgttggtccccaagatgcagccctcacaatctgcccccaaacgtgtcagaacatgaaccccctcctccccctctggaag

SEQ ID NO: 19793 - DNA, 2300 bp, Homo sapien
aacctcagatccaacagcagagacacgcagcagaacaaaatctgggcattggtccctgtgtaggatggcttcccgttattttttttttaagcaaagtaaatgaacatcaaatttccatagtcagctgctgtctttctgcccactgagagctctttggtgaaggcaaagtcctccttcttcattagcggtctcccatgtggggccacatcttccctcaccaggaacccagtgggcgcgctccagcccccctcagcttgccttttgcgtggtcattagagctagggcacacgtcatgctgattcacatatttttgccctttgtcatgtattgagaaaaagtaaggatgaatggacggtctttgattggcggcgctggtgacgcccgtcatggtcctgtttggaaggacccttttggaactaaagctggtgacgcagcgcgcagaggcatcgcccggctaagcttggccctggcagatgggtcgcaggaacaggtatgcttccttcgtgcagcctctggctcggggaacctgggagcctgctccaaactctggtgtatcttttccgggcagagcctgggaagtgggggttggctgtgagctaagccaaaggcacagggatcttggtccaaaaagccccatggcgctcaccttggtttagaggctagaccattgagctgagaagttttgacagccatggaaaagctggggataagtcacctggggttttacgtttaccctgtgtctattttattagagtgccttttacttattgtcccttcttcttagttgaaattaatggcctgcttcactggggctaagatgtttgaacattagcagaaggtcctggctgcatagccttgccttgtcttcccagttaggatgtaaggactcttaaagttccctaagaaatgcaaatattttagcatggcaaaattctaggccaactacaactgtaagtttcgtatttctcctaagtggttctcatgcctgacttctggagcaaggagtcaggtctcccaggggctctagaagggttcagctgttcagaataaatggttcctggggactctaaaatagcagcaactgtctgcccaggtcatgagaagacccctctctgcaggacatcctagccctacaacccatcccaattatgttgaaattagattcacaaatggcaataagtcttctatatgttgggctgtcgatttggagaaaactagtttaatctttacttaactttgggtggctcaacaggagactcgggccgctcaggctctcaatcacgtctggccagttctattatcaggtttcgaatctgtatctccaaaatctctgaggtgatgggatatttcaagccctctaaaataaataaatatatgctgggaattttgagaacatgaatttgtttattctgaaatggtccatgttcctgctttgggagttgatggaaaatgccacttgagtgttttcatttgatgctgccaccttagggttttatagattcagttccagaaactcaaggcatttatctctttgggctgcttgtccttgcctgagctgaagcctgatgcctcccataagttggtatggctttgaaaatgggtcactacagcagaggcatgggcttatcaagcaatatgttcagctatgaaatttgaagagggagataatctgaaaataaatgacagccaccacttagattatgaaatagaagtactttttcataagtgcttaattattcatacggttttttatctttaactatggagccaactcagctccatatggacttaattttggttcctgacctccaagattcattgcaagtcacacagatgttggtatctaacattgttttaccgagataaaatgaccttggtctggaatgcattgtataaaaagctgcttttttgtgtaaagattaatagtttggcattgtttaaaaagcagaatggttagttgggcagtgaggtaatacaattgaaatgtaattgctaccaataaatcagttacccatattgatttctttactgggattaatagaagccaaagctagagttcaactttttttaataggtataacttagtatctgttcattgctatttgttagctatggtaaatggaacaatgatggggccagaaatatccatgaggaccatttgatcacagcctggcaacacagagaagacaggctggtttctctatgtgggctttcagtgtttctttggtagtgtcttatgtggctgtggcttcaacattccacaattatgccttccagggtctgatgattttggcgtttcc

SEQ ID NO: 19794 - DNA, 2300 bp, Homo sapien
tttccttaaccctaatatgcaactgtgaacccttgaccactgcatcaccctgcaagaatggagtcatactcccggcaaccctcggccatttacactgagtgttagcaagtttcaagtatcttcctgaggatattattttattttgttcttttattatttttttattcatctaattgatttatctaactgctagtctgcacaaagtcctgtgatacagaccagaaacatggttctctcctccataattatagcccaggaaaaggagggtaggaaggaaaggcgatggaacagaccagcaaacaaacgatgacaacacagcacagcacgtgcgaggaaggaggtctgcacacagggagcaaatgcccctgcattctttcaaatacctctccagcacctatgggatgccaagtggcgctctaggtggtaagaatcacatggcaactagtgctgagcacctgaaccttatatctgggggaggagaggaatgataaacaagaaaataaataagtacataatgtaattgcaggcagagatgatactgaggactgagggttaagaaggagctgacccagaggatgaaaatgggttgggaagaccacaggtgcaaagatggcttgggaactgtggttgggtgggggcaggtgaaggaggggaggcacagacagtagaccagcctctgggctgggtcctgaacctgaagggcctcctgtgtcgatctccagttggaacttttttatttttttttgagacggagtctcgctctgtcgcccaggctggagggcagtggcacaatcttggctcactgcaagctccgcctcctggcttcacaccattctcctgcctcagcctcccaagtagctgagactacaggcacccaccaccacacccagctaatattttgtatttttagtagagacggtgtttcaccgtgttagccaagatggtctcgatctcctgaccttgtgatctgcccgcctcagcctcccaacatgctgggattacaggcgtgacagttggaactttaagaagagaacaatgaaatgtcatgaaagggttttaagcagggaagagaaattatcaatttcattgttttcaaaagtcgctgtgcttgcagagagtgaccaagaagttgaaggagtcccatgagaagggatacagcctgagccaaggcacggccaaagggaggaggaggaacagaacacaggactggctgtgtgtggtgaagaggaggtggtgtcaagggggacttgcacatttctagctcagctttcctagaaggataatgctgccatccaccgaatcatagaacctagaagctgggggacaagaggaggcagagagagtatggtaacaggctctgtgggcctgttgaggtggagaagtctgcaagctgctgaagaaacgggtctggctctggggactcgcagctgattggacatgagggttagagagactaggaagacccccaagtgccaagggaagggggcagaaggacagggaggtggctagcagcaggtgtcaggtcactgtctaagggagaaactgctccacagttgggtcaactgctcaaagagcaaacatctgtgtatctgccctctgcattcttgaccaggcccagagacccaacctaagctttgagaagggaggtaggaaaggagggagggagggagggaaggaagggagggagggagggaggaagagagggagggagagagggaggaagagagggatagagggagggagagagggagggaggaataagggaaggaaaaaagggagaggagaagggaggatgggatggaagaagggagggagaaagggaggaagagaggaaggaaggaaaggaaggagggagggagaggaaggaagtgagggagggaggaaggaagggtgagccacatataaacagcataaagacaacagttttctgtgaggggatggcagccacaggaaatggccctgtttctttctcaccctctttcctgtttcctgtcctggaaaatcatcccagtgattcccctcttggttttccacatgactaaactccacggggcttgaatgatcagacctcaggctgccaggcttcctgtccccagttcctccggctcccgcagagcccacagggacctgcagatctgagtgccctgcccacccccgcccgccttccttcccccaccacgcctgggagggccctcactggggaggtggccgagagcgggtctggcctggggtgttcagatgctcacagcatggaaaagtccatctggctgctggcctgcttggcgtgggttctcccgaca

SEQ ID NO: 19795 - DNA, 2300 bp, Homo sapien
ggcttagaagcctgccctttctccttgggaggcaccacccctggccttatcctctgaggcgcgctcccctctcccccaaagcagcacacataggcaaccacacacaccctgcagttcaccagccctctgtgagctggaggcagagctctgcttccagaccctggctcaaccacacatccatggttcacaaggtggggaatggggaaactgttcagaggtgcttgcacagagcaaggaggcagtgaaacagcccacctctctggtctctcagctccctccctgcccaggcactagggaagccagtcagggcacagttcacttgggtatacctgaattctagaggaatctcatgcaccaactcaacgcattagcttccaaacacactgccccctcgcaggggctgtttcctctctgtaagtggaagtgctggtgtcctcggagaagccccaaagttcccagcctctagtgcactagaatgcaggctgtagagtgaggcgatcctgaacgctggcttggcctcatgctggcagtgtgacttcagttactcaacttctctgagcctcagtttattcacgtgtaacccggggttaactgtgtttatctgtaggctcatttgtgagaactaaaatagatactacggagaacttgctcaacacagaggtgcacagtaagtgcttttattattatcaccatctcggggatcttgggagtctgttttaaccacgagatcccagggtttttccacagggcaggttttgatggggaaaaactaagggtaagaatatggggtcaaggggcctgcaggtgaattaggaaacgaagaggggaatagtcccagggaagagccgcgggaacgcaggcactcccaagtcgagggagtgcaggccctgggggtgcaggcaccaggaattgcccctcaagtcacaaggtggggttccggctcccctggaagtgggggacgatccctgagtcctggggtttccaggctaggggttgggggagcgtttcctgggtcgtggggtttccaggccccgggtgcgggcgcctcgaccccagggccccgagcctgacgcagcccgccccgccctcaggctcgccagcgcagcgctggtccatgcaggtgccacccgaggtgagcgcggaggcaggcgacgcggcagtgctgccctgcaccttcacgcacccgcaccgccactacgacgggccgctgacggccatctggcgcgcgggcgagccctatgcgggcccgcaggtgttccgctgcgctgcggcgcggggcagcgagctctgccagacggcgctgagcctgcacggccgcttccggctgctgggcaacccgcgccgcaacgacctctcgctgcgcgtcgagcgcctcgccctggctgacgaccgccgctacttctgccgcgtcgagttcgccggcgacgtccatgaccgctacgagagccgccacggcgtccggctgcacgtgacaggcgaggcggcgtgggagcgggtccccggcctcccttcccgccctcccgcctgccccgccccaagggctacgtgggtgccaggcgctgtgctgagccaggaagggcaacgagacccagccctctcctctaccccagggatctcacacctgggggtagtttaggaccacctgggagcttgacacaaatgcagaatccaggtcccaggaagggctgaggtgggcccgggaataggcattgccgtgactctcgtagagtgactgtccccagtggctctcagacgaagaggcgagaaagacaagtgaatggcaatcctaaatatgccaagaggtgcaatgtggtgtgtgctaccagcccggaaagacactcgcagcccctctacccaggggtgcacagacagcccaccaagtagtgcctagcactttgccagaccctgatatacaaagatgcctgaaccagggtcccgtccctagagcagtggctctccactctagcccccaccctgctctgcgacaataatggccacttagcatttgctagggagccgggacctagtccaagcacccacaagcatgaatttgccaaatcttttcagcaacctcttaaggcaactgctatcatgatcctcactttacacatggagaagcagaagcagagatgatagaatctttcgcccaaggccacatctgtattgggacgggggcagcctggcacccaagtgcccattcctcccttctgaccagcccccacccctccggctctggcgtccaaagggctaaggggaggggtgcccttgtgacagtcacccgccttctcccctgcagccgc

SEQ ID NO: 19796 - DNA, 2300 bp, Homo sapien
tgtcacatttattgttgagacaccttaagtgctttgatacagatctacagttatttatgaaggttagcaaaatatacttaacttttttagtgcccttaatggaaccccatctgtgctgctcttgtcagccactcagtagctgaaatgcaagaaaagctgagggcagttgttctagagaaatcccaggcttaagaatgattttatagctagatttagtatatgagacgggcattaagtaaatatttatcaccattatgaacatactagagaaaggtggtttaaagaactataagatggagttttaaaaaggatgaccttaactataagacagattagatagtagcacagcctgttaagggatgctgtagactctgtctctaggagttttattctaatggcagatgaccctgaccaccccagaagctggggatcttttaattctttgtgtcttgttggcataataaactatatttttttggtggggttgaggatgaggatagagaacagattataatggacaatgaagaatcattttctaaaaggaagagaattagtagttagcataatataataacagtaatgacaagaaatgaatcatcaccaaattccattgatcatgattttataaatagactagagcttttaatcttcattttgaaaggaaaaattcatgagtagccatgttttattttaaacaaattagaagtatttaaatagcttgtaagagatctttgaggtttcttatatactttatagtacatctgttcctcattctctaattttttttttttttttgagacggagtcttgctctgtcacccaggctggagtgcagtggcacgatcttggctcactgcaagctcctccttccaggttctcgccattctcctgcctcagcctcccaagtagctgggactacaggtgcccaccaccatgcccagctaattttttatatttttagtagagatgaggtttcaccatgttagccaggatggtctcaatctcctgatcttgtgatccacctgccttggcctcccaaagtgctgggattacaggtgtgagccactgcacccggcctctcatattttaaatagaatttaaacatgcagtcatcaaaaattgtaaagactaataatacggagacattgttataatacagcattacattaaaaagggaatataggccgggcgcggtggctcacgcctgtaatcccagcactttgggaggctgaggtggacagatcacctgaggctgggggttcaagaccagcctgaccaacatggagaaacccggactctactaaaaataaaataaaaaataagcaataaaataataaaataaaaaattagctgggcatggtggcaggcacctgtaatcccagctactcaggaggctgagacaggagaattgcttgaagccaggaggcggaggttgcgttgagccaagatcgtgccattgcgttccaatctgggtaacaagagtgaaactccatctcaaaaaaaaaaaaaaaggaaaaaggaaaaaggcaatataaataatatacactagtgtagtggatctcaaagtagtgtggtccctgggacagcagcatcagcattacctgggaacttacacattctggctcccaacccatacctgcaaaattaaaagctctaggggtaggcccagcagtctgttttaatataccttccatttagttctgatgcacacttaagtttgggaactactgactagtaaatttcaactttgccctgtcctggcacacctgaggattctgatacactccctgcagctccagtgacttactgtggcagcgattctccacccaggttggggttagggaaggtcattcctcgcttattaagaatgattggaataaatgctgaaatctgaacagacaaactaaaatatacacacatacactgtggaaggaaagatattacaaatattaagtctaaatctctaggaggtgggattctaagtgatataatctggggaaaaagtgttttttaaaaacataattatgaaacaatttacatacattttccagatacatagatagcacaaggcaacagaatgattttaattcattttcttttaggtggaacgaggaagccccaagagctgtttcttatttttggggtctgtactctgtgaagtcaactgggttagtgtgctctctgatgcctggaattccagtccccacccagaaacccgcagcatgattgtctgcctccttttcatgatgattttattggcaaaggaagttcaactggtagaccaaacagtaagtttgggaa

SEQ ID NO: 19797 - DNA, 2300 bp, Homo sapien
tcacgcctgtaatcccagcactttgggaggccgaggcgggcggatcacgaggtcaggagatcgagaccatcctggctaacacggtgaaaccccgtctctactaaaaatacaaaaaattagccgggcgtggtggcgggcgcctgtagtcccagctactcgggaggctgaggcaggagaatggcgtgaacctgggaggcggagcttgcagtgagccgagattgcgccactgcactccagcctgggcgacagagcgagactctgtctcaaaaaaaaaaaaaaaaccacacatgtaacatgcctagaacagtgtctgacgtgattctcttgagtgcagttatctgaacttaagtgttttatgatttctcgaatttcttgtatccattctgggaccatagccctttattcactgatactgctgtgggctctctctagagataacttttgatttgtgctgatcactgaatcctgaatgggagtgagagtgagaatgagcatttcctctcagggctgatctctagtgtaaaactccatggtgggcatttgggattaggtgtactggaatatagaagtaacttaaaacaatcttaggtatgggtggagtaggcagggacataagttgtttgtgaatataatattacagacattgtagagaagtcagaaaatcacccagaatatttcccatcataaaatcattgattttttttctgtttattttcatccatcatttttcctttgatctttttaaagatgtatgtataattttatatccttagtttttcactttacaattgtaagtagcttccttgtggcataacctttgcacaattactttattttttgaaatgattttctcccccagaattaaagcagtataaccaaactgcagaattaggaaagtggagaaaaagccactcacttctgccactcttgtacaatgactcttttgttgtgacattgtccctgtattcgcctccacaaataacttttctttactagtagttatgatcatgagtataaaattttatgtcttattccctagtatctttatagcagaagtgtttttccacattgcctttggtcatcatgtgtattattttaaaatgatacaataatatttccaattgaaaggatttttctaaaattgccttaagtcattttcaacctctcagttttagagttaaaaataaacctgaaaagcgcctctttatatggatcatattttatatttttttccgtatttgagattattttttaaggatagattctttgaagtgaggcagagaataaaacttttatgccaaattggttttagcagaattttgcagtttatgcaggttgagtatccctaatctgaaaatctaaactttgaaatgctccaaaatctgaaactttgagttctgacattgcactcaaaggaaatgttcattggggcattttggatttgggacttttggattagggatgctcagcttttaagtatgatacgagtgttccaaaatctaaaatacttggtctcaagcatttcagttaagggatagtcaacctgtactgacagattgaggtcacttttgagtctcctctttgctgtgataccttgtgggaatatccagacaaggagagtccctacggctcttaggagaagctctttttgagaaataaaatatggtagtagagagcactctggattagaaatttgcaaactggcgttctcattttgaccttactctaggaaattatgtgaatttgggcatgatacttcacccttcctcatccatacaatgaaaataaagattaacttttaagtttctttgcaattctagaattctgggtttagtatttctgtgtgaagattgggtataaaacatgtgttggagacctgagataacccaaggtattgaaggctcataactcattggaagaacagaattttatgaaccagctcccttgtgtattcagtgcctttctctttttccatagcattgagaagttctgtgcagaaggcatcccactattgggaattctggtccagtcaagacatttgagaacagtggttcatgtcctggataagattctgcctttattttacccttgccagtattaccttctgaagaatgagcagtaagtgtgttccatctatggcaggagacactcttaaacagtccagcaagtacaaatgattgtgtcttctggtttcttaagtaaaataaagggaatgctatttcaacagcgtattatggggcaaaaatattctgcaccccagtttagaatgcaggttgatgaacagtgattctaataatgac

SEQ ID NO: 19798 - DNA, 2300 bp, Homo sapien
ctcctgaactcaggcaatccgcctgcctcggtctcccaaaatgctaggattataggtgtgaaccactgtgccaggctgaggtgctttttaaagaaccttcatttctttcctccttctcctctttctcccatcctccctgattaacctcttttttgtgtggaactcacccctgccctggtgtcatcccttcattcagtctttccaatgtatgcctcttttaccagttaggcgatgatacacgtatcacaatgtatctatgcattgtgtctgcttcccaactaaactgtaaaacatgcaaattgagagtagggtcagttgtgttttgctgaccaagtagtgggtagcacatagagaactttaaatgtcataaatgacttaaactgggagaggtcagagagcaagggtattccagactgggagaaatatcagcaaaagttatggatagtaatggtggtataaagattttgtttatattggccaactctttgcaggtgataactttatatacatgcacacacacacacacacacacacacacacacacacaccaggacatacaaagtacatgtatattctgagtagcttaataatttttgttgttgaggatttgggaacaaaatacacgaaattgtattatatactcaattaaaatatcatcacaaacaagcaaactgcatctctgaagtcttttccatttttcatgccatattgctggattttttattctagggtatgctacaggtgggtggatggtctttttcctccctcccatacactccatttccttttcttctttttcttttcttttcttttttttgagatgggagtttcgctcttgttgcccaggctggagggcaatggtgcgatctcggctcactgcaacctccgcctcccaggttcaattctcctgcctcagcctcccgagtagctggaattacaggcgtccaccaccatgcccggcgacttttttgtatttttagtagagttggggtttcaccatgttgcccaggctggtcttgaactcctgacctcaggtgatccacccgcctcggcctcccagagtgctgggattacaggcgtgagccactgcgcctggcccactccatttcaacgatcttaccccaccgccagacaaaactcatactcatttgtgtgattcacgaaatatttatttagtatctactatgtgctactacgtgcagtgttctaaagacccttggatacatcaggcaacaaaattaagaaccctgcctttgaggatcttacattctgggaggattgacagacactaacaataaggatacaagcaaatcacagaaatcctagagctgggaagggaagatgtggacaagtttttcacatctggaaatttcaaatgaagcacactgtaaaatgtatactaagaatacttttacggatcttatttatcttgttacctgtttgcctgtccttttaggagcacatgtcttttttccagtctgggaatttgtacagtaatgataattaataactaccatgtaccgacatgcctgccgctaccaggcacctttctgggagagcccattaaattctcatgacatccgaaaaggcaggtgtgatcattcccctttacaaaagaggacgccgaagtgcacaccccgatgggcgtcagggtttcttccttgcgcgcagtgcggatttaggctaaccgactggatctggtttatctgaagatgaaaaaaaagaatggcaaacccactttccggatttcttcaagccgacgcgggtgaggtgtgcgagcgcgcccgggatccgcactgagtgaggttccgcagagccgggagacggaggaggtgggtcagcctgggtcgctgcccttgtccagcgcaacccaagacacctgcgcgccgggtggagccagggctaggggtggggcctgggctccgggaagggggcgggcctgccttcctccagtgcaaatgcgtcctggagtggtttgtcctacgttgcggcccgtagaggcgccgactcaccgcctcttctccgggagtggcggagattcgatcatgtgacagtccggaggccagaaccgggcaggttgcttgaagcgcaggggtttgacaaaaacaaacggtgacggcgccgcggaagggtctatggccgaggcggtgaagccccagcgccgggccaaggccaaggccagccggactaaaacaaaggtgaggatctcccccaccctcccgaggctctggcagtgtgctgtgtctccttgctcctctcttcggcctccccagccaattctactcccgttccctgagccc

SEQ ID NO: 19799 - DNA, 2300 bp, Homo sapien
aaggtgtcttcttccctccgtaactcatcaatgaatacatttctcagagtagagacagtaacttttcacgttccttatatgcactgtgaggccaagtatggcatggcccaaagtcaaacctcagcgtaggctgggtcccctaaatcatttttttggctttacttgttttctttttttctaaaaaaataagttttattttcttattaaaataatatatatatttatcttaaaaattaaaatgagacaactaactgtaaagaagatagtaagcactggaattttcttctcagtgattgtctccagacagtttaatgcaattaaacatatatgtgtatagtatatatgtgtttattcatatacataagtagtattataccatggcagtggtccacaatttctgggatggggccagatatgtttttacattgttttgaaaatgaaaacaatcattttaaaatcatgctagtagtttggtatatatttccagacctttctctgtgcatttacaactctctctctctttttttgagatggagtctcgctctgttgccaggctgaagtgcagtggcacaatctcggctcactgcaaactccacctcttgggttcatgccattctcctgcctcagcttcctgagtagctgggactacaggtgcccaccaccatgcccggctaattttttgtatttttagtagagacggggtttcaccatgttgccagaatggtctcaatcacttgacctcgtgatacacccacctcagcctcccaaagtgctgggattacaggcgtgagccactgcgcctggccaactcttttttaattgtagatgcacatatgcatatagacgtgaatgagtttttatgctgttatactatacatctctctctatagtttgttttacttaacaatatatcatagacagcttttcgtttcaattcatatagatctgcctcgttcttttacatttaaaaaatttcgtttctaaaaaatgccaaatttcctccagaaaggttgtgctgttttttttttccccaacagtgctgttttgtcccatgcttgccaatatcaagaatatttgtgctttaaaaattttgcccaactgaaaggtttacattttaaagttttgcatttttttcagtagttttaaggctgggtgtatttccaaatgtttattggccatttagccactcttttttgaatttcatgttctttaactggtttttaaatactggaatatgtatttttcttttgatttgtggaagctcttttgatatagctaattgctctttgttatataaattgcaaatatgtttccagtttgtcatgtatcttttaaccttcttcaaggttttgatacccacaagtttaaatttttttcttagatcaatctgaccatctttcagtctttctagctttatctgtcagactttttagctttaatgccatgctttgatttgttttcttagaacaagtatttattcttttcttttacaaaggcaggccatactccttgtatagatcttaaaaaataaggggaaaaatcagcaataatctttctacccagagataactattggtagccaaaattttggcatatgacctttcttataaacatttaggctcatgagacattagagatggaaggaaacttagaggtcatctacagagaatgaagagtcaaatttgaaattgtgctggctttggtaatgtctcctaggatgtaaccttcatgaaatggaactttggctgcttttctccctagtcctgggcaccctaggttagtaacagtagtggtaggaggctaagctaaagatcttctagctttgatcctggtggccagggctatgctggacatatggagaggttcaatacatgttggtgaccaaatgaagtgatgttgattttaccacttactccagtattttgtatatacatatttattttgtatgattttatatattttaattcagacatatgtagaccttgattttttttttaattcttttttgcagaagtagacaatgtggcacaatgtcacattcagcttgcacagagtttaagagaagaggccaggaagatggaagaattcagggaaaagcaaaaactacaacgaaaaaaggttggatttgcatacgtgttaaggtgtttcctttcctcctatagaaaaccgcaggcttgtttgttcattatactcctcagctcagctcccaccatcatgtaatcatgacctgagaaattacttactggagtccccacatggggactcagtccagatgggtatatgcatttctacaccccagg

SEQ ID NO: 19800 - DNA, 2300 bp, Homo sapien
tgatccacctgccttgtcctcccaaagtgctgggattacaggcatgagccactgtgcccagccatctcttcctcttcttataaagcataaagccaccagtttcatctcctgataacccattaatctactaacccattaatccatgaatgggactagtggccctcgtgacccaatcacctcttaaagatcctacctctctcaatactgtctcatttcagattaagtttcaacaagaattcttggagggggcaacattcaaaccacagaagttagtaaaatatcctaaatatgtcccttggatatagcacacactttgtttgtttttttactcacaatacctgccccagagatgagctgtttgaggaatgaagaatattttccagcagcgtggatgaccatttgcaattaaaaactttgtcaccagatggcggaagagggttaaaattcagggagcttagagtctgagtcgcgaaaatcaagcacaatgtactgtgagagcttgtgaaacgttctaataacttaaaattatacatgtattaaaaattaaaatgtgacaattagaattgtatctaaactatttttccagaatatttaaaacttccaggaaaaaccttagtggtgtcttcagctctcccgcttctatgtccccagtttgtgccatttcttaccccctgcagttaagcctagcttcctagtgcctaccacgtcctctgctgccccttgatggttctgccaggcttctctgccttccttctaatctcactgctttcaaaggatatgagcaagtacgtaaatggatgcatcccttggagatgcttggtggctggaggccacctctccatctttgcagttgtggatgactttattggtgggagttcatctgagtggggctggctgcagttttatggagcagaacttgttccaggtgcttcacataattctagcaattgccctttcactgtgtctgggtgtagctagaacctgctccaggggtgagtgcttgcttctccaggctgggctggtgccagtcttggcaaccttgacctttatcctccccactttgagcacctattcctctgcccaggatggatctgccccaggaaggatgtctgtctttgcatctatttagaagggcagagctctaaccttgagctcttcatcccttaaataaactgtgatcttgggcaagccattcaacccctctgggcctcaggttgggcttcgggcctgtcgcaccaggcagtactttgtcataagccctgcattactattaaaagtcatggcaaaaaccgcaattacttttgtaccaatctactacaatgcagagaggggtctgacctgccctggggttttatttgtgagggtggaagagtggagggagaagaaggaatcttgggcccctcttgctggggtggaatgggcagggaagggtcttgccttttgagaatggaaagggagtcagagagcggctgagctcctggaagccctgttaggacaccaccaagtgactagagtcaaggggaaacagcagagatgacctctccatgacattttagactaaaacgtgaccccattcattaaaaacacctgcaacaacaaaaagtaaaataaaaaatgaaccgtcccccagggcctgatctgcagcaggtgccggtggggcccgccgtgaagccaaggcgtctgcgggagttgtcggccccaggccttctgtagcttaaaccgggtcctcgcgaccatctgatcagatcccgtctatcaccccgcagagcctggatttcgtgctgtccagggggccttgtgggcaggaacccaagccaggaccagttatttccaatacccaaagacttccagaaggaggcagctagcttcgggctgatatattgatcgtggcccgacgctgtggggctttaaatgggcctgggtccgggtgcgggctgcagcccctggccgggtgagcgccgagggtcccgcccaggtctcgcgcagggagcgcagagcgccgacggcggccgtcgcaatcgggagtggtttaggacccgggggcggcttccctgcgcgagtgtggaacgcagaagttgagtctgcggagccgcgggcagtggcagtcaggcctccccgctctgtgctacctgcggcccggctctcctccgcgcccccactcgcgctgcgatgacgcgctcactgttcaagggaaacttttgggtaagtcgtggggccgacagcggatcgcggggctcaggacccggcccgggcgggaggccaacgcggcgggcgtggggggctccccagctccggcgcca

SEQ ID NO: 19801 - DNA, 2300 bp, Homo sapien
ccttcatcactttatttcatactgatcacccagcccaagaatcattgccaaagaaaatacagtggaaaaaagcttattaacctgtccaatttctttgcttctgtaatagttatttgaggatatgatagtgagcatattaggcttatcaatgtgctgtcctaagattattcaaaatagcaattttaaaagtcttaatcagagagggttgtttgttagttggaaaagtactcaagaataaaccaggtgaaaaggacaatactgcttccccccccaccccccgactattttcttatgtagtattggtgtatggggaggagtgcccattcagcttcattgatgttcaattgtgtcttttgtgcagggtatgtccttgaacttggaacctgacaatgttggtgttgtcgtgtttggaaatgataaactaattaaggaaggagatatagtgaagaggacaggagccattgtggacgttccagttggtgaggagctgttgggtcgtgtagttgatgcccttggtaatgctattgatggaaaggtaggtttaatgttcgttagatatagttgcagcttctaacaaacatcaaaactgattatgcttagggtttttctttttattttttaacagggtccaattggttccaagacgcgtaggcgagttggtctgaaagcccccggtatcattcctcgaatttcagtgcgggaaccaatgcagactggcattaaggctgtggatagcttggtgccaattggtcgtggtcagcgtgaactgattattggtgaccgacagactgggtaaagactcaaaagcatattaaaagttctaactaaaatttgctcaatggaaggattatattttagtcttggaatggtaaatggtaatggggacattagaatctaatacgaggattaatagtaaaatttcagctgggaagtgaagggggccagcccctccacacctgtgggtatttctcatcaggtgggacgagctagctcagtcggtagagcatgggactcttaatcccagggtcgtgggtttgagccccatgttgggcaccagatgaagggggccagcccctccacacctgtgagtatttctcgtcaggtgggttgagagactgagaaaataaataagacacagatacaaagtatagagaaagaacagtgggcccaggggaacggcgctcagcatatggaggacccatgccgccactggtctctgagttccctcagtatttattgatcactatctctactatctcggtgtgggggatgtggcaggactgtagggttaatggtggggagagggtcagcaggaaaacgtgagcaaaggtctctgtgtcataaataagtttaaggaaaggtgctgtgccttgatgtgcatgtaggccagatttatgtttgactttacacaaacatctcagtgcagtaaagagcagtattgctgccagcatatctcacctccagccatagggtggttttctcctatctcagtaaatagaatgtacgattgggttttacaccaagacattccattccccgggacaagcaggagacagatgccttcatcttatctcaactgcaaagaggctttcctctttcactaatcctcctcagcacagaccctttacgagtatcgggctgggggatggtcaggtctttcccttcccacgaggccatatctcaggctgtctcagtggggagaaaccttgcacaatacccaggctttattgggcagagggccctgcagccttccacagtgcattgtgtccctgggtactcgagactggagaatggcgatgacttttacgaagtatactgcctgcaaacacatttttaccaaagcacatcctgcacagccctaaatccgttaaaccttaagtcaacacagcacatgtttctgcgagcacagggttggggctatggttacagactaacagcatctcaaggcagaagaatttttcttagtacagaacaaaatggagtttcttatgtcttcttctttctgcatagacacagtaacagtctgatctctctttctttcccccacagggaagtccttttaagtttaggaagatttatatttactttctctttttaaaggaaaacctcaattgctattgacacaatcattaaccagaaacgtttcaatgatggatctgatgaaaagaagaagctgtactgtatttatgttgctattggtcaaaagagatccactgttgcccagttggtgaagagacttacagatgcaggtattaaaagaaatttagtcccattgctattatcttaagtcccattgctgc

SEQ ID NO: 19802 - DNA, 2300 bp, Homo sapien
tcaagcgattcttctgcctcagcctccgcctcccgagtagctgggattacaggcatgtgccaccatgcccagctaattttgtatttttagtagagacagggttctccatgttggtcaggctggtctcaaactcctgcccttaggtgatctgcctgcctcagcctccaaaagtgctgggattacagctgtgagccactgtgcctggcccagattatttttttaattgaattgaattgtcttccatagggactgctgagatgtcctctattcttgaagagcgtattcttggagctgatacctctgttgatcttgaagaaactgggcgtgtcttaagtattggtgatggtattgcccgcgtacatgggctgaggaatgttcaagcagaagaaatggtagagttttcttcaggcttaaaggtaaattataaaataagattttggtgttttaggatctaagtcttctcagttattcatttagcgattcaaagattgtatcagatttttaaaaaactttgtcttaatttgcctcagatttttttcttgttattatcatagattgtaaagagaataaacttaagggtttgaattagccaagtttttttactctagggactgatttatacataacttgtagccactggctccaaaatataaaattgaataaactttcaccccaaatccaagaagtttaagtctgttctgtcttgctgttaagattattttatacaaaagcaaagcatttgataacttcaacaaaatttttctggtggaaattggaagtccgtgactttgtatttctagtgagtagacatattgttcaaaggcgagttttggtgtagctatcagaagctctctaatgtaagtctactttgtattgggttgagcctcatctgtcagggtatgagaaataagttgtaggagttagggaaagcagaggatgacatctggataaactagagagagtggaactgtctagtaggcatgcagatatgggaaaagatagtcttgatactcttggtaatgtctactacggaaaaagagccacttgatgtggaagaataattacagagcccaaagttatcattagctgtaagacattggccaatttagcatcttcagtgtacagtatttatctttgaaaggtgaggtcgaaacagattaattctgagttccccttttagcttttgaaatccaagtgtctagaacagtactgtccagtagtattggaaatatgtagtattctgcagtgatgagaatacatctgtgctgtttaatatggtacctactatactatcactattaatcatgtaaaatgtggctagtgtgacaggaactgaatttttaatcttttaaatttgacaaatttaaatagccacatgtggttagtggatgctgtattgaacatcagagatgtaggttaaagtttttggatgtgtaatgatattccatgatactccaagtacttctccagagttttcattattgaccagactattcctggaatagcctttttgcttcagacatgatttaaagatctaaaatatagttttaatgatgagagatgatttggtgctgttatgttatgaaaatttgtatttgattggttacagttaggtagcttttaatttcactttctactaactcgaagagtacaggttttgattaatttttgaaactgtttatggagcttctcacacataaataagatgataatcaaatttgtcttaagatttccatttggccttcatcactttatttcatactgatcacccagcccaagaatcattgccaaagaaaatacagtggaaaaaagcttattaacctgtccaatttctttgcttctgtaatagttatttgaggatatgatagtgagcatattaggcttatcaatgtgctgtcctaagattattcaaaatagcaattttaaaagtcttaatcagagagggttgtttgttagttggaaaagtactcaagaataaaccaggtgaaaaggacaatactgcttccccccccaccccccgactattttcttatgtagtattggtgtatggggaggagtgcccattcagcttcattgatgttcaattgtgtcttttgtgcagggtatgtccttgaacttggaacctgacaatgttggtgttgtcgtgtttggaaatgataaactaattaaggaaggagatatagtgaagaggacaggagccattgtggacgttccagttggtgaggagctgttgggtcgtgtagttgatgcccttggtaatgctattgatggaaaggtaggtttaatgttcgttagatata

SEQ ID NO: 19803 - DNA, 2300 bp, Homo sapien
tgttcttctgacgtaccaaagaccaccctgtttgtgtgtatgccctgaatggcaattattgcttcccaaatgttttaaatttatagatttgtctctgtattttattttacttggacagcctttttctttttcttttctttttttctttctttttttttttttttttttttagatggagtttcacttttattgcccaggctggaggacagtggtgcaatctggggctcactgcaacttctgcctcccgggttaaagcaattctcctgcctcagcctccccagtagctgggattacaggtgcccgcccccatgccgggctaatttttgtatttttagtagagatggggttttgccatgttggccaagctggtctcgaactcctgacctcaggtgatccacccgcctcagcctcccaaagtgctgggattacaggcgtgagccactgcgcctggcttggacagcctttttgtacccctgattcccaggagaactgctgctctattttcccatggcttaccttgaaaagagtaggatactagagaaaaggatggctaatcacgtgtttacaagccatgtttcaggagatgacccttgtagcccggatatttatttgcctcaccaaaattcaggttctaggtgtaagccaggatttgggggatggaactgaaaatgcttctccaaacggtgaaaagcgggcccagcgcagaggctgaggaggaaggatcacttgaagccaggagttcgagaccagcctgggcaacatagagagacctccccccacgccctgcccaccaccgccgtctttacaaaaaaattagccaggcatggtggtgggaccacaggggcacaggctgaggtcagaggattgctccagcccaggagttccaggctgcaatgaatggtgataaacccactgcactctttcctgggcaacagagtgagaccctgtcttaaataaaataaaataaataaataaaaaaaaaagaaaagtgaaggcaacgttaataagtgtccactatgacataataataaccagcatcacacacacacacaaatcttgcatatatcacaaaaatctcagtatggtaattctgtggagaaaaaaaaaaagcccatccaggtaagcatagaaagtgttttttcatcatctccctttgactccaaatgaagaagcagagttcccaatagcatgaactagatgttggcagaggaaaaagcgagtcctcgtcctatcctggtgtaaacttctgattctggacaattctcagtaggattggcaatgactcttctaggcctccttgtgattgttgatatattttttttaatttaaagttccggaatacatgtccaggacgtgcaggtttgttacacaggtaaatgtgtgccatggtggtttgctgtaactatcatcccatcacctaggtattaagctccgcatgtattagctatttatcttgatgctcccctcccccggttatcaggatttttaaacagtttgctctaattcactgacaggattcttttagaatgaatctaaaaaagctgggaatctttaacctgagcgcagatcggatcacgtggaacggtgctggtgtttgttaaaaattcagattgccccgaattttcgactcagagggtctgaagtggggctaagatctgcagattaacgggctccgtgggaggctccctgctggtggccagtcccggggtttagctgttcactgttgctactcgtgctaaaccacggtctaacactaccgacactattaatcgccctggtcctcaagacagccgcgaccccagacgggtgaggccctcatcctctagcaccagatggggcctgggaactgctgcttagcagattcagctacccacgtggtcacccggggcaaccacaaggtcgactcaaaagaccaaaataaatgtataacgaatgccaggaccaaagccggaatatatctaatcattcattttgaggtttaaacttaaaaatgttacataaaaaaataagtaacctgccaaaaaatgcagagtggcggcgggggcggggggagaggtggtgaacgcgaggggcagtacttccgggtcaggtgggccggctgtcttgaccttctttgcggctcggccattttgtcccagtcagtccggaggctgcggctgcagaagtaccgcctgcggagtaactgcaaagatgctgtccgtgcgcgttgctgcggccgtggtccgcgcccttcctcggcgggccggactggtgagcaccgaaggccggcatgatgcaggcggccgggtggggctgcaggg

SEQ ID NO: 19804 - DNA, 2300 bp, Homo sapien
aaagacataaagataactttttttgccccatactgaagggctgcaccagtttatctgaaatttggttacagagcagagatatatttagtttttgtttttttttgttttttgtggtggattctcactctgtcgcccaggctggagtgcagtgtctcaatctcagctcactgcaaactctgcctccagggttcaagtgattctcttgcctcagcctcccaagtggctgggattacaggcacgtgccaccatgcctggctaatttttgtatttttagtagagatggggttttgccatgttggtcaggctggtcttgaactccggacctcaggtgatccacctgcctcggcctcccaaagtgctgagaatataggtgtgaggcaccgcatccagccagagcagagatatgtttgaagcaaaaagaataagcaagacaggctgggtgtggtgcctcatgcttgtaatcccagcactttgagaggcccaagtgggagcatcacttggggccaggagttcaaaaacagcctgggcaacatagtgagaccctctttctacaaaaaatacaaaaagttagctgggtgtggtggtgcacgcctatagtcccagctactaaggaggctgaagcgggaggattgcttgagcccaggagttcaaggttgcagtgaactgtgatcaccactatactccagcttggacgaaagagcaagaccctgtctctaaaaataaaataaaataaataataaataagcttggcttgctagtaagtttcctttgaaaagaaaatcattttaggctgggtgtgttggctcacacctgtaatcctagctctttgagaggccgaggcaggcagatcacttgaggtcaggagtttgagaccagcctgatcaacgtggtgaaaccccccgttctactaaaaataaaaaaattatccctgcatgctagcacaagcctgtaatcccagctactagagaggatgagacaggagaattgcttgagcctggggacgggggttggaggtcgcagtgagccaagatcatgtcactctgcactccagcctaagcgacagagaaacactccatctcaaaaagaaaagaaaaggtcgggcgcagtgcctgtaatcccagcactttgggaggccaaggcgggcggatcacctgaagtcaggagttcgagaccaagctggccaacctgatgagatcccatctttactaagatacaaaaaattagctgggcgtggtgatgcacacctgtaatcccagctactcggaaggctgaggcaggagaatcgcttgaacccgggaagcagaggtggcagtgagctgagagccgagagccgagatcgtgccactgccctccagcctgaacaacagagactccatctcaaaaaaaaaaaaaaaaaaaaaaaagctgggcgcgctggctcacgcctgtaatcccagcactttgggaggccgaggtgggcggatcatgaggttaggagttcgagaccagcctggccaatatggtgaaaccccgtctctactaaaaacacaaaaattagccaggcgtggtggcgcttgcccgtagtcccagctacttgggaggctgagacagaagaatcgcttgaacccaggaggcagaggttgcagtgagccgagatcatgccactgcactccagcctgggcgacaaagcgagactctgtctcaaaaaaaaaaaatgtccctagtttttaggttgggggaactaacggatcaagttaagattgcctcagctcatattgccagggtagaatataaattctgagtggatgcaatcaatgtggaagaaacacaaacatcttgctaagcaagaaccaaacgtttcaagtacttttttttaacgacaagtgattcaaacaagaaataaaaataaaagaaagaaaaaacaacctggttctaggcggctctatctctcgtagtgttgattataccgcggaaggcgggaagagctgggaagtggcaacgaagcgaggcttgcaatgccagagccttcgaccagccttgcacaggggctcaacggccaggagtctcaggtaaaaccacaactcccagaaatcccgggcccggcgaggggcgggtgccaacggcgtgtgggcggggcctagggagtgagcggggcgcatctcccgctaggagttcctagtaaagtggcgggagccgcagctatggagccgcaggaggagagagaaacgcaggtgatggggcgggaatggggatcgttggcctcctggaaaacgcgtttttgacacccccgcgccgacagcgggtctcctgtgcgcgccacg

SEQ ID NO: 19805 - DNA, 2300 bp, Homo sapien
ccacgcccggctaatttttgtatttttagtagagacggtgtttcaccgtgttagccaggatggtcttgatctcctgaccttgtgatccgcccgcctcggcctcccaaagtgctgggattacaggcgtaagccaccgtgcccggccttgaatgcactttttcaaactatatatgcccagcagaaaattctaatgcaatctcctgatacgtagtcatagagtaatttcgtccaagtctcacatttcatggccaccacctcaggtgtcctgataggtccgtatgactaaatcatggagaccggaaacagaaaaaacagataggtaagtaaaaaaccacaaggcatcttgtgtgtcagactaacaagtttagactcttttaaggcttactgttttgctatcagagtaccaataagatatttagtataataacatttattacttagagaattactactggccaggcagggtggctcatgcctctaatcctaccactttgggaggctgaggcaggcggatcacctgaagtcaggagttcgagaccagcctggccaatattgtgaaaccctgtctttactaaaacacaaaaattagccgggtgtggtggtgcaggcctgtagtcccagctacttgggaggctgaggcatgagaatcacttgaacccaggagatggaggttgcagtgagctgagatcacaccactgcactccagcctgggcgacagagcaagattgtctaaaatatatacacacacacacacacacacacacacacacacacacacacacatacatatacatatatataaacataaaacaataaagttactactataacagagtggaagaaaatctgggaaaaataaaggagcaaaacaagtagtctacagtaaattaatcctgtatactttagtgttataaaatttggttacctctatttattctcgttcaaaactctggacttaatctcaccttctgactcgtattcacttgctttctgcttcaagtcctctattaccaggtagacatccctgtcccggaccctgttgcgttctgaaaggtgatgtaaaatctctgtggtccgtgggttcacctcatactgtggaataggatgatctccaaatattttttttaaccacgcagcaacctaaccattaaaagaaagacaaatattataagccttgtttactgtaatggctcgatgagaatatgacaaagaagtgatcaaaagcaaactaaatgctttctgtgactattttggagtcctacttcacaacctcacttgtctttagggagatactagatatcaggaaataaaaagtgagcaagtacacaaagaaacgtacaatactgaaaattaccagagaacaatccgttcttttccaaatctgcaaaagcggtacaggctaacaatttgcctcgcttgaaaaaccttaaagcttaatagaccataataatgcgaacgcattattagaccgtgcatggtctgaaaaaagcaattgtccctcgatcaccagaagccccgccgcgccgggaggctcccagtgttgggatgcagggcgcggaagcagttcagatgtggaagccgccgggctgagcagcgaaccggaaggcgggtttggcttcataagtcccactccagagtctgtggacacgggctgctcaacgcctctcccgggccagatccaaacaaggggaggcccgggcaggaagggaaaggccttcaggagagtctaagcacggggggcttgcagatagtgacggcggcactaaaagacggatgtgtggaataggggagagaaaagtagacgtggcgcgcacaggagacccgctgtcggcgcgggggtgtcaaaaacgcgttttccaggaggccaacgatccccattcccgccccatcacctgcgtttctctctcctcctgcggctccatagctgcggctcccgccactttactaggaactcctagcgggagatgcgccccgctcactccctaggccccgcccacacgccgttggcacccgcccctcgccgggcccgggatttctgggagttgtggttttacctgagactcctggccgttgagcccctgtgcaaggctggtcgaaggctctggcattgcaagcctcgcttcgttgccacttcccagctcttcccgccttccgcggtataatcaacactacgagagatagagccgcctagaaccaggttgttttttctttcttttatttttatttcttgtttgaatcacttgtcgttaaaaaaaagtacttgaaacgtttggttcttgcttagcaagatgtttgtgttt

SEQ ID NO: 19806 - DNA, 2300 bp, Homo sapien
tttcaaaaagaaaaataaagaaaaataaagtgatgactaagggatgtagagtttctttttggagtgatgaaaatgtttttaagaataggttgtactgatggggatacaactaaaagccactgaattacatacataccttaggtgggtggattatatgctatgtgaattatgtcttgataaagctgttaaaaatttttaaaaaagcaaacagtcactatggaactctttcatgtttttagccaagtatcttcaagaccttctcatggagagtgtgaatttttcccccgccaatctctctagcactggttccaggtatctgaatgctttggttgacagtgcggtggcccttgaaacaaaggatacctcgctagctaggtaattcttatgacagttttaatttccgcaatcatatctgctataaggtcttaaagactttttgttctcagcataattctatatgaaaaattggcaataaatacaaagcactgaatttagttacttcatgtctttgccagtgagtataattaatttggataaatatggtattggttaatttttagtgttttcttcttccaggattagatttatgaagggtggttctcatgtatatttggaaaggggttagtatcacattgttccctgtgtataataagaaagatagtaggctaaatgatttggttgagcataataaattttggttatgtctacctttttgttaagtaggtcaggaattttcattctttttaacaggcattttacttatataataacatgattcttccaacaacctttagaggaatcaggaggtgtgggttaaataatttatccgagctactaaatggcagagctgagattcaaaaccagtcttataaagttcatatgactaccacttttggccatatcttagctaggactactaatattttgttttagtttttgtttttgagacagagtctcattctgtcacccaggctggagtgcagtggcgtgatctcggctccctacaacctccgcctcccggggtaaagcgattctcctacctcagcctcccaaatagctgggattacaggcgcctgccaccatgcctggctaattttttttgtatttttagtagagacagggtttcaccatgctggccaggctggtctcaaactcctgaccttgtgatctacccacctctgcctcccaaagtgctgggattacaggcgtgagccactgcgcccggtagaactacgaatattaatacaacttatcataatcagagaacaacacagcagaacagcttacctgtcaatttaaaggcaatttatgtataagctcaaagagtagtgttttaggtataagagcatccctactgtatggcagcagaaatctagacttgaattaaataagttcagcagataacaaataccagttgtatgttagttgtataagcactggggaagcagggatgaatcatataatttcttgccttttttttttacaaataatgtgtattttagaattttttaaactttttttttatacttacatactatcatacaacttaaagtcacattatgttttgtgccttcttactatagctctgttataactggggaagcgagatgaatacgatagtaacttccttaaagaacagtctctgcttacagtcaaataagggagatagaaatgtgactataacatagtgtgacagctgtaacagtaaaagtatgtacaaggtatagctgggtagcacagagaaggaggtagttaatgccaggatgacagggacgctcatctgagttttgaaggaacaaatggaactttgccgaatgaagaagggcattccaggcaatgggaacagtgtgtaaaaaaaggcataaaggtatgaacagcatggttatataaaaatctacagggcaataaagtcatttttagcaatgaggagtaattataattattgcccattaagcccatgtatatgaccagattcttcttttagttttatccctgcagtgaatgatttgacctctgatctctttcgtaccaaatccaaaagtgaagaaatcaagattgaactggaaaaacttgaaaaaaatttaactgcaactttagtattagaaaaatgtctacaagagtaagtaattgagttcagagtggtgacaatttataaataagggagtaataggacattgtcaaatttagttttggcagtaggtgtgattttaaaaacattaggaaatgggatccataaaacatttttttaagttgaatgattagtggagctggagatggttggatatagacttttccagctt

SEQ ID NO: 19807 - DNA, 2300 bp, Homo sapien
agtaattaggatatcaaatgccctagcctccaaaaatatacaaaggccattcgacgtaggaaattgacttattggtattaaacaggagaaggggctgggtgcgctggcttacacctgtaatcccagcactttgggaggctgaggtgggtggataacctgaggtcaggagtttgagactagcctggccaacatggtgaaaccccgtctctactaaaaaaccaaaaaattagctgggtgtggtggcgtgcacctgtaatcccagctactcgggaggctgaggcaggagaatcgcttgaactcggggggcagagattgcagtgagtcaagatcgcgccactgaactccagcctgggcgacagagcaagactctgtctcaagaaaaaaaccaaaaaaccaaaaccaaccaaccaaacaaaaaacaaagaaacaacaaccacaaagcaaaaaacaaaaaacaaaaaacaggagaaggacccaagatggtatctcagtagtcagggtcctacttcagtatttctgcagcattgattagatcagactgtcaaggaatcttttaaaaactcaatgtattagtccacattcattcatttccagactgaaagttgtgatcttagtgtgatttttccttttcttttctttttttcctgaaataggctgggctcttgtcactaccccataacctctcaaatcccttgaggactcaggtagcagaaagtaaataaatgaatgaacgagtgaaataacatacacggataaactacttagctagcacacactacgttctctgtgattctcagtgaggcagttggtggctgtggttaagaaagtaagctctgcctgtgttggaatccaacactgccacttacttggatgtgtcatcttgggcaggtcactctgtccctcagtttccacctttgcaatttgggactagtaacgccatccaactcatagggttgttatgagttgtaatgaggattcagtggatttaacccatttaaatgcaaggtgcctggtataataaaattattttcttttcttaatttattcttgtagttggggatgaaaaactcgcactcctgtaggcagtcagaaaaaatgagtgaagtgggggaactaaggggcctggtctgaagggggagactgatatttaggggagtgcggacccagtggtgtgagattttcagaatctcctcttgacgggtctcatccgaggttccagcacagctctgtaaaggtaaagaccgtttacattttcctcctcaaagctttattattattatttttcttctcaaaacactgctttgctttgggggagcgcgggtccttggccagatcttgagtcttgagatatgtcttcagcatctcctgctcctccttgggaaacgctccacccgccagtgggcctgcgccctcctccccttcttcggggttcgggtccacctcgtttcccccaccctccccagggctgactgcaaatcggagggcgactgcagaggcggaattcggggcagagcggggtctccccagcgggccacgtcccaccagcaggtggcggtcgatctgcaaggcctgcaaggtgcccggacagaaacttgagcagatattggtgccgctgcccgagaagagctcagccgagtctccccgagcccagctatcggcatccgcgaaaaagcggggagagaagggcacgggctctccgctggagcgactctgggattcagacaccgcaagctgctttcggaagggcttcaggagggggtgagtactgagcagcgcacagaaaagggagcgctgtcctttgctgaaggcattgtccttggcttgcattgagtggctttcccaccccccgggaaagacatttcgggaaggtgacggtctcaacagaaggagggagcgcgggaaagaagcccggggagccggcgccttcacgccccgcggtctgcagcgggaggagcgcgggttccatcgcgccagatggcgctgtctggcttttctcgggcctcgggcgccagtctccagaggtctccggcgcagctgcctctctagccggccgacgcgggctctgtgtttccgggcggaagtgaggcgcccagcggaacggcctctggtgacattttcttgggggcggcgcggacgactgaagggacttggtggtagaggctgcggaggcggcgaggttcactttggtcccggcaggggctctgaccgcgacccactgctcgctgccggggcttgttccgaggaggagaaggcggcggtggccgtcgcgtcctgagtcaccgcagcggggaagagtcccg

SEQ ID NO: 19808 - DNA, 2300 bp, Homo sapien
ctctgtcacccaggctggaacgcagtggcgtgatcttggctcactgcaacctccgcctcccaggttcaagcagttcttttgcctcagcctcccgagtagctgggactacaggcgctcgccaccatgcctggccaatttttgtatttttagtagagacggggtttcaccatgttggccagactggtctcgaacttccaacctcaggtgatccacttgcctccacctcctaaagtgctgggataacaggtgtgagccaccactcctggcctaggattgttttaaattaacagatgtttcagtggccatgaatgttctggtttccatgaatgtgttaaggaaacttaatcagaatgcctgttttatcaacagctgagaacagggctatgaaaaacaacaggcatatagaatatttatgtttgtattaagcaaaaagtgggcttggcatgttagatctgttttaaaggattttgcaaatatttcctagtttttgtctgctatagattgaactatctaggtaacttgatggagtgagatgatggagatgccatattgcacctagcataccgtatagaataatggttatgtgtgtctgtgacctatggacatgatagttgctttctgtaatgtaacacatacagggcaaggtatttacttgttttccatatttagcatcctctttaaaaaccaccagattttcaataggttcttggaaactgcgactttaaatggaacaagatactgctggtctttgaatgatgtcctttagttataaggttaatgagaaaaattggttttgttaaatgtcatttcacttaaagtctcagtttccaagaacctgttgacaatgttaagtaaggacttaactgtatataggtcataagcttttgaggttaaatattatgtcctgtacctgtatggttaattggagttgtatcactcacagtggtggtagagtgttaggttctaaatttagcatacaaagtgtacaatgggtgtagagtattttctcttaaatccctttattcattcatagaatatactaggctttctgggttctgtatttagtgaccattgtggataaaacatctatttaaacactagactcaaattcagcatgatgaggtatgtgggagctaggtaggattgaggaagcatcaaattctggcttttcatcttaatgcttcactagagcaactcctattgaggggactgcagacaagttggatgcatagtatttggttgctcatttgccaaatgcatgtagttggagtgtgtttgtgtttttgtttttttaaacataaatgtaggggccaggcacggtggcttactcctgtaatcccagcagtttgggaggccacagtgggtggatcacttgagctcaggagttcgagaccagcctgggcaacatggtgaaatcctgtctctacaaaaaatacaaaaattagccgggtgtggtggtgtgcgcctgtagtcccagccatttggaaggctgaggcaagagaattgcttgagccagggcaacggaggttgcagtgaactgagattgcaccattgcactccagcctgggtggcagagtaagaccctgtctcaaaaacaaacaaacaaacaaacaaaaacatttgatgtttctctattgtaactcccctcctcccacctcctttctttttggatttgaatgtaaaagtagtcattccaggtaatgcatttctagactagttttaaagcattctttttcatttatatcaaagtcaatgaatgcatattaattatatcagagttttgaagatttctttgtagaacactttaaataaaattgtaaacttgaaaatgttcattacatgttggcctttcaagttagaggattaatattatggcatttttagtagctcagtatgcttagattttgaccgtattaagtcctttgaatttgactgttgatcaaacaagcagataataatatatatatattttaaaggcctgtgtaatagtaagttttgccccacccacttagaaaggtaggcatgttgtgttgactaaataatctggcattctgtttattgactttgtgtgtttttgtacaggttgctttcctgttgcatctttgatatcatttcctagactctactccatgatttaacttgaaattctgaaatgaagatggaggaggcagtgggaaaagttgaagaactcattgagtccgaagccccaccaaaagcatctgaacaagagacagccaaggaggaagatggatctgtagaactggaatctcaagttcagaaagatggtgtagcggattcta

SEQ ID NO: 19809 - DNA, 2300 bp, Homo sapien
gataaagaggtggagaaaggcacagctctttgccttaaagaacacttcctgggagtcacacatgaacttctgcttacatcccattgctcagaattaatcatgcctgactgcaaaggaatctgggaaatgtagtctttaatccaggtggccatatgctgaactaaaagtcagagactctattatccagaaagaagtgaggaatagataacagggcctgctagcattccctgcgacaccttggcagcctaccccagttgcaggtttgccttggtaagcccaatatttgagctgatttatgaatatatgaaactgtctcatgtccaataagagcaaaatcagacagcatgtggaaaagtcagtagaagttagaatcagataactacaaaaggattaagaggaaagtttagcttttcagagatgagtacatgtgattcatttgaatggtgtcgtttggatttaagaatgactggattagagaccaccactgaaatcttaacgtcatcataaggaaaagagtgcctgcagaacattcttttccctggttaaaaaggtcaggtgttggtcgagtgtggtggttcatgtctgtaatctcagtactttgggaggctgaggtgggaggattacttgaggccaggagttggagaacagcctaggcaacatagtgagaccctgtctctacaaaacaaaagaattttgtttttttttttaaattagctgggcgctgtggtgcacctctgtagttccaactacgtaggaagctgaagtgggaggatcacttgagcctggaagatcgaggctgcagtgaaccatgatcaagccactgcagtccagcctgggtgacagagtgagactctgtctcaaaaacaaagcagcagaacaaaaacaaaaaacagatcaggcatgtcattggttcctccttggccctgcattcaggatcaatgtgccattcctaagcctgactttcaatcccacctgatttcccagcccctagaatctacccccacctttgttcatgttgtgcctagatggtagattacttttcctgacacttcactctgatgctcagaatcccccggtgctccccactgcgtaccagagaaacttctggtttcttcaccaggtgtgcccacacacactctttgttcccatcacattaattcatgtttccttaactcaccctggatctccgtgtgagctgtcactttgggcatgtcctaagaggctttgcaggtgtccacttgccacgcaggaaaaggacatgtcctggccagcggaaaaaggatgaaagatgtgggtcagaaccacccagcaatgcacagacgccatgagaaacaacagccgcagccgccttggagctggccagcctgcagctcagggagaatacatgcttactgttgtgtgccactgccggtttgataattattaatgatgtaataggttggtagcaatcgctaacgcatccacctgactagacatgctcttcccttgtctaatcccctctgcagtattttcttttcttctttttttgagatggagtcttgcccttgccctgtcgctcaggctggagtgcagtggcgcaatctcggctcactgcaagctccgcctcccgggttcacgccattctccttcctcagcctcccgagtagctggcactacaggcccccgctaccacgcccggctaattttttgtatttttagtagagacggggtttcaccgtgttagccaagatggtctccatctcctgacctcgtgatccgccagcctcggcctcctaaagtgctgggattacaggcgtgagccaccgcgccaggcctgcagtatttttaatgactcgttttagggtacgaatcacttctaccttcagttaggattagatctggccatgaacacagagacccgagtctcagtagtttaaaaaagacaggagtttatttttcttgcaccgaggttgtgaaggggacacactgtccaccgcagccatgtgtggtgagtgggagccgtctgtgttcttgagggcttcagcggcagaggggagaccgtccaaggagggcttcagcggcagaggggagaccgtccaaggagggcttcagcggcagaggggagaccgtccaaggagggcttcagcggcagaggggagaccgtccaaggagggcttcagcggcagaggggagaccatccaagggagtgagtggggactaaaattcagcctgaagttctggcctacgtctgtgtcaaaggtgagaaagagcgctgcttcctaacttatccacccagagataacatctttttgtgtgcctgc

SEQ ID NO: 19810 - DNA, 2300 bp, Homo sapien
atcctttcatttttttcagatttcaattagtagtggcattgtgtttatttatcagataatgaaaaaaggaaagagctggtggtagaagtgggttgaaaaaaattgcctagggtgagacttggactgctattgggagacttgcctctggccgtcttcatccctgagttctctgggggcagccagagtttagggtgggaaagagagctcaggcctgagagatccacgggcttatgggagagagaatggtgaaccctgggttctgcccttgccactgggaatatggtagctgtctgggtaaagccaggctgtggttttccctttgctgtcttgtccattgtcttacctcacttctcccattctttattcttcaagtctcaaaagccttagaagtcactttcccggagtcagcctcaactcctccccttgccacccactgggctgggtgcccctccaaggctccccgtttgcccagcttcccgtgctgcccatttctgcatggaacaagctctatggtgattgcccgttggcatctctgaggccctctctggcctccaagaattgggatcttgggcagatcgggatcacctccctatgcccttgctcaacacagcatggattaaatgaatgaccctccttttccaaggtgagggcaggttggggttggattagattctttccagctccacatactgtgatttttaccatctcctatttatcagactcattaaagaaagaaaccactgggctttgaagacaagtcccaatgtagggaatgtcctctgtctttctgcccgtgggtgggcccctgaagcattctctggccttagtgtgtgaactgtgagcctgattgtaggcgtagggttgccttgggagttttcacagaaggtcagctgagcatgcaagaacaccgcctcagtcgtcctcctggcaacaaagcttgcggtgaaggctctttgattgggtcttgcttgtccccagctggactgtcacagggcacatgtgacacggtggctgcgcctccacgtgtgaatttgcaggagcctcagagcctgatgttacatatccgcctgctggctgtggaagtgggcgtgtctgtgcacatggctgggtgtacctgtctcagatcagggcaaaaggtagatgagtggccctgggttttctgggcagtgtgtctctgtgtagactgttggcaaagacctcagtgaatgagtgaatttcaattcagcaaataattattgtgagctttgtgctctccaagagcaacgacgcggtgcgccaggcagagagcctggggagtgtgcgtgtcttacctgtgtctgcatcgtgtgttccctctgtgtgtctctgagaatgcgttcttggcacgcgtcctgcgttaacaaggcgtttggtgtgtgcatgtctgtgtgacagtgcctgggtcctgtttgcggctgcttgttcgcattccagcttcccttgtgcccgcagtcaggctctacacgtgcgccagcctccgagcgcacgtccccgagtgacccgtgcgcggtgtgcagggacctcagggtcgtgtgcactaagggcgctcgtgcccgtctctctgcactaaggaacgcacctccacatgtctgagtgcacgtccctctccatgtgtgcacgttccgtgttcacgccgcccatgtctgtgcaggggcgcttcacgcgcgccctctccggcccgcgggcggccagggacccgcgctgggctccacgcttcccgtggggctgacccctccctcgcgccccgcagcgggccgcagcgattggccgccggcccccttccagccgtcacccctccctccctccgccacccgcgcgcccgcggtccccgctgtcccccgcggttccggcgaggccgcgccgcgctgcgctccgctcccattggctgcgcgcgcctttgtgtggcggcagctgcggccccagcgcctttgaatgtcgagaggggccgggaagggagcctttccatgggccatctgtctccccgccagccgccgccccaccgccgcccgcgccccgcgctccgcctcccgccccggcggctcccgcagccccgccgccgcccgcgcccgcgccccggagccgcgccacaaagggcccgcgcgcagccgccgccgccgccgccgcgcgaggagccaggatggtcctggtccacgtcggctatctcgtgcttccagtgtttggctctgtgcgaaacagaggtatcgctttttcctttcggggtctgcttcggagcgtggatcgccgcaggcaccggggcgggggcgggcgccgcgggcggccgg

SEQ ID NO: 19811 - DNA, 2300 bp, Homo sapien
tggccatcatagagagattctgtctctacaataaaaagaaaaattagctgaacatgatggtgtgcacctgtagtcccaaccacttaggaagctgaggtgggaggattgcttaagcctgggaggtcaagcctgcagtgagccgtgattataccactgcactccagcctgggcaagagggcaaggccgtctcaaaaaaaaaaaaaaaaaaaaaaaaaaaagtaaaagggaaggttaatgaaacgagaagatatatagattagacagcaaaacaaggtaatattaagctaaaatttttaactattaaaggaaaatcatgaataatgatggcaaaaaaatagtagaaagtaggcaaataggcaaattggtgactcttaccaatacattttattggacctcctttttctagcagggtcagctaaacgaaggccactcttccagcaaacacagctggactcttaagcaggcagatcatcatgactctattcatactctaaagccatgacaattatacgggactatggatgtaattctgattttctggattctggataagggaaaacttattacagaagcctagcagggtttgcagtggagtatatagggcacagcgaggcagagagcagaacaaatagattttcttgtgtgttccagtgaggttacagtattccccagactaaaccagactcaggatctccagagtttaggaccagaggccagagaagggagacttggcatccgggccttgccccacggtcattctctaggtagtcttcatcttgtgactcttcagatttttctctttgcaaaatgatcttgaagtcagcctgtctctggagagggacagaatgagtaattttcttcttatggttattgttagactgtttcatggcacagtgtgaagatgtgaacatgaaaggtgggctgatttcgctcacgactagatttcttctttgccaaaatatttaccaagtactaatacgccttgtaagtgaccaagtatggggtggtacttaaagaagggtaagtcatgagtccatgccatctgaatttgagactttacataatggtaaactacataatgattctacatatggcttctacataacggtaaactattttcaaataatcagcataaaatgaaaaacagtacaagggaagtcaacaagtataaacagtgtttcatgattgctttacgatagtgcctatcttaagtgaactttctggatagaaagataaatccaacaatataaatagtttataacaatggctacagtttgtaagagttgatgtcttcacgtagttatcagtgaataaatgagtcaacagtggttgactgaaagaataaatgaaacctgctgggcctgaaagtggagggagaaacctgaaggcaggaatctaggttgtaaagggtgttgagggggagtggatggtgtgaagggaccagaaaagggaaactgtgcacagtcatagctttgcaaaggatcgattcattaggaacccaatttctttctaagctctgtatccctagaaagtgcctgggacagcaaaaatgatgtccacttgacctcttcctactgcccttgctgcaggagagtagctgggaaggagttctgggtattacttaagaactttatggccgggcaaggtggctcacatctataatcccagcactttgggaggctgaggcaagcagatcacctgagctcaggagttcaagaccagcctgaccaacatggtgaaaccctgtctctacaaaaatacaaaaattagccaggcatgatggcaagtgcctgtaatcccagctactcggaggctgaggtgggagaatcgcttgaacccaggaggtggaagttgcagtgagccaagatcacgctattgcactccagcctgggcaacacagcaagaatcagtctcaaaaacaaaacaaaacaaacaaaaaaagaaactttaaaaaacctgactcccaggggaagagcaggctgtgggtgaaaaccaccagccaccagctgagtctgccccaggtaatgaatactactctctctgcttctcatagcgaagaccccaggatggcaagggcaagaaggatgagggggaggagtcagacacagatgagaaatgcacaatttgtctgtctatgctggaagatggagaagatgtgaggtaggagaccgccattttgattccctctcccctctcttataggtattggtgaccaatcactgcaccgtgtgtctgggagttggggtgcttgtttgcttgtgcacgtatgtgccaagtgtgctataatgtgcttcatggtt

SEQ ID NO: 19812 - DNA, 2300 bp, Homo sapien
aactgctggctggccaaggacagaggcgacggcatcacctcccgtgtcttcgacctcttggatgccatggtggtgaacattggggtgaaggtagggggggcactgtgagtgtgcagtgcatggccagggcagtgcaggttgaggtggggagcagcaggggagacagaagtggaagaagtaggagactcatcactggggcatccgcaggcgctgcagcctggtgtgctagccagatgtactttgctaggagccgcagactgaactctcttctggtctgctgccgtgtgaccttgggcaagtcatctcatttctctgggccttggtcttcccatacactgcttagaaataatgcatccctgctactcatggcctgttccatgtatggtcttgttgagaattaatgagatcacaattcatgaagagctttgtgagtaagcagctctatgtagacaggcagggtcattgttcaccaaaggatccaccatcaacagcagtagagtggtgataggaaagatggcatctgggatactgtgaatctctgagtctcacggtgcagccaatggtgtccacacaataccctccttaactgaaaaagcctggagggcaagaggtctgagcttcggtcctggctccatctctaactggtcaaatgacctgggataaattatataaacgcacaggtcaggccaggcaggaggcagatgcctggtgctaggatctgaggacacacagccatttggtggcccagaagcctctgtttcacctgaccctgtgggtttctctttttggctcatggctatggggtcaacagaaggccccagcccttatctctggtactgaatcaaaaccaatgggcttcttggaccaggtcagaagctgtcccacaaaggtgagaagaaatcacctggacctgagtgtgctctgcctacattgtatatggaaacagaagtggggctctaaaaaccttgacaggcaggagtgtgggggcctgccactctcctgcctctcgcctgctagagactcagagagcagcactttctatagcgcacatccttcccctaccccccagacatctccatctgtggccagacggatggtgtgggtgagcacacagttcatccagggacctccgcctgacccacttcccagcctgtgtgtgcctctgtgccaccgcccagcacacatgcacaccccacgcagtgcagctgcagctcccttggagccctttagtccaggaaaatccagacctacacccgttatccatggcacaaaggaacacaggtttgtcactttacaaagaactgcagggttctttgggctggccatctccccaggacacctggtatcagactagaattacaagagcactgtttctgtctctttttggaagcacacttattacataaaaagagatgtatctgtgtaaaggagagaaagatggatgcagagaacacaagagtcggacggaccagctctcaggggccagtctccatggggcagctgaagcactcattttgatcattctattttttatgcctgcctggataagagcaaaaaagtgtcaggctcgcacttttgttcccagtggctcctcctgcccatcatgaatgcccttgttgggtggcctaaggggattttcttggtaaagcaagaggctcttcatccattccctcagcaaacatgtcctgaatttctcctgcgggccaggcctgcacagaatacttcaaacctcacagtgtcctggcagagattctagatgctgccagaaaagcatgcaacccccaccaggacaatgatgggaacatgaccgctgtgattaatagctccggtttggaggtccaggcttctgggtaatggggaccaggcccctgcacaggtgatagaggaatgtagcagcctccagagaagggacacactggaccaggtacgttcaaaggagacagtcaagatggcccttccccaaccgtgtgtctgagcctctcctgaaccttcagacttcactgtgagtccaggggcacttggtgagaaggaagggagtaagaatctgggaccaaagaacattctagaacatcagtgtaagtgctttctcttgccacgaggctgcctcacagaggaagaaccgaggtgggggcttggtgaaggcacaccaggaagagcaggctgcgcctcaccctccagtggagacagagggcagacattctctttggagcacacctcaggctaaatggcaaaaccccaatctcaagtgaacatcatggaactaggggattgtctcacttctccagtggattgaggcagtg

SEQ ID NO: 19813 - DNA, 2300 bp, Homo sapien
gcttaagagacaagctgagaagccagaactgtatcctaatgcagtgggaatccatgaaaagaaatacacataccttactcttccaggtgtagtgggaaagtcatgaaaaataaagccgtcatctttgcccttcaagattttataatatcccctggctagaaaactatctcttatctcacccttcccattcctgcctctacccgaaagccaaattctctcattaacacagattttttaaaaatgaactaaattaattaacatatttctgggctcatttcttgatttatttcaggggccccctgctttttctttaaagaatcttccccttgacttgaggatgtagtttatttctgcgtttcagtgttctcctttaaaaattatagccacatatttctggattaggaaaaaatttctatagaggactacataacttgtgcaactggtaaaatttgaacatggactgtatattatataatagcattatgttgatgttaagttttctgaattggatcattctagtgtgattatatgagaatatccttgttcttgggaaatccatgttgaagaatttagggatgaagaatcatggtatctgccacttactttcaaatgatttagaaaaacatacagcaagagagagagtgcaagagagatgacagagtgagaaagcaaatgttacaaataagtgcagaatctaaatgaaggcatatgaactttcatcatactatttctgaaagttttctgtagatttaaaatctttttcaaaattaagagtcaaaaaagttatatccaagaaggccccatttacttataggttcctggtgtggtctgcttcctcccgtgcatggagcagtgtgtgcattcacatggtgtgatccatatggccctcttcacacctaaatggtgggcaaatccgtcttcagtttctgacagtcactttggatttgcacagcaccagctcatagcaggtacttaatacaaatatgtgattgaagcagattatgcacacacctgcacacattgcagagggtttcagtgcacccccctctcttgcacacaaaacacccaccacagatgtgggcatccagcaaacctatcttctcttctgcctctcaaggtcaccttcactcttcctctcctccttccaccttcctggacatgagagtgagaagatctcctggcagggacaagttagggaaacaattgtgcagaccaaacaccagactactaagtgacattctccatcatccccactcctggttgctttgggtctcaccattggcctctggctggctgccctggttcttgggaggatggggctgatggccatgtggggaggggtaggtcttaccccactgagtgttccctggcccttcccagacagacaccttcaccatctatgccattgacctgggggccctgaccaagattcggattcgccacgacaacacaggcaacagagcaggctggttcctggacagaatagacattactgacatgaacaacgagatcacgtgagtgtgggggcagtgggcagggaggggtgttgctctgagggaggccatgtctgccacagaggtagtcctggaagaagactgggggtgggccggctgtgacggtggagggtgagggtgggctgggtgacacctaagggtgaggtgtactggccgtgacatccaaaagtaagggtggactggggtgcactgagaatgagggtgggcgggtatgagggtaagggcgggctgggggtgatgtctgaggctgagggtgagctgggttatgtctgagggtgcaggtgggctgggtgtgacattggagggtgagggtggactggctgtgacgtcgaaaagtaagggtggactgggtgacatctgaaaatgagagtgggtgagtatgagggtgagggtgggctggtggtgatgtctgaggctgagggtgagctggatgacattggagggtgagggtgggctggctgtgacactggaaggtcagagtggctgtgacgtcacagggtgagggtggactgggtgacatctgagaatgagggtgggtgtgtgtgagggtgagggtgggctggctgtgatgtctgagactgagggtgggctgggtgacgttggaggatgagagtgggctggctgtgacactggaggatgagggcgagctggctgtgacatccgagggtgagggtggactggatgacatctgagaatgagggtgggcaggtatgaggatgagggtgggctggttgtgatgtctgaggctgagagtgggctgcgtgacatctgagggtgagggtgggc

SEQ ID NO: 19814 - DNA, 2300 bp, Homo sapien
ctcaggtctcatgatctagagtcgatgatgccatcaacactgccctttgggccagttatgtgctatgcccatcctggtagagactgaaaatgatggtctccgcctttaaggaactcataatcaagagggcagagaccagcttgtgaggatgaagagggcatccaggccaaaccggcaccacagctaaaccctggaccccctctctgctcttggggaaggggcagtcaggctgaggccatgtgctcagggttgggggaggagggagcttgggcctctgtgggtgtgggtgaaatttttgttattgaaaaagagcacttttgttttttgcttattacgaaagttatatacggttaacactgaaaatttttgtaaagagaacacagaggcacaaagttaaaaaaagtgatgaaacacaggaacctgaatgaatagattttagctgcaagtagaggagggggataaaggcaggccaagtaaggaaactgtatgagccatgatagggacagaaatcataggaatgaggcgcgcgcgcgcgcgtgcgtgtgtgtgtgtatacgtgcaggcatatgtgtttaagagagaagagggagaccagcttgcccacacagaagttggaagaaataaactttgttggaggatggggccaggtaatcccaggggacccaggacaggtgtggccggagagagggaggtggtggaaggatctgagcacagaggccccagccctctccatcctgcagcttagcaaacaggccttgtgcctggctctttgttgggcgggggtgttgggggcgttggggaggacgctggggccacgacagccgctgccctgccctttgaacagcttgaggcggccgacgtgggcgaggtctataagctccggctcgggcacacgggcgagggctttgggcccagctggttcgtggacaccgtgtggctgcggcacctggtggtgcgggaggtggacctcacgccggaggaggaggcccggaagaagaaggagaaggacaagctgcggcagctgctcaagaaggagcggctgaaggccaagctgcagaggaagaagaagaagaggaagggcagcgacgaagaggacgagggggaggaagaggagtcgtcctcatcagaggagtcctcgtcagaggaggaggagatggaagaagaggaggaagaggaggagtttgggccggggatgcaggaggtgattgagcagcacaagttcgaagcccaccgctggctggcccggggcaaggaggacaacgaacttgtcgtggagttggtgccagctggcaagccgggtcctgagcgtaagtgggtcgtggggggtgggggtggggagggagtggccagacagttcccctaaagggggcccactgggggcagggggcctagatccccctcacgtggaggccaaataggtgggcacccatcatggttcccaaatagctctcttgacctgtgtgtgaaatgccaccattgacactgctgtttggggataagcatggcgcttgttctgaggttctcaggaagaattgatgactttgggaggagccctgatatgactcaatacaactgactgaggggtcatgaggtaggagggctgcctgctggcttcatggtaaaggagtcttgggttgggagtgtgggcagtttcagtcccaggttagtgtagatgcatctgaagatccctctgttctaggatctggctggatctgagaggctgtgcctcaggtccaaacaccccatggccatgaggccctccacactgcatctttctgtgtctacaggaaacacctatgaggttcaggtggtcacggggaatgtgcccaaggccggcactgatgctaacgtctacctaaccatctacggcgaggagtatggagacacgggcgaacgacccctgaagaagtcagacaagtccaacaaatttgagcaggggcaggtagggtgagggtctctggcccctgggtgggggctgtgggtttggtgccctctgagattcccatggcagcccatcgcagcacaatggctgctgtgtttggcagtgtgacttgttcatcccaccaggtttcatggcagtacctcttcagtaacactgatactttgtggaggggttatgagagaattgcaggcagggccccagcacctagagcccatgggccagctgacccacaggaacaaacagagaatggcgttgagtggcagatgctgaggcacttggtagggatgcgggggttcaagaggaagtcctcgccgcaagatggtgtcttgggggaaaactagggggagggagcaactta

SEQ ID NO: 19815 - DNA, 2300 bp, Homo sapien
gccttctaggtaggtacctgacctacatggtgtccttcagtcctcacaaccaccctataaagtaggaactgttattgttcccatcacacagatgaggaaactgaggcaatggaagagccttgtccaagggcacacagctggcaagtgatagattcaggatttggtctgcttcctaaagccctaacctgtatgaattccacagaaaacttccaactcccagcatggcagtcatggtcatgcatgttctagaaaatcaacgttgatattgtgtacatctgagaatgttctctgcagcagaactcccatgactcaccatgggagaaaatccatgttctgtagtataatgtacacatttctccccaatttggctccattcatcctacccacagagtcttcccataccctctctcccactgcacattcacaccttccattcttccctccatcttgctcccatgccttccctctcccctcaactccctgcttgccttgctctttctctctctctatcctcggaacctgccttctcctcatcctgaaaagtcttttctcttctttctgcctctcgaattcctgtttccagtcacttcctctgagccctccctgaccttctctggcctgggtaacttctcccttcttttgctccatgctccttggcagacctttattgctgctgttcagaagcctaaatgctcctctgctccagtccttttcaacctcagcattgcgggctgatcattgtgaggtgtggcacaagtcatctacagatgaaaagtttgcagtttacttaaaaacatactcgaatagaattaatatatactgaatatgtgaatattatatgtctcctagtggtagaagaagagcagaaatgatagcagctgggcattgcttatatcctaaacgatgaaagtatatctgatgtgggaacaccatttgtccatgcatcttagagaaataaagctcgagacctattttttttttctagagcaatgaccattcctttttatttatttactcccaaaggcctggaatctagtaagcactcaataaatgctgaacaaaagaaaatgtaagtttaagaatgaataatacacccatgtagttgcatgtattatcactcaaagaaatttgggatttttatttctctgaggttatgggataagagtgtggggtatggtagggtgagggatgggtaggggaattaacaaggcttaaagtgacaaccgccttagaccccaggacagaattacagaatgtaggccaggcatggtgtctcatgcctgtaatctcagcactttgggagtctgaggggggtggatcacttgaggccaggggttcgagaccagtctggccaacatggtgaaaacctgtctctactaaaaatacaaaaattaaccaggtgtggtggcacatgtctgtaatcccagccactcaggaggctgagacacgagaatcgcttgagcctgggaagtagaggttgcagtgaactgagatcacaccactagattccagcctgggtgatagagtgagactctgtctcaaaaaaataaaaaataaataaaataaaaaaatctaggccaggccagtccttagtagaattgcctgtccaaatgtttgtctttggtattttcttttacttcgcccagtcccagagtttaatctccctttgctagttcttcctcagaattccatgtcctcatattgcctcctgatagaccagaacctcaaatggcccaaccaacaatgttctctctctccctcaatcctcctcaccctaccacatcaggcagcaaaggaggacattaatgtcctctattaaaagttatgtttttaagttatcagcaaaagagcaagcgaaatgaatcagatagccctgaacgtaaatctccattaatggagttgactattataattagattagacataacagaattcatctggcagctattaataatgtacgcatggtaattatcattaataataagtactattcttagccaacccgagttcctccttctctttgttagtttcctctaatcagcactgacagcttcctgtaataatacgtgcggtttattctcaaactcagatgcattggacacacaaactctggaaaagatgaaatgaggtcgagagggacattaggtggcatctggaggagtaggacatgatggggaaagaggatgtgtggaggaggagggctttgggggtgttgtaaccaggaaggggaggagggggtgggatattatgatgcagctcacattgaacactctctttcctgttgtttccacaccagctat

SEQ ID NO: 19816 - DNA, 2300 bp, Homo sapien
aggcgggacttctcacagcagaccccagggcctgggcttggggcagtcagctgggcttaggcagagaggggttcacatatcatttcacatctgaaattaattccctttgcttctccctgtggtgtttccaccataaatgggatggtgtctaagagacactgttggtgaactaactgccttagaacttagctttgtggaatcataggatgttagtgctgggaggaggacttcagcctacctgcctggcaacctgtctccctccctccttcctttctccctgcctcctcccctttctccttccctcccttcctcttttcttcctccccttaaacatttctggaaagcctattctgctttggtctgtggttggacttaggaagacataaggataaacaaaggcattatctgtgtcttctgggggtgcagggcccagagattatagacccagtcccacgtgctgggtgctctgggagggttaggagctgtaagagtctatcagggagtgggatctgctatccaatcacctcatttgacaggccccccggctgagccagtcagggacgtggagagtgcaggctttatcccaggcctccaggctcctgatccagggctccgttcttggccaaacttttgtgtcttggcttgggcttcctgtgggggggttgttgtggaacctgtgccctgtgcacaacactgttctcagtgctgactctcacctgcattctgagctctggtcctggttgggaaaacctcaggtggctctgagtctcagtctgctggtcaggaatgtaggggagtagccaaggggatgaaatgatcccaaacacctgctaaaccaggaagaactgcaaaggacagtggatggttattacttgcttgagctctgcctatttctcccagggagggaatttctgggaaagattccagttacctgagatttctagccactgcatggttaattgaacccagttcttgaaaccatggaatataaaaactagaaggttcttaaagaccattttgttccactttaggaaacaggcccagagcaaagatgtgactgggtcaagtcatgcctggggctctactgagtgcctgctgtggacagagccctctactggaagccctctgggtactagttatgttccagatgggcagtgtttgggggaggctccctggtgacacagacatcaggattcccacagctgagggtgttgcaggttggaatctgccccagccagggccctcgtaggagctgaggattggagcatcgggatccagcccacagaggagttgggacacctggctgctggccatattcctgcctgtgggtcttagggccagtccttcctctccctcaatgtctcagtttcctcatctctacaactagaagctttgtaaaaatcttcagcgtctgtacaatgtccttattttggggggacattcatgatgaatggatctaaaccataattaatatttctcattatactagctagcatttatcaagctacgttaagcactttccctatattatctcctgtaatcatcatgagacccctttgggtaaggaggctcccattgtacagatgaggagacagaggcttaaagcaattccaggacttgcccttggtcaggcacccaatggagggaacggcacccaatggagggaactgcacccagatctgtagagccccaaagtctgtgctccaaacctctgtcttagcttcccagacagtgacaccagaacatgagggatcctgaccaagatgcccctgcaggatagtacggggccctcctccagggacaaatgctctaggaggctgtcatcgtccgggaagcagcctgtgcttataggtgcctctccctaaccctgccgcctacagcagtagcgacttacccacagtggcactggaggggaactgaggccatcgtcacatttttaaggtgaggaaagatgcccagagatagcacatgttaagtgacaacacgaatgacttgcccagggctacatggccagcttgtggctcaactgggactcaccagtctcctgactttcaggatatagtttttctgctgcagccagtgtttataagaaaaacattttttcaaaggctcagagagacctggtgttgactctggaagccttctgccatgttcctccacagccctgtcaccacgccaccatgcagtgcagactacccattgaattattattcaagggaaatcgattcccgtaaacaaaacaaccatcatgtcttcctttgtgctaaacccactgctccaggcttgaaaggcagcaaaaa

SEQ ID NO: 19817 - DNA, 2300 bp, Homo sapien
gtgttcctttcttccatgaactgatgccccatcactggccaccctgcccctggctcacttggccccagtgaaagctcatcctcccctcacctctgcctctgcaggggacagtcctcacctagcgcatccacctgggctggcccctcatcacccacttcctgtcctgctcacatgtccccttcccagagaggcctccctgactgccctgtgtggaataacattcctcccccaccccaagccccttatccccctttcctccctttatttctcccacaacacctttcaccctttagcgtatgacgcattttgtcgcctgttagtttattgtcgtcatatctgtctccctctggtagaaattaagagtcactggggcaaggctttggtggcttgctcgctgttgagcctcagtatgtggcctgggatggctgttggaccaatatagaataatatcataaaataaatattatgcatatataacaagatgaaaatagaatgaatgggaaaaggaaaggtaccctcgatacactgtgaggtccaatgcaagtgatttgctgattaacaatagaaaagcaattatacattttatttcacaagcttggcttggtgtgaaagaaatggctcatttttaaactttctttcattaaaaacatgactaaaccttacccaccaatttgtgggaagttgaatccaccagtgttgagccgccttcggggtcttccccctcccagggttgtgtgaagaccctgggggtcttgtgtgggacagaacagtgccgtggaccccctgggctgtgctggccctgctgatctgctcactgctttctggaggcttctggagccctgggtccagcctcccgagctgcccctttctgaggtcctgctatcccttgtgagggatgtggacagagcgatctcaagctgctagcatgggcttcctggtttgggccatggtctcaccacttccaccagccctcccgagacccagaggcactggccccccacctcccccaggactctctcacacagtttcttcacagcacaatttcttgagcattgaagcctttcgcccccacaacccagttggccctgggttgaagataagaaaaccgagctacctttctggaatggaggagggaaaatacaaatgaataattcaatagattatcctcccacaaaagttaaatagcaacgtttgtgaatgattttcttcttttattgtttttttacgaatagagcctactcaaggttatccctctaatgatagggagtacagtcattctcattcctgttgtatgcctgtcaagagggagggggtggtgacaggcagggccctggaatgcgctcacctgggccagtgtgaggatagcagtaaaggtgaacaggtgtgttgtgcatgaggccagaaggctgaggtcactgacccagcaccccaatatgggaagaccccaatgtgtgctgggtgcaactgactcccgggacaggatccagaccttgggtgctgagaggcctgaactgggagtcaggactcctgggttccaggcctatctttgcccccaggtggcttgagctaacttcccactctatgcctgtttcctcagctgtgatggctgatggtgcactctacctctctccctcacaggactggggtcaggatggagcaagatgctgcaactcaggggctgccaatgggtggtctgcagcctacagcgtgtcgtatttggtctgcacagtgtttcaagtttggattcattggcaacctttaagaactgggaaatgaaaaataaaagcctggacttcctgcccctcttggacaaatgagcaaagtggcaacccgaggcctgtcttcccacaacttgggcagcacagacaccctcccctgttcttgttgccttcgctctgctcgttctctgtctgggcccctcatgcccaggtttgaatttgctccctggtagaagtgaagcactttgtagaaatataaatgattaatgtgcggttgtacttttattggctgttttacccagggtgcgtgatgctctaaaaggtccaagaagagcatagaggagctctctaaggagagcttcttgagcgaaagtgtgcatgttatggtgccatccctaactttagagatgatggtcataggatgagcagggccctcccctggccaggatgggatccgtcaggaaggtaagggcgtctgttctggggtggctgctggcttaagattgagttgttttaaggagaagaagtggatttggctttgttcttggtcaagacttgggtcaggaaggactttcagatcag

SEQ ID NO: 19818 - DNA, 2300 bp, Homo sapien
actctacacttgagcaccaagtagagaaaaattagtgaaaaattagtactgtcatcttggagcctgtgtgtaggacctacctcataatttggcccagtgcaaagagaaatgcaaacccccttgttcaaaagtttgaagacagcaagagtggagcaatcagtcaaaatcaatggtggtggtggggacaaatgaacaagtcccactcccaagaagccagcctgcctgtgtgtgtgggagaaagaacctcatctcagaatcccaagacttgttgctaggtgagttactttgggcatctgttgctttagtcctttcagctgtaaaatgggttagccaggggctaggaggtgaaaattcattaatatatgcaagtgaagcacgtttttatgtgccagacagcaaacaaatacaggaattattataataatgggccctctaaatgttggagtttttctttaattggttaaaaagcctacctgtggccgggcgcggtggctcacgcctgtaatcccagcactttgggaggccgaggcgggtggatcatgaggtcaggagatcgagaccatcctggctaacaaggtgaaaccccgtctctactaaaaatacaaaaaattagccgggcgcggtggcgggcgcctgtagtcccagctactcgggaggctgaggcaggagaatggcgtgaacccgggaagcggagcttgcagtgagccgagattgcgccactgcagtccgcagtccggcctgggcgacagagcgagactccgtctcaaaaaaaaaaaaaaaaaaaaaaaaaaaaaaaaaaaaaaagcctacctgtgaccttgcagagaaatacagaaactcttcatggatagcacaggggccacttctgccttatgaattaacacaaatcccgaattcttggtggaacccttatcatgagattttactgtgcattatttgatctttccagttcaaagaagaaactactaaatgccaaggtcgagagtattggagtctgggcacttcccccatcaaagttcttgtgctgaggtttgagtttcggtcaggttcgctgttgaatccctggcctgactctagaacatcccggagtgcctgctggaacctgggaaggggcaccctagaatcttccaaccggcctcagtggcgagcgccgcgggcacacgactcccagcgcttggagcctctgcggtgttaggatgacaggactgtcgcctggccgggttggggggtggggacggtatttcaggctaagaatttctgagaggcacgacattcgcattgcgtttctgtgattattctccctggcttgcgttctgaagcacgaatctttccggatgtagtaactggcttcctaaagctttggggggactgtggtccccgaaggctgccggctgcctgacctaagatttacgagtggttccaaggatgagacaaggtcccagtgtctcggtgacaacagggtctttgacgaacggctgccgagttgcagctggggagggggaagaggactgtggcgggggcggggagcccctgaatttcttccttgtaggagttgggcgccggggcacgggcaggcagccccgcaggccatcagcatgcaggagcggcgcgccgtccttgaagggctgcccggctgaccttgctccgctttctccggagaaatcgctaggagagcgcgaggacgcggccacgatggtgactcagtgccctgcgcgccgcacgcaaatgctcccttccatcaagtccagctccgcaactgttgtttcctcttcctgccctcttttttttctttttttttctttttgagacggagtctcgctctgtcgcccaggctggagtgcagtggcgcgatcccggctcactgcaacctccgcctcccaggttcaagcgattcttctgcctcagtctcccaagtagctgggactacaggcgcgtgccaccacgcctggctaattttgttttttgtatttttagtagatacgggttttcgccatattggccaggctggtcttgaactcctgaccttgtgatccgcccgcctcggcctcccaaagtgctgggattacaggagtgagccaccgcgcccagcccctgccctctttttaattccaagattcaaacccggcgttttgcgctccgcccctccccctccccacggcccgcctatcattagccagactgcgcgggtgttttgtacgccccctccccccgtccctatcggcagaaccggaggccaaccttcgcgatcccttgctgcgggcccggagatcaaacgtggcccgcccccggcagggcacagc

SEQ ID NO: 19819 - DNA, 2300 bp, Homo sapien
atgctcttgtctccataacatgatagacacattgaggtgaagtgaaataacttgccccaagtcacacactagcaggtgagaaaaatgaaattcaaagtcagggcacctcattccagatcctgtgcccttaggctttacccagattgctggctaggtcttttcacctacatcttctcacttaatcctcaaaacaacctgtaaggcaagtggtatttcagcaagtggttttacggcaaagaaactgaagcactgagagaaacttgcccaacatctcacagctagtcagtgatggactccatgtctgtctggtgatgaacacaaattctgattctctacctgtcctctgtctcctctccctccctttctgagagaatcaaaatgacagagccagtccattcctggtctagcaaggcacacacacatgcatctgtaatgtaaggtaaccacattctaatgcagtaagtgctaaagcagctctttgtaaagtattatgggtggtggggatggaggaactgctctgacaaggaggacaaacttctggcaaagaaccaaacgaagaacagaattttcaggtggatcagttcagcagactcattccaagtgaagatagcaccatgtgtgaaggctcaggatgtgagcatatacacaagggtaggtccaggttttgtggaggtggaaattagacaatttagggtccttatttaggaaaatgcagtactgggaatactagtattatactaagaggtatgaaagtcagtgttcattaagaatgagaaaggtcatggcaattcaagattttaaaagctgactttgttgggagttcttaaagagtacccacaggctcaattataaagggactcagagaagatgttttggaccaggcacggtggctcatgcctgtaatcccagcactttgggagggcaaagcaggtggatcacctgaggccaggagttcaagaccagactggtgaatatggggaaaccctgtctctactaaaaatacaaaaactaactgggtgcggtagctcaggactgtaaatcccagctacttgggaggctgaggcaggagaatcacttgaacctgggaggcggaggctgcagtgagctgagattgcaccactgcactccagcctgggtgacagagtgagactccatgtcagcaacaaaagctgttttcctcatggtaatggtttactacaacagaagggtatggatgaaactcagcaaacaaaacggcacatggggtgaagtccaggagaaattatgtccaagttttcatttgtcctctcccagtggagttgcacagacagcactgaattatcccagcaacaatgtgtcattgtaggtagagtgcagccaaccagggaagctcagttgagccttggtgtccatggtttttattggggagcgggggggtcagtcacaggcatcaacatctgaatgactgaccttagctacttggtctctagtccccagaggtcaaactgatacagcatggctcagggattcagacagacaaaaacaggatattctagggggccagaagttctcttcccaggagctgatcaagggacagtcctttatttggcatgtgcagggtttgaacaatctgagcctgctgagttaaccctttttggcacattgagcaataccacaaagcctagaaaaaaattttattaattaactgcttgacatatcactataaacattttttctacattattgcatttctcgagtgcatctttatattttgaaatattttctatagtgacaaaagataattcattgttctagaaaagttgataagaacttaaagagcatgcagtttcacaaatctgctgtttgtggtactgttaccaatggagggtgtccaggttcctggcatcttgaagaaagaattggacaaaatgcagaaagcaaggaaagaatgaagcaacaaaagcagagatgtattgaaaatgaaagtacacgccacagggtgggagcgggcccaagcatagggtctcaagaggcccgttacggaattgtctgggatttaaataccctctagaggtttccattggttacttggtgtacacactatgtaaatgaagatgatgaagtaaagttacaaagtcattcacttggtgtacaccctatgtaaatggagaggatgtttcctatcatagctgaagtgtttccatttgatttagttctaggaaatcagcatgaattggccttatgttctctgcctccagaccccattgtcctgcctcaataccactgcaggttgtgcctgaaaaacacagcattccaataaa

SEQ ID NO: 19820 - DNA, 2300 bp, Homo sapien
gatcgcagctcactgcaacctccacctcctgggttcaagcaattttcctgtctcagcctcacgagtagctgggattacaggcatgtgccaccacacccggctaatttttttttttttgagatggagtttcgcttttgttgcccaggctggagtgcaatggcgctatctccgctccctggaacctccgcctccagggttcaagcgattctcctgccttagtctccggagtagctgggattacaggaatgcgccaccacgcctggctaattttgcatttttggtggagacggggtttctccatgttggtcaggctggcctccaactcccaacctcaggtgatccgcccgcctctgcctcccaaagtgctggaatttagagcgtgggccacagctcctggcctaatttttgtatttttagtagagacagggtttcaccatgttggcctggctggtctgcaactcccgacctcaagtgatccacctgcctcggcttcctaaagtgctgggattacaggcatgagccactgcacctggccaaaacaatatgtgtgtgtgttgtgtatatatacacaacacacacacacacacacacacacatatatatatatacacgcacacacatatatatcaaataaacaattacacaaatacctacataattaccatggagacatctcaggaagaaaaagttcagggtcctaggagaggtcataacaggggaatttgaattaaaatgtgggatgtgggtgagggatggtcttcctgaggaagtgacacttaaagtgaaacctgaaggatgaacaggagttaggaacaaagaagagagtgggaaattattcttggttcaaggatcaacatttagaagccttaaaacttgaggggaggccgggtgcagtggctcacgcctgtaatctcagtactttgggaggccgaggcgggcggatcacctgaggtccggagttggagaccagcctgaccaacttggagaaacctcgtttctaccaaaaatacaatcgcagctactcgggaggcggaggtaggagaatcgcttgaacccgggaggcagacattgcggtgagccgagatcgtgccattgcactccagcctgggcaacaagagcaaaactccgtctcaaaaaaacaaaacttgcggggtgcgggggcaggggagtggaaggaagacctggaagtgcagtgcggatgaaacgaggggtagtgggaagaggcggtaggtaggaggctgattaaacagggccttaaaagttacattgttttaaagacctctcgtgtgtgggttccacccaattcttcaaggaaattgaaccctggacaccgtccagcgatttttctggccatcttgactcagcatcttccttcatcctatatcagcacattacgggggggccatcaagcttccttctatctacttactctgccttggcgtttgactccttcctagctatcagatttccccgactttttagcatggcccttctgagcgctcttatttcacttctccccgcccccaaccccaccgcctaactctcccaactctgcagtccgtgaccttcaggtgcccttcaaggtcagaaaaactcggcaaggttggtacttgcaggacattagcaattcaaagaggtgtcacacaacctcaccattagatgggaacaatagcttacccaacacccatatttagattattccgccacaactactctgggggatggttttatttgcggcggctttctccgtccataggcaccgcgtgaagggcaccgtaagaatcttcccgaatgctcctgtcacgcgtcccggccgcctcttcttcctccccgccacttcccgaggccaggcccgcggataacgcctcagttgcgacccagctctaggcagtccgcaggggcctccgccggggagggaaggcacgacctggggccgagcggggccaagccgcggggcagcacgccggggcaggcgcgggcgggcgctgtcgccgcgcggactgaaggcgcgggcggaaggcggtcgcgcgggtgggcagggggcaccgctaggggcggggcttcggcgcgtcggaggcggagctcccgcgccgttcacgtgacgggcccggctgtagcggcggcggccgcggcgtcttaagcggcgcccagtgcaggatggtgctggaggcggcggcggccgtggtggcggcagcgtcgttggcggcagcgggagtgggtgcggcggcagcggcggcggcgcccgcgggtggtataaaatggcggatttcgaagagttgagggtaagcgggagtggagag

SEQ ID NO: 19821 - DNA, 2300 bp, Homo sapien
ctgagagtggtggtgtgcccgtggtcccagctacttgggaggctgaggtacgaagactgcttgagctgggaggtgaaggttgcagtgagctgtgatcatgccactgcactctagcctgggcgacagagtgagaccctgtctcaaaaaaaaaaaaaaaaagtgaggaaaaatttttttttaattccttgttcagtttccttgatactagttttggtaaagtctaagactaagacagtattggcaaagtgtgtaggagttaggaaatgtgatataaatagatatatgcttagcaaaagaagtaaagtggcttggaaaacatctgggaggcctgagcactgttatagggagagaggaagtaatcagtgggaaggaaaagagagatattaaaatcagtaaagtctaatgggttcagagacagatgtgaaaggattaagaagacaggtgcttggaactaaactcaaggttacatggttggtccaaccaggttggaatgctctttgctaaaattactaggatatatcatatggttcttaattatgtttcttaatgaagtgcttttttttttttgttatgtgtttatcagctgtttagattcaaaatcagcttagctgtttagatacaaaaaatttaccatctttcactttataaatttacagagtacactcatacacctgatctatcagatcaggtatctcatcctgagataggtgtagtcatttttcttttccagattagaaaaattaagttgagactttgctaaagttacacagctagtaaatggaaaagctactcctgagatttttgacttcgtgtattaaaatcttatgacactttatgccaggcgcagtagctcatgcctgtaatcccagcactttgggaggccaaggcaggtggatcacgaggtcaggagttcaagactagcctgaccaagacggtgaaaccccatctctactaaaagtacaaaaattagctgggcatggtggcgggtgcctgtaatcccagctacttgggaggctgaggcagagaattgcttaaattcgggggggcagaggttgcagtgagccgagatcgtgccactgcactccagactgggcaacagagcgagactccgtcccaaaaagcaaaaacagaaacaaaaaacaaacaaacaaaaaaacttaggacactttaatcacagtacttataatgaatcttctaatttggagccattttaagacggtagcctagtcaggtaattgcctggagattcaatccataaagagcactaaaacattttaccattggaaatgtaataaagaaaaaggatatatttaatagaattcctctggtagaagagttcagcatgtggctggcactggtactttgatatgtggccttttgtgagtgataagattactgcacctccctccttctccactcccctttaagggtataccacattactatgttataaggaagttggattcaagtaagtgcagggatttctttttaatgaggatatataaatctagaccagagcagaaatgatcacaacagtgaagagaaacatgccctttctaccctttaccactcagccattcctttgaacatatattgaatgattattggggagtatagattagaaaaaatgccaaattaataatctggtctggtgagacaaagtagcaccctatttcagaattctttctattgcaactaatagaaatctcaactcaaacaatctaaaaccttacaagaaaggcattggctcaagaaaactggccagtacagaggcagagtgagtatcaaagtcaatgctgagattttgtgtgtgtgtgatttttctgctcacaagaagggttggttctcaggttggctcttcactgtagcaaaatggcgagtgttccacatgccagaaagtcttatctctaatcactgaataaatgtcctaggcttccctctgattagcctaccttagggcacgggtccacacttgatctacttggcaaagcctataaatgctcagtactaatcagatttatatgcccagttgtgatctaatactgtggccagaatgacataacagtccttaatgactcaggccagtctagggcagcacctagaactctttgcagtcaaacctacccaacccatccaggagctgctacacattgaggaaggggcagaatgaatgctgggaagcaactacaaagaacactgcacgtaagtttcagtggggctttgcttttcttttcttactgttttgtgtttatgttggtcctctttatgggtgtaagctcctctgtggcagggctgtattg

SEQ ID NO: 19822 - DNA, 2300 bp, Homo sapien
gacttcgtctcaaaataaataaataaataaaaataaaaaataaagtatatggaaattagctgggcgtggtggcgtgcacttgtaatcccagctactcaggagactgaggcagagaattgcttgaatccgggaggcggaggttgcagtgaaccaagatcgtgcaactgcactccagcctgggcaacagagcaagactctgtctcaaaaaataaataaataaataaataaagtatacaggatgatgtgcgtacttacatgcaagtagcatggcatttcacataaggatccccaactttggtatcagtgggaaccatagaaccagtttccagtagatgctaagggacactatactaacattgttttctaaaaatgtctgtaaatattcagttccttataatgctctttaaaccagctttaccatcttattggctccctcattaatgagttaggcaaaatcattgacaggtgttcattcatatcaaagaatcacatttttaactttttgaaaaccatatgtcaacaaaacaatgtgataagtgcagtatgaaaagtatgttgtggaatcaggaactaatttgttctctgcctaagcttcgcctaggttaagtatagtgattgttagaagaaaacgccattgagttatcctagaaagtgacatttgagctgtcttagcaggcaatatagacttttcttatgcagcaggggtgagagtggttctccaagccaaataaactactcattagtcattcacaagcattgtaagcagttcgcttgtgttagagtggggttgcctgtatccaggtgggaattagaggtgagactggacaggaagggtggaagcaaggcatagtgaaaagagcactggcttcagtcaggaaacaggtttgcatcctaactctatctagaactacttattaataatttggctttttgggcctgtttgcataactgcaaattggggcattaataacttctccatgttgtgttaggattatattagatagccaagtaaatcgcatagtacgttggtgctgtagatgtttaataaattacagttatgattattaattagaaagtggtcaacaatttcacatggtgccaagttggaataagataaagaatattaaataatctgtaatcggatttcccaattaggaagttattgacgactctggaaagaactgcttcaaaggagcaggaccagaatgtgttgagaaatgggtggaaggtgaggaaatgaggaagaggatagctagtcctttcagaaagcttgccctgaatgggagaaaggtgattcagttcaacacttacgagaacttttttttttttgtagattgaggaaacttgaatatttttgtatcctgaagggagaaatggatgaagaagaaatggatgaagaagaccgaagataatgatgaagggataatttggaataggattcacagcaagagagacagaagggaaagacattgaagaaacagactagttaacacatgaaaaaaatagagcagaggaaaacacgtccatgtttttccacgtctaatgagaacaggtctgatgtgaaaggaattggaggagaaggggaagtttggtgatgcacagtttgcatcccagaaggctcttgacaaccaaagtgtccacagcagattcgtccagtctagatagaccatgcacagagaatttcaaagaaaagcagaatagatttccaaacctttaccctaatccagggaggagaagacgggacgtcaaaatatagtcttgggtatagaagcattgggtcgcaaagacctgaacaacggctgaaatcaaggacaaatattatggtacatggccctgggtcagcttgtattttagaaacgaattaagaaaaccaaaacaattgcaaagcccgccctgtgctctaacaatcttccctcttcgatctcttcattggccagtgtcatgcaaacactctggattaaacatgcatggtctaacattgattggcatgttaaagaatccttctgtggccagcgattggcgggcgtgtctgggctctagccaatccggaaaggggcgggctggttaagcgtcaggttccttggatcgaccggtcagcccagtaactgactacttttctcccttctctagggtcctagcacagtgtctgatggagctttcctaccagaccctgaaattcacgcatcaggcgcgggaagcggtaaggaacgcatatataaaacatgattataccaagaacccctctcctactgttgctgcgggacgattccgagtctccggttgctatggcgacagagtcc

SEQ ID NO: 19823 - DNA, 2300 bp, Homo sapien
aagagagcagaatatcctccccgaggcagagaagccacacgctctttctggaggtggagtagccaccgatcaccgtgcagcccctccccactcccagccagaaaccccagcccctcggaaccaaatccactggcaacaacctttcttcctggaaaacctttcccctgccaaaatggaaaacaaacatgacacaagcaaacgcatctcaaaacacaaacacaaggaaacaatccgagcaagctctagcccctcatagctcatcgatgcccccactggcatgctactgaaaacagcggctgcacccattaaactcattcattactggagaacgagacaaaccttagcagatccctgctcccacagcgacaatcccgctcgaaaacacagaaaggaaacaacccccgcacaaaatataaatctaccccagatagaattcagcatcaacctaaggatcctgctgtaacattactacactgacccaggacagctcaattctcttcccacctatttacaagataaacctcattcagggagctctggaggcatcgccagtattgcactacgatcctcttcgtgaggcagctggaagtctggaaacacagcaaatttacttatttctctgcacaacacggagggtaattctcagaaaaggcttaacacccgaatccccattccccgattctcaggctataacgattatctttctgcagaagagacacacacacacacacacacacacacacacacacacacacacacactgagagagagagagagaaagtcatgtgagaatgtaaacattacgcgaaatcgccgccgacagcagaaacaatagccgacaccatagacacttcaaatggttctgttttcctcatttggactgaaaggtgagagtggaactcggctgcccaaaccgtggcaccaatatcagctgcaggccagagcaagcctttccgaggagattttaaacaaccggtgggagcaagatcctgaagcatttcttccaagattggtcacaggagatgaaacctggctctaccggcaggatcctgaagaccaagcacgaagccatggctaccaagaggtggcagtgctccagtcgaagctgcagaggagcagtcaagagcagaggtcatggccaccgttgggggcggggtgggggggggagatgctagagggattctgctggttgactttctgcagggccaaaccctgatcacatctgctcgctagcagagcgttttcagaaagttagccaaagctggagcgaagaaggtccccaccagagacttcttctccaccacgacagtgttcctgatcatgcctttcttcgaacaagggcagctgggcaagacttgccatgggaaaccgtgaggcgtccacctgacaatcctgatttggcgcctgctgacttctctttgtttccttgtcttggaaaacctgtaaggggcacccagttttcttcagttaacaatggaaaaaagattgcatggaaatagttaaattcccaggaccctgggggctttaagggatgggctagacggcggggaaaagacactgcttccagaagggtcttgatgctgatggagccgaggttgaggagtaaaatacgcctttttcctctttctcccttaatcccacttttctaccaatgtttccaagtcccctcacacaacgtcaatgccaggtaaagagttgtcatcctctgttggttcttcttcctacgattctgtcttgcggtgttgttattttcgcttttactcccaagaagattctctctgtgtcttttggaatccacagatgtggaagctgggtacatggagggccaacggtagaactcagtggggtgtgtccaggctgcaattaacctaatgaccccgcggggcacagcagtccacctggcgtggaccgccccgattggctgcgttgggctgacggaatgaattcctatcggggcggggcagcccaggggcccaggggggtcagggcttgagccctgggtgggcccggggctggctatataaggccgggctctggcagcggagcttcactccgccttggacggcgcaccgcacaggtcacactccaggctgcggccgcacatcccgaggaacagaagcgggcctgctcagctgtctgcaaggaccggcgttccagaccaagtggcccgctgctccgaggacccagctcgctccaggctgtgactccacatcccgaggtcgccgcctggcgaccgggcagcgaggaccggccaccccagactgcctgtgccgccgccccgagctcggacagagccgcga

SEQ ID NO: 19824 - DNA, 2300 bp, Homo sapien
agtttccctaagtaacacatagaatcattcccaaacttttcacccagaacccctatgaaagaatggtgacacattaatcagcttatttaggttctgaatcaagaagtctaaagaggccaatcagattttctaattaccatgaaaggaccgggttaactaccttgagttcagatcacacggacgtctgctagctttcttaaaacttttcattataaagcagggcatttgttggcctcacacgggctggtaatcaaaggaacgtatgccagatatgatacacacacacacaggaaaaaagccaggatggagacaaagggatactgcatttcaggaagacaagaaagcattctttctgggaaaagggatgtgacactgccagtaaccatataaaactcaaaaaagtccaggtggggaggctcaaggccctacctcagcactttgggaggccgaggtgggtggatcacataaggtaaggagttaaagaccaggacgaccaatatgaaaaagatcccatctctactaaaataatcctcattctagctctgaagaattgccagtattacactacgattctcctggagaagtagctggaagtctggaaacacagcaaatttacctatttttctacaaactgtggaagggtacttataagaaaaggcttaacacccgaatccccattccccgattctcagggcataatgattttctttctgcagaagaaacacaccccgcccccaccacaacacacacaaaaagaaagacagagagacacaaaaaaagtcacacgagaaattaaaaattacgcgaaactgccaacgacagcagaaacaaaagccgaaaacatacatatttcaaatggatctgttttcctcattcggactgaaaggtaagagtggaactccgctgcccaaaccgtggcaccaatatcagctgcagaccagagcaagcctttccgaggagattttaaacaaccggtgggagcaagatcctgaagcatttcttccaagattggtcacaggagatgaaacctggctctaccggcaggatcctgaagaccaagcacgaagccatggctaccaagaggtggcagtgctccagtcgaagctgcagaggagcagtcaagagcagaggtcatggccaccgttgggggcgggggggggggggggagatgctagagggattctgctggttgactttctgcagggccaaaccctgatcacatctgctcgctagcagagcgttttcagaaagttagccaaagctggagcgaagaaggtccccaccagagacttcttctccaccacgacagtgttcctgatcatgcctttcttcgaacaagggcagctgggcaagacttgccatgggaaaccgtgaggcgtccacctgacaatcctgatttggcgcctgctgacttctctttgtttccttgtcttggaaaacctgtaaggggcacccagttttcttcagttaacaatggaaaaaagattgcatggaaatagttaaattcccaggaccctgggggctttaagggatgggctagacggcggggaaaagacactgcttccagaagggtcttgatgctgatggagccgaggttgaggagtaaaatacgcctttttcctctttctcccttaatcccacttttctaccaatgtttccaagtcccctcacacaacgtcaatgccaggtaaagagttgtcatcctctgttggttcttcttcctacgattctgtcttgcggtgttgttattttcgcttttactcccaagaagattctctctgtgtcttttggaatccacagatgtggaagctgggtacatggagggccaacggtagaactcagtggggtgtgtccaggctgcaattaacctaatgaccccgcggggcacagcagtccacctggcgtggaccgccccgattggctgcgttgggctgacggaatgaattcctatcggggcggggcagcccaggggcccaggggggtcagggcttgagccctgggtgggcccggggctggctatataaggccgggctctggcagcggagcttcactccgccttggacggcgcaccgcacaggtcacactccaggctgcggccgcacatcccgaggaacagaagcgggcctgctcagctgtctgcaaggaccggcgttccagaccaagtggcccgctgctccgaggacccagctcgctccaggctgtgactccacatcccgaggtcgccgcctggcgaccgggcagcgaggaccggccaccccagactgcctgtgccgccgccccgagctcggacagagccgcga

SEQ ID NO: 19825 - DNA, 2300 bp, Homo sapien
aagagagttttaaaaacactattccaaatgtagtgttaaatatttaagatgagcttctgttactgaaaacacagaatgcagtcttacaaatttcttaattaaaggtataaagttggccagatctacatctttctgcccaggccattcaaattaacctagaaaattatcttctgaattaaaaaaaactaagaatgagccattccccgcaaaaaggatccatttaaactgtaagagatggtgtgcccctgaaatggacacaattacatgctcattaatttctgtgtacaaagaaaggaggcccagaagtgaacatctaatctaggtgtctcatttgcatgtttcaataatctggctgtttttgttttctttcatttcctttgtgggctattgtgccacaaatatacctccattatcaaattcaaaattgaatcctatgataccatagcctgaggaaaaggaagcattgaatatcattcccagttttagacccagaagatatttaggaaatgttactgtatatacaccacatgcaacattagtgcttttaatttcctttttacgggtgcaatggagattaatttgcatgagctcgtttcaatttcagtaataagatccaaattttgcattaagctttcaatctcaaaaacaaacagttaaaaagcatacatcacttctttcaaatgtctttactatacttctgttttacagtccctgcatctaatattcccctaaaaggttgaatatatatacctgtaggttctaatttgtttcttgtttgtttcctgactatctcctggctctgccaggaaacttcctaactttcaaatgctgtacaacccaaaaaaatgctagaaatatcaaaagaagtgtctacagatccagaaaagacatttattgaatttaatacaatgtcagaattggtcaactatgctcagaaacataggaccaagtgttccctaatttgagagggtaaataagtaacaacagaaataagagaaaaaaccatagatatttcaaatgatcctgttttaataattgtcactgaaaattaaagtccgatccagataccaaatctgtttcaacaataatagctagagacaagagtaaaaatttctttaaagttttaaaacaggtggaagaagatccagaaatatttattccaagatttgtaagcggggataaaacatggctacactggatagtcctgaagaaagagcacaaaacaaaggctaccaaaaggtggcagcactccagtcaaagacagagaggaccagtcaagagaagaggtcatggcaacagttttggggaatgctcaaaagatatgactaaaagactttttgaagggccaaaccaagatcaaatatgcttactaacagagtttttgagaaaactagccaaagcatgagcagaaaaaccattaccagagagttctacctaatcatgaaaaagttcttgctgtagcatttcactgaacaaagggcagtttggcaagagtttcaaaaggagatcatgaggcgtccaccttgcagtcatgatgtggaacctgctgacttctatttatttcctcgtattaaaaattctgcaaacggcacccagttttcttcagttaataatggaaaaaagatttcttggaaatagttaaattcccagaaacatcagggcttgagggacaaggcggggtcaagacagtgctcgaactactgtctcgaaattgatggagcagatgttaagaaataaaatctaccggttttatttttgtcttttaatccctgttttgacaaatttgggaagtcccctcacacaacatcagtcctaggcaaagagttgttatcctgtattggttcttctttctatgattttgtcttgctgtgttattttctgttttactcccaagaagattcagtctgtgttttttggaattcacagatgtggaacctgcgaacatggaaggtcaacggtaaaactcagtggggtgtgtcgaggctgaaattaacctaatcaacctctggggcacagcagtccacctggcgtggaccgtcccgattgtctgcattgtgctgacggcatgagtacgtatgggggcggggcagcccaagagctaagagggtcagggctagagccgtgagtgtcagcctgggatgggctacataaggcccagctctggcaccagagcttcattctttgttgcacagcaaactgcagaggtcactccaggctgtggctccacatcccgaggaacaaaagcgggcctgctcagctgtctgcaaggacggccgttccagaccaagtggcctgctgct

SEQ ID NO: 19826 - DNA, 2300 bp, Homo sapien
gctgaggcatgagaatcgcttgaacccgggaggcagaggttgcagtgagctgagattgtgccactgcactccagcctggctacacagtgagactccgtctcaaaacaacaaaaataacattttgataccaatggtaatggaattcttctttgctaagatttctcttggcccctgatttttcattagaagtcaaatattgtgaaaacattcgatgcaaggacctgggacacagtgggctatgtccaagggtatcaacgatcaagataagtttttcctactgtttttgttccagttcagatactgctttatggcttcactcctttgggttttttgcccccccgctccttttttttttttttttttctgaatccagtccctccctttggaggggctgaatttcttcttagcttgcctttcatcaagtagatccatttggagaggagaaagccattagtcctgtcccatgattccacataatctgaatgaggccaggcattggtgcccgcgcctgtaatcccagcactttgggaggctgaggtggaagaattgctttaacccaggagtttgagaccagcctgggcaacatcgtgggaccccaccctgtctacaaaaatcaaaattagccagttgtggtggtgtgcacctgtggtcccagctgtctggggaggctgaggcaggaggatcccttgagcctgggaagtcatggctgcagtgagccatgattgtgccactgcactccatcctgggtgacagagtgaggccctgtctccaaaaaaaaaaaaaaatcagttacactacccaattgcctagtcttggagcctgataattgatgccttctccctaaccccaatctaatctgtcaccagtttctgttttgcctcctatgaatttatcctctttgctttgtttccacacattctagttcaagtatctctcttgtggccctgcagtgggtctcttatctggtctcacccattctggcatctctcctatctattcatactgcaggcagaggaagcatttagaaaaatacacttcttatattacccacttaaaatcctttggtgatgtcttaatctggtcaaagacagctggctcataaggggaaactaggaccaaatcctttttccttcaaccaattagaccctcacacagaaaacttaaacttagcatatatgagtaagacaaaaaaacttcagatccagtggggaggaaaagcagatggctcctagtccaagggacagaatgggtcacagctcctaacagggctgactgcagccttgggtagtgggggtgttagattgtggcatacgggtggcatatatgggtccctagtcaaggacagagcagtggttttatcaaggggtataacccttgtataaggtgtaacccgagtgagtatcctattatgtcaacacggctccagaaagttgttcagtcattttcatagtgagtgcataagagtgacttttctgtactctattattcaggtccacataacttacctggatcaagaggagacaggtagagacccccacgagtgtggcagcgggttagggagggaggtggttctgggtgtaccaagatagagctcccgtggaagaggaaggcacggcccgtagtggctctaatcgggagagaagagggaaaggagggacgtcgctgcccgagggagtagttaatggaggaagcaagaggtgccaggtactattcaagtagctaagggggaaatgacgacttctgagattgggttgtctagtaaagtatgacttcttagttaaacctcgagagtggacaagtggtagaggaagggaggggtgaaggcaaagaacgctactcagtaacgctcggttcagcagtggtgctgtggactggaaaacagctaccgaagaaaggcaggggattatttttcctcgtgcatcccggcccaggaggccgcgcccttgggaaagcgggtctccagaagggcctagctttccgtcagcggcggtgcagacagaggacaacacggcgcggtagctgcaccgcctcggcggaaatcccgggcgaaggggtggggcggagccgggaaatccggggcttccggcgcggccagggcccaacttccggcgtccgtcgggcagcagcggggctgtctatcccggctgaggacccgcggccagtgcgggtggctggctttgccattagcgggggcctttcctgaggacggcgtacggagtgtgggtgagaagccgctgtaggactgaagaggaagaagcgcaattggggccgggaggctgcagattttgtgacagggttcg

SEQ ID NO: 19827 - DNA, 2300 bp, Homo sapien
gacttctgttctgaaggttattgaccaattttacagataggacaaccaaaaactactgaggtcttaggaagtttatttgctttcagtcacatggtaaaaggtttgcttgatatattagaaatatcttgcctcctagtctttttactagtcaaatatcttgctttctcttgtcatttcaccagtaatacacatctaacacatatagaacacagattgcctactcttattgtatctaaagcaaggattttgatggggagaggaaggtgggggaactcatttagctttttatttcaatagctttaggggtacaagtggtttctggttacatggatgaattgtatagtggtgtaaagtctgaaattttagtgcacccatcactggactactgtacattgtactcagtatgtagtttctgtttccctcaccccctcccaccctccctaaagcagggattttatttttttatatttttacttttttaacttttaggggtacagtacatttgttaaataggtaaacttgtgtcacgggggtttggcacagattatttcgttatccaggtgctaagcctagtacccagtaatttttctggcactctttctcaccctccaccctcaaatagcccccagtgtctgttgtccccctccttatgtccatgaggtcttatcatttagctcccacttataagtaataacatgtggtatttggttttctgttcctacattagtttgttaaggatgatggcttccagctccatccatgttcccacagaaggtattatctaattcttttttatggctaaagcagggatttttataagatactttttagctatatttttgaaaatttagggttttatggaaatgccttgggaagcctgacaagagtgcagtggaggctgaatagtgagcctttgaatcccagctctacttcaactaaaaacaaataaatggacctactctcatctggtttagatacgggaatgttacagttctgtgtcagaattcctttgaaaatctggttctgctgttaactataaaagtttgaaaaccactgtacttgattagcgatgaatttggttaatatctacagactagagccaagaaccttcgcacagttcagagacatgcaaacacagggccagaatacataaggactataaacatcatcggtatttggagtccagaatcatcacaaattgttaatcctggtaatagataaaggggaggacatgggcaggccaacaggcacttaagttactgtctactaaaataacacactctgtttactgaatcacaactgctctggggaaaccagggctgaccagtgaaagcttacagacccctcttcagccacaaactggaattatgaagtggcctccagatatgacatattttgatgttcagttcagtgcttcactttcctcagaactacttggctacagaatactttgatcctggcccttctgtgactgctccctgatggaatatttggacaaaatcccaacactgaattaagatgaaggtatgctgtaatgtcttatatgaaaaataacatcagatcaaggtctctcttttctttcattttaaaaaattttgtactgctcataccatatggggaaatgggcctgccctcaagtaactgcttcttttgaatcttttcagtagctcaaacttgaactcaggcatcagttctttgtaaggctaaaagaacacggcctctaagtaccaaattagtcattcacatgagccaagtaatcaactaagaatccttggtactttccttggactagctgcaagcctatagtccaaagatcactgatctctaacttaggaaaggccaaaaggtacttaatacctgctccatagttttagaagtaactgaagtcatgaaataaaaggtgctcatgagtcttctggatgtatgtcagcaattcagttaattcactgaagaaaaaaaaatacatgtaaatatttactttcattaactctatactcggcaattttacagcaaagaacatataataagaggtgttcacccaaaatggagattaatgcagttaacactgacaggtttatactaaggtacaaaaacaagtgcttgacttagaaatttaactttatttacaaatgttctcctataaacaaagatgccattctacacctttaaaatattgtaactgataatttccataaaaaccatttacatagtttcaacctttctgcataaaactgtattatgagataggcaaacaatctcacaagatggtctgagacataaaaacaaaagacaacctatcc

SEQ ID NO: 19828 - DNA, 2300 bp, Homo sapien
gagtgtattagtcagtattctctagagggacagaactaataggagatatatatacaaagagggagcttattcggtactattaactcacacgatcacaagatcccacaataagccgtctgcaagctgaggaagccagtctgagtcccaaagctgaagaacttgaagtccaacgttcaagggtaggaagcatccagcatgggagaaagatgtaggctgggaggctaagccagtctacccttgttgagagcaagcccccaacagtctggccataaactagccccaaaactggccataaataaaatctctgcagcactataacatgtccataatggccctaacgcccaagctggaaggttgtgggtttacgggaatgagggcaaggaatacctggcccacccaggttggaaaactgcttaaaggcattcttaagccacaaacaaaagcctgagagatctgtgtcttaaggatgtgttcctgctgcaattaattcggcccatcccttcatttcccataagggatacttttagttaatttaacatctatagaaacaatgctaatgactggtttgctgttaataaatacgtgggtaaatctttgttcggggatctcagctctgaaggctataagacccctgatttcccacttcacacctctgtgtgtgtctttaattcctctagcaccgctgggttagggtctccccaaccgagctggtcttggcatacccttttcattggttttttgcctgctttatatcctggccactccagcagctgattagatggtgcccacttggattaagagtggacctgtctttcccagcccactgactcaaatgttaatctcctttggcaacaccctcacagacacacccaggatcaatactttgcatccttcaatccaatcaagttgacactcagtcttaaccatcacatacagctaagcaggaggctaaggcaggaggactgctcgagccaggagctgaaggctgcattgagctatgatggtgccactgcactccagcctgggcaacagagcaagaccctgttcctggggggggaaaaaaaaaaagaagaggctcagaggatcttggttggagtttggtcaaggaggggatgtttctcactgagtaattttaaaacagttattttgttttagcattctgaaatctgaaatgggaatattagtatctcctgtatctcctgggagcatcaagtgcagtactgagcaatagaaatataatgcaagcgtcacatgtcatttacagtatcttcataaccacattaaataaaataattaaaaataaacaagaaaccttcctcccttccttccttctttcctcttgctctgtcacccaggctggatctcggctcactgcagtctctgcctcccgggttcaagtgattctcttctctcagcctcctgagtagctgggattacaggagcccaccatcacacccagctaatttttgtattttcagtagagacagggttttgccatgttggccagactggtctcgaactcttgaccttaggtgatttgcccgcctcggtttcccaaagtgctagaattacaggcgtgagccactgcgcccggcctcaaaatattttcatttcaacatgttatcaacatttaaaaattattgggaggccgaggaggggggaatcacgaggtcaggagattgagaccatcctggctaacacggtgaaaccccgtctctactaaaaatacaaaaaattagccgggcgtggtggcgggcacctgtagtcccagctacttgggaggctgaggcaggagaatggcgtgaacccgggagtcggagcttgcagtgagccgagatcgtgccactgcactccagtttgggcgacagggccagactccatctcaaaaaaaaaaaaattattgggatattcttcatccttgttccagttccaagtgtgtgaaatccggtgtgtattttgcacctgcagcactggccacatcagagcattgattgcacatcaccggtctagacaagcggcaggacttgcagtcttcagcgaggggcggttcttagccagatggaggcggggcttcccggagagttcgttttgggccccatcggcttccgtaggaaggcgccggccgtggaggcgccacgtcccttgcggcggcgggagagaaatcgcttggacttcggggcggcctcggacggccatggcctttaccctgtactcactgctgcaggcagccctgctctgcgtcaacgccatcgcagtgctgcacgaggagcgattcctcaagaacagtgagtgggaccgcg

SEQ ID NO: 19829 - DNA, 2300 bp, Homo sapien
tgcctttaaatgctgcataatactccacggtgtttgtcgatcatgttttactcatctttgccccctagtggaaaccatgatggcctccaactctgcacacaaatagtttcaaacaagaaccgctggtgaaatgtgactgctgatggacctgggtgggaatttctctgggatgccgactaaaaagcatggtggctgggtcataaaatgcacacttaatttgaataagtgccacccagtggctctccacaaagcctgcactagtccattctactagaaattattcacatttaactggaaactgggtcttggagatgttaagtaacttgctcaagctcacataaggagtaaaagtgaattaggacatccaggacccaaatccaggccttgtaacttcaggtcaattttattttccagggcaccaccctctaagtctctggatcataatatggagcactaataaaaagatttcttgaggcttttgttatttacataatgaatttcagaaatggcttactggtgctactggcaagttgcaggcagaagaaagaatgaaagcgaatgggcatctcatgttctattctctgattcaacctgttttgggtcccttttgactgctttaccacagttgctattacattattttgggaagtatttaaaaaagaagagaaagtgctggatatctgaactcctttcctccagtctgccatgggccaaaatgtagtaccaccatgcctgactagaaagtaaaagaggaatcatagaatcagatagtgttataaccagaatgggccttacagaccatttagtctagtcctcccattttatagatgagaaaatggaggcccagagagaggaagacagttgcctgaggtcacacagctggaaggagagcaggatgggcacccaggctttctgaaaaccagtctctttgatgcaggtgaacccccacattggggctcagctcaagagggttcttagctttgctcaggaaggaattcaagagtgagctgacagttaaagaaagcaagtttttagagcaatagtgtacagcaaaatggctgctccacagacagagcagggccatcccataggcagagtagcacttgtgcattgctggctagctctatttatagctgctcctaattatatgctaaataagcggtgggttattcacagattttctagaaaaggtgtggggaatttccagaactgatggttccttcctctttaaaccatgtaaggtaacttctgggttttgccatgacatcaactgtcatggtgctggtgggaagtgttttacagcatgcaaatgtattataattcctagtcctaactgcttttggctggttcctttgctacatcctgttttgatcagcagtgtcatgaaaacaagtcctgttcatctcctacctctccttgccctttccacttttctgcacacagcaactttcacctgcgcacccaggaatccacactttaagtcttaacaacctgaggtgttgttgagaaaaaactacaaacagtggtgcgctggcaaatctttaacaatcacctggggtggggtggggtgtggataaacaagccttatttgtagcatatggccaatttcaagctgccaaagtgctgtcactgaacgtgaagtagtgggagcagggcagcagagggccaccaatcagaggcatttccaccaaacagatgcaattggcataagtaactgcaagggcacggacaaccgcaaggtctgctaaaaggattaggaagtgatgagttttgagtgtttattacttttggttttagtgtaacttatttgtaagcttacataatttaatgtctaataagggcaatgtttaacaatcactcatgaaattcctgaaaattgaactgatacggtttggctgtgtccaaaccaaatctcatctcaaattgtaatctgaattataatctccacgtgttggggaggtatctggtgggaggtgattggatcggggagggggggattcccccacgatgttctcatgattgtgaatgagttctcacgagatctgttggctttataagtggtggtttcccctgttctcgctctttcctgctgccttgtgaggaaggtacttgcttctcctttgccttgtgccgtgattgtaagtttcctgaggcctccccaaccatgcagaactgtgagtcaattaaacctcttttctttaaaaattacccagtcttgaacagttctttatagcagtgtgaaaacggactaatacgtgaatactcagctctcctgagcttatgcgagtcagccccaagac

SEQ ID NO: 19830 - DNA, 2300 bp, Homo sapien
cttgaacttcaaagccctatgttatttactttcatatttattatttaatcatcacacaactatatttaagtaggtatcgttgcaggtgagttccatttgccaaagattacagatctggaacagagtcgtactcaaagctacaacgtgcctgactcctgggtttatgctcttcatcgcaaccttcccgtgagaaaagttcctctatgtgtgaggacagagacggtggaaaggacagagattttgaaaggacatctggaaaacttgtatgactcaggggatggccacatctctcttaaggtccatctgaaggcaccctcctctgggacacgttcatttctcagaagaaagcgtatacttcaaaaactcttactgtttggagtgctcatttggtacttcctgattaccgatttgtattgctagtgcttctttcccgcttatttgaagtccccaattaaatctataaactaagccacacatgagaatgaattactggacaggcagccaaaaaaaaactgtgttctagtcttgtctctggcacctgtgtgaaacctaagtttcttttcaactttagttctacggtactccctgcctgtgtcacagtgggtgcatagtaaacacctgatgtgattagttgggctcaatattttgtcagcagaggcttgggtgttcctaagggtaaccgcaacaaggttttccctgggtgcagttatgttctgggcagccgtaagtttagggccttgctgcctcctgtagggcagatgtgcaagttggggcctaatcgtcgcaacagtggagaaaaggggaagggaagatatcccagccattaagggacatcgtgacagatgtttcttttagacttcacaaagacccttcgggacatggattattgatatcatttttactgaagacggaaccaaaatttaggttaaacacttatacctggcatcccctacccgggccctaagtgctctccaaagaccccacctctgggcttatttacatcgcgaacccgccctcgttcagcaacacgagggccccgcccgctcatttgcatagggcgcgcccagtcacgggccgggtcctcgggcttctcccgaaccccttttctctctcaggcgcgtcctccgcgctgcgcggggcctccccgtgggatgagcacgtgtccgctgccggcctcacgacggacggtggacgaggcggcaggcccctacaggccccacccacgacgctggcgagggatcgggcggtcaccgggaatcgtcttaatgcgcggcaaggcgcgggcctctccctctccgcccgtgagccccggtgggagcgcgccggcgcccaactcaagcgaaaccgcgggcgtcccgccccgcccggccgcgccccgcctcgcctcacgctagactggggaggcgggaccaatcagcgagcgacgtctcccttccgattcgaggcccccgatgcgcggctcacaccccgagcttccctcgtgctgattggctgcgggcgccgccggtccggccgggaggcggggcgggccgtaggcaaagggaggtggggaggcggtggccggcgactccccgcgccccgctcgccccccggcccttcccgcggtgctcggcctcgttcctttcctcctccgctccctccgtcttccatacccgccccgcgcggctttcggccggcgtgcctcgcgccctaacgggcggctggaggcgccaatcagcgggcggcagggtgccagccccggggctgcgccggcgaatcggcggggcccgcggcccagggtggcaggcgggtctacccgcgcggccgcggcggcggagaagcagctcgccagccagcagcccgccagccgccgggaggtgggtgcgtggcgccgcggcggccggcggccgagggcggagggcggaagcggaggtgggctggcgggggagggcgcggccgtgcgggcggccggtagggctgcgggcgcgcgcctgaggggaggaggggcagcgcgggcgcgcgcgtcctcaccccctccttccccgcgggcggcggccaggctccctcccctccccttccctctcctcccctcccctcccctctcttcccctaccctcccgcgcgcccgggccgccggccgggcccgggcctgggggcggggcgggaagacggcggccgggagtgttttcagttccgcctccaatcgcccattcccctcttcccctcccagccccctccatcccatcggaagaggaaggaacaaaaggtcccggaccccccggatctgacggggcgggacctggcgccaccttgcaggtaaa

SEQ ID NO: 19831 - DNA, 2300 bp, Homo sapien
agaaacagccttcctacttgtaagttgaacagcctttgccctggaccgtcctccctagtggctctggaaagaggaaacaaggcagaggaggtgggacagctccaccaaatggcttcctgggtgtccttcacaaacttttttatttttattaaggggttagtagagctgcctctaaactaacaatggaagaaaccaccctggaagggaatttttggaggaagaatttctgctgagtaggttcgtctcagcataaatgttcgcacgcaacagaagagaagttaatgatcactgactttccttgaacttcaaagccctatgttatttactttcatatttattatttaatcatcacacaactatatttaagtaggtatcgttgcaggtgagttccatttgccaaagattacagatctggaacagagtcgtactcaaagctacaacgtgcctgactcctgggtttatgctcttcatcgcaaccttcccgtgagaaaagttcctctatgtgtgaggacagagacggtggaaaggacagagattttgaaaggacatctggaaaacttgtatgactcaggggatggccacatctctcttaaggtccatctgaaggcaccctcctctgggacacgttcatttctcagaagaaagcgtatacttcaaaaactcttactgtttggagtgctcatttggtacttcctgattaccgatttgtattgctagtgcttctttcccgcttatttgaagtccccaattaaatctataaactaagccacacatgagaatgaattactggacaggcagccaaaaaaaaactgtgttctagtcttgtctctggcacctgtgtgaaacctaagtttcttttcaactttagttctacggtactccctgcctgtgtcacagtgggtgcatagtaaacacctgatgtgattagttgggctcaatattttgtcagcagaggcttgggtgttcctaagggtaaccgcaacaaggttttccctgggtgcagttatgttctgggcagccgtaagtttagggccttgctgcctcctgtagggcagatgtgcaagttggggcctaatcgtcgcaacagtggagaaaaggggaagggaagatatcccagccattaagggacatcgtgacagatgtttcttttagacttcacaaagacccttcgggacatggattattgatatcatttttactgaagacggaaccaaaatttaggttaaacacttatacctggcatcccctacccgggccctaagtgctctccaaagaccccacctctgggcttatttacatcgcgaacccgccctcgttcagcaacacgagggccccgcccgctcatttgcatagggcgcgcccagtcacgggccgggtcctcgggcttctcccgaaccccttttctctctcaggcgcgtcctccgcgctgcgcggggcctccccgtgggatgagcacgtgtccgctgccggcctcacgacggacggtggacgaggcggcaggcccctacaggccccacccacgacgctggcgagggatcgggcggtcaccgggaatcgtcttaatgcgcggcaaggcgcgggcctctccctctccgcccgtgagccccggtgggagcgcgccggcgcccaactcaagcgaaaccgcgggcgtcccgccccgcccggccgcgccccgcctcgcctcacgctagactggggaggcgggaccaatcagcgagcgacgtctcccttccgattcgaggcccccgatgcgcggctcacaccccgagcttccctcgtgctgattggctgcgggcgccgccggtccggccgggaggcggggcgggccgtaggcaaagggaggtggggaggcggtggccggcgactccccgcgccccgctcgccccccggcccttcccgcggtgctcggcctcgttcctttcctcctccgctccctccgtcttccatacccgccccgcgcggctttcggccggcgtgcctcgcgccctaacgggcggctggaggcgccaatcagcgggcggcagggtgccagccccggggctgcgccggcgaatcggcggggcccgcggcccagggtggcaggcgggtctacccgcgcggccgcggcggcggagaagcagctcgccagccagcagcccgccagccgccgggaggtgggtgcgtggcgccgcggcggccggcggccgagggcggagggcggaagcggaggtgggctggcgggggagggcgcggccgtgcgggcggccggtagggctgcgggcgcgcgcctgaggggaggaggggcagcgcgggcgcgcgcg

SEQ ID NO: 19832 - DNA, 2300 bp, Homo sapien
tgcctgccagtattcatgggaatgtccttttctctcctgctctgcccctggagaaccattttgaaaatgagagctggtgagacctctagtggccaggagacaccaggagcctaggacctgcacctgctgtcctaggattacgttaaacagggtttaaatctggccatcttagggaggacacctggactccacatctgttctaacctcaaagcagagcctgaaattataggcagatgctccacccaagccacacctgcagggaggaagtaggagactagacacagagcttcctggcccctatggccccactggggaaggctgcgaattatcccaagaggaattcttgcagcccagctgcctatacctcagccaccttaagctggtttacccaatgctcagtgtttatgaaaacaaccccctgatatcagttttcctgtcaagaccaccaggaggtgtgtggaatctagctcacacagacccaggttctttccatgagccctggacaatgagaattgatgtctggcaccaggttcagctctgggcagtgaggttaagtaacttgcctgaagtcaccagcaagttggtggtgggtctgcagctggcgcagaggctcccagacccccaataggtgcaggcgcccccaccctacaccataccttacctgtgaataataccacttaaaccctgcaaagttttgccctagattaggctgcattcttttcgcacctggctcttttgtaaaccctgaaattgtctacagacaaagaggagagcccaaggcttaggataagaaaccaccatgcaggaggtttgaacaaggtgtgcccaagcttctatagcctcccagattagtgccaaacacagacagatctcaatagcccgggggctgggatgggaccagggactttgggccaaagcatatagatgaactggagggaaagcataaggttgcctggagagagtgggtatgagattaaagtgcagtccagtatcagcagaagtcgctgcactatccgaggactaaggtcagaaatgctgacttctggcgaagtatcttcccagtatgtgagataaacccctaatagagtgggagtttcatgactctgagctcgggtataaaaggagtttgggggagtggggctttcaggacactgctttttccgcatccctttaatccaggtgagtaaccatacctgtctaaggtggggcagcagttgagggtagatctagcatgagacctatttctggggtttgactccatggcagtagggagcctcggctggttctggagaaagggggagcaaaaggttaggaatggctcctggtgttccctgcgggactgacccccagtctctgcattgcaggcaggacaagctgaaaatccacatgcggaagcacacaggggagcggccctacctgtgcatccactgcaacgccaagttcgtgcacaactacgacctcaagaaccacatgcgcatccacacgggcgtgcggccctaccagtgcgagttctgctacaagagcttcacgcgctctgaccacctgcaccgccacatcaagcgccagagctgccgcatggcacggccccgacgcggccgcaagcctgctgcgtggagggccgccagcctgctcttcgggcccggcggcccggcccccgacaaggcggccttcgtgatgccccctgcgctgggcgaggtgggcggccacctgggcggcgcagctgtgtgcctcccgggccccagccccgccaagcacttcctggcagcgcccaagggcgccctgagcctgcaagagctggagcggcagttcgaggagacacagatgaagctgttcgggcgcgcgcagctggaggctgagaggaacgcggggggcctcctggccttcgcgctggccgagaacgtggcggcggcgcggccctacttcccgctgcccgacccttgggccgccggcctggccggcctccctgggctcgccggcctcaaccacgtggcctccatgtccgaagccaacaactaggctggtccctgtcggctccagcccaccagccctccagtccttctccctccaggcccactctaccctaccccatggatctgaacttttcattttaaaaacacaaagggaaaatgggaaaataataataatactatcagtgatggcattttcccgggctcctaaagcagctgcctccttttgctggtctgagacgggcatcttttcccaaaaggccaggagcccgggcctccctccctgtctctctggctctcatatagaaacttgcaccggcccatgccacaaag

SEQ ID NO: 19833 - DNA, 2300 bp, Homo sapien
cagctgtgtgctttggggacagtgacttaacatccctgggcctgcatttcctcccttgtgaaatggaagttatagtgctgtccaaaccaccagatgagaagtaaacaagataatacttgcaaagcgcttagcacagtgcctgacacccactaagtgctcaataagggctcatcgtgattattttcaagtgtgtgtcccatcttatgcaagagacagctctggaaaagttgcgaaaccaaatcccgttttcccactaactgacttcatcactgcaccaagactttatctttgcctctgatcatctgtggagggcagtgactctgaacacctcagcaccaggcttcctgcctcctcccagctccatgatctccttctcatgcaatggaaaaataagaaatgtaggtggcatgaataatgattctttatgatacctatttgttaaatgtagatttgtttgttctattcatgtatcaatcatctgttctatctatcatctgtccatcaatcatctatctgagaaatgccacctatgattattttatctttccctaccataggtaaaacaatatataattcatacaacgaacaaattatagttctagtcaacaacctgcctttcacctggattttttttttaacattttagaggtcataaactttcttgaaaatttgatgaatactaatgggctgtctcccagaaaaaggatcatacttacatacttgtacagttttgcatatggtttagctggggatttaaggattctctgaagcccaccagagacactgttaaggaccctgtggaagccagagcccagctctcctatgtaaacaccctgtgtcccagtagtagcacatggctgattaggtgtgcactgaagccctccccaccatattcagactcctaagactggcaggccaactcacccccttgcccactgtcaactggtcccacccatcctcctacagtgtcctccctcctgtgacagggctggctggcctgtgtccctccccttggctgtcactcacctttgtcccactgcttccccacccgcatatctacatctgacctacagtgcgagtatggaatgacatctgactgatcagagcaggcccagggaggatgtggagctcgagcagagagaagagaggcccagttgtcaaggcagagaaaccacgaaaagcatggaaacgtgagctcctagttcagggggtgaagtcacagctggcagggagattggaacagagagagaatgtgtttcaagcttgatttttccctcctgtctgattggagattgaagaactcagcagtggcaaaacgccctggcccatgaacaagaactccctgggttctggtcttagttctggcattgactaggtgtgtagctctgggcaggtcacaggtcgcttcgacaatccagcctccgtttccttatctttagagtgaggagactgaaatgctggcagcgctgtggtgagacggactcttttgaacagtgcaggtgtcagcctaagtggaaaatgcaatttagtgctatatgttaggcaccatgaacatgttcataccccctttcatccttctaagaatctcatctaaggcagtcattcaaaatatgagggcagtatgtctaaggatgctcatcctaatgttagctataatacggaaaaggtcccggtgtcccagagtagaggagcggttaagtatgtcatgccgtgtccactggtgacattttatgcagctattaaaaggaatcactgtggtgaacatgcttcagatgcaatccagcagttgaaaacctcctcctgctcccatcctccagccacaacacacctgaaggagggcactgattctcaaccaggggccactaaccagcaaggccacaccgatcagttaccagttgtcactgcttcttccatatcggcagcatgcatccttagagatctgtgaaaaatgcagatttggagttcagattctgactcagtggctctgagctggggcccaggagtctgcattgtaagcatctgtccaggagattctggcagaggatttgaaatccacgtactgagaaatgccaccatgcttcagtccttgcacagcatgtccttagatggcacaatccaggctgttgcaccccttcttttcatcagtgagatgtaaagtctttatcagggacttcaaatttgcatttgtcctagaactcactgctaggtaaatctgctaactatgcgagacagagagctacttattctctgctttgagattcccggaaacagcatctacagccttggacaaggccatagtc

SEQ ID NO: 19834 - DNA, 2300 bp, Homo sapien
taaaaaccaacaatgacaacagggtaagtaaatgggaatttgctgaatgtgtatattccagtattattatataatattttgtaaacccaggaaattgtccagatgttaaagcatacaaataactcactgctgagccaatgaggcataaatgctaagagggacaaaccaacgggaagagtcaggtgtgcttaaacctgttgctttggagtggacgacggttgcctgccacccagacaactggcctctagtacccactctgtaccgaatcatggctgggcatgagttgcttaactctctgggcctgttgcctccctcctgaagggagggaatgacagccaccatggcctttggtacaagaatcaaatgagttgttctataggatgtgaatgtctatgctgttctgtgtctcaagcccgggagacaagttctccacacaaaacaaaatcccacccatccttcaaggcccatgccactctccatggctaattttttaaattttttgtagagaaggaatcatgctatgttgcccaggctggtcttgagctcctcaggctccaaaactgctgggattgtaggcctgggacctttcgaattagctctcttctctcatctgaagcctttgtaccctttaaccttaatcaggtgcttatcctttcctctctctttgttaaaaatcttagaaattcttgccgggcacggtggctcaagcctgtaattacagcactttaggaagctcaggtggtggatcacgaggtcaggagatggagaccatcctggctaacacagtgaaaccccatctctactaaaaatacaaaaaaaaaaaaaaaaaaaaaaaaattggccaggtgtggtggcgggcgcctgaagtcccagctacttgggaggctgaggcaggagaatggcatgaaccagggaggcagagcttgcagtgagccaagatcacgccactgcactccagccagggcaacaaagagagactcagtctccaaaaaaaaaaaaaaagaaaaaaaaacttagaaattctttgctcaagtatcacttcctccaggaagtcttcctgaccctctcccagaccccacccaccctccatccagttggctgctccaggttgtgtggtggggggaatttcacagcactttgtgttaagcgctgacttatcccttgtataatactttcattgactgtagtccctaatactggactgagctccttgagcgcagagactgtgagtcttacctgttttggcattcctagacacacctggtctgtggaaagtgctcactaaatgtgaatataaactaatgaataaatgggtttctacagcagtttatactgcatcacacagttcctctaatgaatttctagcccccttccctgttggggcatacagtattttattcagtatttctcctgaaggcctctctgtgccaagctcagttttaaccaaaacattggtgatctggttaagtcattactgaattatccactacgttgaattctcccaaccaccccgtcccagcccttagcttggccgaaggaaaattaattggttgcaaagtgcgtatctaattacaacagccagcccccgacacagagatgctcaaatgttaattataacatatgcatctcaataaccgacggtggcatttagtgcagcattaatcacgccacttgggccccccagtgcatacacaaagctccttttcatctgccattagcacagactttgcactttcggcacggacgttctcatccttaaagcctttcggactctaaaaccaacgtttccctgtaagcctggactgcgcctaagcccccagttctcccaccgcagaggcccccacccagggctgcgccagcgccgtggggtcgctgggcggcgggttttggcgtcgctagactgggctgtcttggcagctaaggcgacatcccgagcgtcctggggccaccctgctctccagggcccgccatcctggaaaagaaaggcgaactacattacccagcaggcctccagccgccctctttcctttcaagtctttgcacgtggccggaggggagggcggggcctgaacgtcactctcctacattctctttccctgtgtcagatcagggatcattttttttccttcctctactccctcccccctacccgcccctccctccctgtttcccttccctccctccctcccctctctgctgggtctgtgcgctggggcgcccgatcccctccgcagctgggacgctccgaactcgaggcaggagtcggctctccggagcctcgtccctcccttccccttccc

SEQ ID NO: 19835 - DNA, 2300 bp, Homo sapien
acagtgggaattacagcacatagtttatgctgagggcaagccagcccctcgctgacttctcagggttgttggaagaacagaacgccatgatggataagaagatgcttccaggagcagagggtgtttctcaggtgtgggcatcgtcgtctcctccagcagcgtctcacggagttctctgtcctctttcccaccagtcccggcccaggcccctgagctggagggatggaaaactcctctgcagcatcagcctcctcggaggcagggagcagccgctcccaggagatcgaggagctggagcgcttcatcgacagctacgtgctggagtaccaggtgcaggggctgctggctgacaagacggagggtgatggcgagagcgagaggacccagtcccacatctcccaggtgagcgcgggcccggggttggggcagcttgggaaattcagagggggtgatgcaggagcccctaattctgggcagcatccagttgcctgacactagaccgccaaggcatgaatggtcccacccagcagagcacccagaatctggcaggtgggctttgggatccaggcaggaagtgccctggctgtgcaccccgtccctctaacccacctccactcctccctatccaatgaggctttgaggcccagccaggcccacatgtctttgaacatacgtctcttgagtactgactatgtgctgaacgctgttccctgtcctcaataagcttatgttctaggagagatctggaggtttcgcttctccataatgcataccatcaaagaactataacttgtgaatattttctgtgatttcaaatacaagtagttgttggtagccaaaggaatgattgttagtagccaaagtctcgtgggattctcacccagggctctgtatgtcagacatacttagacatatgaggcaatccaaccagcgtcatgtttggtcctgcaccctcctgcctcagtctgtggcatccctgaccttggaggggagatggactcatctgaaagattgtgagctgagatttgaaagtcttggcttctccctcataaagtatgaatgcattaaggatagggaccctatcaagcatatctttgcctaacaccacaaatcctcagcagatttttgttcaagagctgcttccagattggcttctagctgccagtgtgaccttgggcagaaccttcaatgtctgtggggctgtgttttcttatctggcaaatgggaattatgctgttgcctcgggaatgttggaaggtcaaagacagtaagaagtacaaaagctgcagagaatcagtgctgcctgcacaagcatgtacaggagagtcccctgtcttatctggagtcagggttctggggatccgcctctcgtgcgtgttatcccatctccaagcctgggactcctgggacaatcagaaggtgagctacctgggtgcaccctgctttgggaaaaggctgagtccaaccacctggctcactttttgggtgggacccctagctttttagaagccagaacaaacttttggctttgctggaactcagaccaggagtcactctgggaaatgctgaagccacagtaatcccatgccctgtccccactgggaagcaggggacagaaaatagtcctgagggagaaaaaaaaaaatagatgtgatgctttctttagtgtccttgaggttctaaaatcacaagtaatgcaagcttataatttgtttgttattcaatccatgagtgtttaacaagcttctattctgtgccaggcactattctaggactcgtatctaggattgagcaaaaaagccctgccctcatggactgtgtattctactcgtggatgatcattgcgatggagaaaagtaaagcggaaaatggaacggggagtgaggaggagcaggaggggcttgcagttttaagtagcgtagtcagggaagctggcatggaggggagggaggggtgggtagtggagatatccggataggaacatctgggcagaaggaccagcctgtgccagggctgggctggaagaagagtccgggcccagccaggaggccagggtgctggagcagaggatgagggagggagagctgcggagatgagtcagagggatgatgaggactgtgtcgtcaggaggtgcgagtcctgagccctggagtggccccacatgaggaagaaagaatgtgaggagaagtgagcctagagaccagtgaggcaggagggaaccaggctgctcctggagcccaggaggggagtcgagggagtgggatggggagactgccttgcgggccactgccaggccaggt

SEQ ID NO: 19836 - DNA, 2300 bp, Homo sapien
aaaatcaatcagaataaataccgactcggccaacatttacatttacatggatggacaggacgatccccaaacagtgaaggtttacagactggtcaaggaaggacgaacagagagaatggggtctgagggtgcacatcccgtggagggtggcggggctcctggcctcgtctgggtgaggttgggggcctcgctggggctgcggtcccagagcttcggcaaagccaccaggccttggggagcagggctgtggcaagcaggccgcctcggagaaaaacaatgactaactcatcctgacaggcagtggggagactgagacaggatcaacatcagatggctggaccgcctcttccatgcgccaagaaccgcgggcgaggggaaagcaatgcaagccttagaaatgcaatatccagctctgcctctcatcacatacattcagaggtcaactcggacgcggccttcctcatgccacagagaggggatggacttggggagggggccagggtctgtggggcatccacttctgtcctgcagttcctgtctgagcagtctccctcgggaagctgcctcggggtctcaaattttaggcttgactgttgtttctttaaaaaaaaaatagtcttaacgttttccttccatatctgaaaaaggagcagcaacctgcatttagaaaaacagcttaaagtgttgttgttcagattggctaggaagcgctttcaagcagtggaataaactaggcaaacagtatgtctggagccaccgtgacacgacatgtaattaaaaatatatttatatatgtatacatatttatatttcacttcttcttcacactctggtcctaacagccaatggggagctgcccctgtggccaggccatcaaggagcccgttcggaggaaggagaatcaggccccaaggtgcccacaacacagccccctccacacagtgtttcggagcgtcctgcgtgaagcttgctctgagctcaccgttgggtctgggagaccccactcccctgcctcctccctgacctgagctcccactcccaggtctctcctctcttcgggggccttgcctcctcctagcggacaaaccccacatgcttcaggggggcaggggccactgaagcacaggtggaggctgcctggccacgatggcaagctcgccctggggcctgccctgagcagccccgcatcagcccggctcctccctcgaggcctcctacccgcggggcatctgtgttcccaggctgggctggggaggaagggcagtgaggaggagcttgagaaagtctgggaagaaaccgtggagggaggaagaaggcagggttcagggccagggaccagaggtggcgtgcgcttcttgggagagaccactgacctgtttcaggtaaacttgtgccccctacaccttgtcgccaacaggctctttttagagacaggcaaaggctccacacctgggaccagagggcaggttgcagctgcagggaaagctggagagaactggggaagcctctccccactcgccactctcagactcagaatcaatcaatcacgagaaccttccccgcccatcacctcccggccagtccagtgtggaccaagaggggcctccaaagtgacccagggcctgcccggcctcaataaaagagcaaataaggaagcggctaggctctgacatcatttccgggggggctcatcaaagtgtgtgctccagcccccagagatggagctatgtggacacctgttccaccccacaccttcctctccagccaacaacagggcctgctccccaggaccagggcctgccaagaaaccccgtcttgtttcccggctgggaagcttcatctggcgaccccgctggtcacctgactgtcccttccatgacccagtgaattcacccctttcccaagagctcacggagggctgggcttctacgtccgagctggggcagtgacacagcgcattagctaaaatcgagtcctggggagcccccactcccatccttttccccagtaagacctgcgtgtggagcgcaagacaccatctagaattttggttttaatttgccagtctcgttctgtgccctgtttgccacaaggcccctggggccaggaccaggtttaacttggtcccagtggtgacagtatcagccctttgagaaaacagaggcgctggaagccagtggcgaggaacacaggattccagcggggaccccccgccggggcagaagtttccaattaccctaattggctactggcaagctgtctgtggctcgaatccttcttctagaggggagctgggtttg

SEQ ID NO: 19837 - DNA, 2300 bp, Homo sapien
gtcaggagtggcctagagcttctgtctgccagccagcctgggctctggggaacaggcgacacaggcctaaggtgagaccctgacttcagagatctgtctatgcggagcttttctgtgggtgagagatggaggtatggctcctttaaccttgaggccagtctggatggcctggccacctccaggaaagagggtagggactccatagcctgcctggggagtgagagccatgggatagggctggactcttgggaatagcccagctcactgggtggccctttgagctagtcagtgacgcctcagtttacctggctgcctatggaacaggtatactttgcttcttcacaggggtggtagggaggcttaattaacgtttgtaaatccctcttgagatcaaagccactgcagaagggcagagcaccatttcacaaaaatgcttgtggttgcctgtgtggagctggcttacctttgatctgagatgggctgacaccctgaatgtggtctcagctctgctctgagatgcccggcttttcctttgaaacacaccttgcccctgggattctgccagccaaaggtggcggggagtggctgtggataagtcattatgtttaatgtgggggtgtcttccatctgggaggagtgggtggaggagagggttgagaagcctatctctagaaaatgatgaaggccatcaaaatggtttagaaagtgcagggtatacaccatttaacaagtaactccatttcctgcctgcctctattgttttctgtttgattaagtgtatcctgtaaaactgtatattcctgttaggaattagactttaccctgataaaatgagattacacacacagtcttctttccccctacccaccgcagccacctcacccccacgcctgcctccacttctgcccctcgcccgcttaggagagttcttgaaaagttgtccttccagccttgagaatgtgggagagggagtgaccctgagttagagagagaaacttagcattaagagggcagacagcagaaacccagagatggtttggggctatgtgtaggccactaaaggattcccatgggctacttgcccgtctgctctttttttttggctttcctatttgccagcatggccaagtggttccaactggaaacccacagggacattgtcctggtggcctggggtaggaggcctggtgtctgcacgatccaacctgttgtgtttgctgcggacctgggcagcacctttccttagccgggctctccgctaggacttcagggagtttggcgctgccagtggtgcatgacaagcttacagggtcttgtgtatttgtgtttcatgggactaatgagttgtggttcatggacattaggttttgctttaattgcttggagggcggttgtggagactgtttctcagctggaattgtcattatcctcattaacggtgaggtcactgtgcagagtacctgagggtgacagaagttgaagagaagtctagttaagggcagatgcaatctaaaggtaaaaatcagtgaggaaactccgagtgttgggtgccaaatgttttataggaactgagggcagagagccttagcaggtctggggttgcctgggaaggtttccagagatgaggggtttggactagcctgggagaggtagaacatttcccctccggctcggagccttgctgagaatgttctctgtcttgatctggtggtggttacacagatgtatacatgagtaacattcattgcgtctacttgggattttgtatactttgctctacttaagttagtcctcaattaaaaaaggggaaagaagtcccggcagcccaacatcaatcttgagaatgttttcaagaactgggaaacctgtctttaaaaggatgaaggcagagaggacatgggctccaaggagagagccttctgcccttgatgagggatgacagagcaaccagggttgagaaagtccaacccaaacctcctttgaccttgggaaccacctggtatccgtaatgggggactggtaatgcaagagaaattccagccagtctcattgagcctgactcgagtaatgattaactggctgcccggagcccagacgggtgacaaggtgctgtggtctgtcttacgatgggcagtgaagcctgagcagaccattaataatcagcatcaaggccgcgagtcagccttttggaatgtgtggtttgtctttcatgctgtttagagcgtgcttaaagatggatcttggtgtttttatttgtgtatttatttctttctctccccttttcaaatccacagcagact

SEQ ID NO: 19838 - DNA, 2300 bp, Homo sapien
cacttctccaggcagtcctagaaaccggagcccggagctgagagggcgggagggagcgcgcggccgccgctgaggtcatattcacgccgcctccccgccctcggcggctgttcccctcagcgcacacttcccagggcctcggtccagtccggtataaatgtcttttaaaccgagacagcgctctcctccccttgccctcgggcgcggccaagggatccaccgccagggcctttaaaacaaaaccaatgaatgaagcgctagggcgagcgcgcgcgagatggccaccgcgaaacccagccgggtcgaaatcgggccaccgacccgctcgctcagctccaaaactcgcggcgaagcccgctcggtgctccctgcttttccaatttctccatggctccggccggggctcaatccattctgggagcttctctgccccccacctatctctctcccctccatcggtaccccctctacagacccgggagggggtggcggtggcggggggttggggggagaaatagcttttagaaacccgatctgttgtttgcgaaacacaatcgctttttttttttttttaaagcgacagggtgtctagacggccacgtgacgaggccggagccgggcgcgccactgcgcagtggaaccagccgagcagagggccggagggggggtgcgggggggcggggaggaggcggcgcggctgcggcggctgggggcgggggagggaagggggaggaagggggagggaagggggcgggggcgggaggccttgcgggaggcggtgagccccgggcacactcgcttgctgctcggcgcacggaagatcctgtccccgagccgcgccagccgagccagccgggcgccgtgctcggtccgctcgccgcgcgggagagagctgcccgagacagagccagtccgtcggcgccgagccgccgagcgcccggcccctgagcccctgagtgcggcgcggcgagcccctggcggcggcagaaggaccggagcgccaggagagggcggaccggggacaaggaggctcccgggcgcgacgaggagagtctcggaggaggaggcgccgagaggacaccggggcctcctgccgccgcagctgggtcgaggcgagcagcccatgcggggagcctcggcggccagccgcggccaggggaagggacatcggcggcccctgcactagcaagcagcttgtgcccggggggggcgagaacgcgcgacccgtctggggccctccgccgccgccgcgccaccctcccccgcgctgtcagccccgccgggctcagccgccgccgcagcatcttctgcccctgcgcccgcgccagcctcgaggaagtccccgccgaggacctgggcccccaggagcgcagggggaaagaccagagactcccctaaaccacccagatgcgcaggattgaagcggtctagccaaagctttctgtggattaaaaaaatacacgatttttttttttttttttggcagaagaaaaggagaggaagaccagcggggctttgcaaggaaacggggggatgtaactcgtggatacatttttccacccatcaaacatcttgttatactttgtaaacattttctttttttaaaccccagttccagccggacgcccccagacctctgaggttcgaggaggtggtggttttcatttggggctttgcatatttggttgttaggttttgcgagagccttcttattttgccagacgtctcatgcggggtgaagtccactcggccccctcccctgagtcttcgtgtgcgcggaattcgaggagatccggttactaaggatatagaggaaaaaaataaatcgcttgcttttttttttttaattgcctgcttctccccacccccaaattaagttgcttagcaagggggaaagaggctttttccttcttccaacagcccagccgaacgcctttcgttttttgcccccgcggaccttccatgtaggaagccgaggctggcgagcccgacattcgggagccactgcgggggggcctctttttggggaggcgccgacgggggcaggctcggccgtccccagggaagcggcggccgggttcctccggggcgcgccggggccggagagccgcgcagggcgcgggccgcgcggggtggggcagccggagcgcaggcccccgatccccggcgggcgcccccgggcccccgcgcgcgccccggcctccgggagactggcgcatgccacggagcgcccctcgggccgccgccgctcctgcccgggcccctgctgctgctgctgtcgcctgcgcctgctgccccaa

SEQ ID NO: 19839 - DNA, 2300 bp, Homo sapien
ctgcctgatggcagggcccatggtagacaaaacccatgacctcacctctcctggctccagggctcagccctgcccacttctggagaattccatgactcaggtaacagaggaggggcctagccagtctcagagccaaggtcacaccgccctacaccttgctgtccccacagcatctgcaggaggagcatgccaggaccagagacccagggagcagcctcaccagagggaaaagagcctgtagagtggtgagctcaggtttgtagctcccgcaggcagggcatgaggggctgggaggcggggcctgggcctggcgtcagggaggttacctagcagacggtcccacagtccacactcagggctgccaggtacagctgcatgggttgtgcactgcttaactgcagagggcgccccacacacagacttgacatgctggctggaccacaacgtgatggccctgattgttacacacagacacatacacacgcacgtgcacacacatgcagacacacacatacatgcacacgcatgcatacttgggtccacacagcctttttttttttttttttttaaaagaggtgggtcttgctctgtcacctagcctggagtacaatggtatgatcatagcccactgtagcctcgacatcctgggctcaagcaatcctcccgcctcagcctcctggaaatataggtgtgtgccaccacacccagctagattttaaaatgctttttagtggcaagatctcactatgttgcttaggttggtcttgaactcctgggctcaagtgatcctcccgccatggtctcccaaagtactgggattacacacagcctcttggggagttatttcacacctgtgtcctaatgggctcacacggcctctgccctgtttaaggatggcaacagtgaagtaaaggagtgactgttgggcaggggaatgggcttggaatggaagagctgacctgaaaccactttgctgggcctgccacatgttctcaaatatcaaaatcatcatcacagccctaactaggacccactgggccagggctggggccaccctctccactggccatggcctcagctgagtggagccacttcccattctctgaacctgccttgatttggggctgaccaagcccttgctcatggtgtccccaagctggatctcccccatatggactttgaggcacagatgaaatgtgacgttgcacgtggaggctgccctggcccctggaaggcctgcaccacccacccccgaggctgcaggctctcccttccctgggctcccgcctcccctcccacaggcgtgcccatgccttgcctcttaggagctcccctcgggataacacttccagcaacacacacctgtgaggcatggaccatggatgcatcaggctctgctctgagggcgccaccttgcagcacgggcttaatcttcgtaacagctttgcgtgaacatcaattattacctccattttatagataaggaaatggaggccctgagaggtcccacagccagtacgtgctggagtgtgattggaacccaggtggtctgtctccggggtccatgttcttcagcccctctatgatgctgccttccctcttttcaggctctggagtgaatggtgatggagccttggcttggtgtgctggacacttgcttggtgccctgagccaccacgtccaagtccagctactgtgaggtcccatgctgggaggaatcccaggccctaggccaggttccagctgacagccccggctgaagtcccagaccacagccagcgtcgccccccaagacctgagggaagacattcacgtccaggtcattttggctccagctttggagacctgccagtgagccctagacatcatggacggggcaagctgccccttctgcgccctgtccgatctcctaaccacagaatctgggtgcataagaaaacggttgtttgaagcagctgagttctggcgttacttgtcatgcagtaactgataaacaaaacagctgccacctgcttcctgcccaccctgtacaaagactcctgtcaccacggagcctggcacctctgggtggctgaattcattgtgctcatttctgcgtgacctttcttcacctctcagccccattccagccttctcggtgataccctggcccttggcttctatgaccccttctcccttctgttccttcctcctcctccatgcctgggcctcagttccccccaaggagctcccttctgtccagcacccctaaatgtgggtgtaccccaggatctccaccttagcttatgcttatctcccat

SEQ ID NO: 19840 - DNA, 2300 bp, Homo sapien
gcctttctgagcctgtctcttcatcagtcaaatggaaggttctacaaaatagtctctcccttctgatgaattcttagcttctgtgacttgctgtgcagcccaatagagctttatagtttccttaagtccaatttcttgattatagaggttgcttcaacctagcagtttaaagtcaaagatttgagccagttgataaggatgtttccttgagcaagtaacaacctccaggtgaggatcggtgaaatgcaagtgatactagtgcttttcctggagggttggtgtgaggattaaatgagttaatgcatgtaaagcacctactctatgttgttcagcatatgttagctgttgtttcttttacagatgagaaaactgaggttggagaagtacagtgatttgtctgagattcagtattcagttaattatagacctggatctagaaactaaatcttctgattcctgatacagttgctgaaatgcccatcgtttaaagttaaaaaaaaattctttaaagttttgtctggtcaaatagctccccttctagccacactgctttgttgatatgttttcttaatttttcattcaaatgatttgtaatctgaagagtgttttagatttaataaacttttatagtttattatattctatatactggagacatagataatcaatttttgagtttttaaaaatctcctttctagagaaagatttagtgtgtaagttgaatgtgtctattaactattttttcctttatgattttggattctgagataagatggctacttgtactgtttctatcattttcattttgcaaatcagtttttgatgttcagaattaagaccaagagcagcagtttctctcattgcttagttctctaattaggtatgaaattaacagtaaagttggtcactgagcaattttaatatgacatttggttttataaatgttatgataagctcactttgattttagttcttaaatttaactttttaaaaccttttcttctcttgcagttgaaaacaatcctcgaacaggaaatcttggtgcactaattaaggtcttcctttctagaaccaaagaactaaaactttcagcagaatgtcagaagtaagctggctaattaaaccatgtttgctttatatttaacaatgtgaattttagttttcatttattgatggaaatggactgtggtcttttgaaaatctctgtgaaggaattattctcattattaagaaaaaaaggtagagaggttttaggttagtgtctaagtcactggggtgagattatagattcgggaatctgatttcagctttttagacaatctttagattatattctttaagaaggtgaataatgatgtaattatcgttaagaaggtaattcccctcccccccattatcactgctgctgctatctagtttaaatgatgacttagtctgagttttatttcattctacatctgttgcagttatttccgttatattctttacatcaatggaaggttaactttttatgcactgaagcatttttcaaaaccatgtttggatgtcagtctctgaaaagattaaaatattttgcattgtcttgcttataaacaaattacattgaatccaataaagtttttcttgggagttcatggtcattaatacaaataaaaagtattttaccgtgctgctggcaatgcctcgtcgaaaattttggttacatatttgcatatattctttttatgttaccacaattttttaaattttttggtagctttcttctcttttaatcgcatgtacgtggtatacctattaagaacaaagaacagtcattcctacagtcatcagtaaagatttttattaagtagattcactatgtaaagtacatggaatgaactatgaagtaaaacataatatcactggtacaatgaaataaatcatgagccattaaaagatatggacattatcctaatattaccaataggatggacaaaacggttgtcaaatcaggaagaaatcatgaactagaaataaactatggtgcttatgtttaaatattgattcttgtatgattttggtctttctagccacatcttcatttggcagacacacaatgctttgtttattatttgctgtttgctgaaagtgttcatctgtcagatgtcagaggaggaattacaacttcattttacttatgaagaaaaatctcctggcaattacagtaagtattgtttttaaagatgttctggatatatcatgtgtaacatttaaggataaaatttcaggaataaaagtatgattttgaaaattccagttat

SEQ ID NO: 19841 - DNA, 2300 bp, Homo sapien
attatctactatctgatcacatatctattcttgattgtgaaggctggataaaaactccgctgattgacaacaaatgttgcaccttgctactcacagtgggattctccagccagcagcagcagtagtggatgtcactggggaacggtagagatgcagaatctcagtgcacatttcacacatgtgcagtccatttgcatttaaataagaatgacttgtgatttaaatgcacattaaactttgagaagtactgtcagcttcagttaggagtatggtggacctgggattctgaacttccaccaagctctcagataatgctgttgtggccggtccatgagccacgcttggaatagcaaagtgcttgacattttatcacagttagaaagttaggcagttacttgaatagactcttaagtcatgacaaaaatatatatgcagcagggagtgagcttggcagttagtaagcacaatgcaggtatgctgtaatgctgtacttattcccatgtataatattttaaaatatatatgtatgggcctgaattttaaaaaaatattctggaaaacttcatttttttcaaatcttgacacatttcagtaagttcaaatataccagcttgggcaacatagggcaaaaccatctctacaaaaaatacaattagctgggcatggtggtgcatgcctgtagcactaactacttgggaggctgaggcagaaggatcacttgaacccaggagctcaaggttgcagagagctatgattgcaccactgctgtccagcctgggtggtagaccgagaccctgtttctatgttaaaaaaaaaagaagttcaaatatatgcgaaattcccagatctgcataagaatgaactttcctggcagcctaagtcagtgtgtttgagtgtttgcatttccagttttcaaactagttaaaaatacttcagaagagaaacaattatccaggactctggaatctcacattttgaaaaccattggtcaaggaaaaagactgtgtttgctactaacatattgttgactttaagctcagcgcttagcctttctgagcctgtctcttcatcagtcaaatggaaggttctacaaaatagtctctcccttctgatgaattcttagcttctgtgacttgctgtgcagcccaatagagctttatagtttccttaagtccaatttcttgattatagaggttgcttcaacctagcagtttaaagtcaaagatttgagccagttgataaggatgtttccttgagcaagtaacaacctccaggtgaggatcggtgaaatgcaagtgatactagtgcttttcctggagggttggtgtgaggattaaatgagttaatgcatgtaaagcacctactctatgttgttcagcatatgttagctgttgtttcttttacagatgagaaaactgaggttggagaagtacagtgatttgtctgagattcagtattcagttaattatagacctggatctagaaactaaatcttctgattcctgatacagttgctgaaatgcccatcgtttaaagttaaaaaaaaattctttaaagttttgtctggtcaaatagctccccttctagccacactgctttgttgatatgttttcttaatttttcattcaaatgatttgtaatctgaagagtgttttagatttaataaacttttatagtttattatattctatatactggagacatagataatcaatttttgagtttttaaaaatctcctttctagagaaagatttagtgtgtaagttgaatgtgtctattaactattttttcctttatgattttggattctgagataagatggctacttgtactgtttctatcattttcattttgcaaatcagtttttgatgttcagaattaagaccaagagcagcagtttctctcattgcttagttctctaattaggtatgaaattaacagtaaagttggtcactgagcaattttaatatgacatttggttttataaatgttatgataagctcactttgattttagttcttaaatttaactttttaaaaccttttcttctcttgcagttgaaaacaatcctcgaacaggaaatcttggtgcactaattaaggtcttcctttctagaaccaaagaactaaaactttcagcagaatgtcagaagtaagctggctaattaaaccatgtttgctttatatttaacaatgtgaattttagttttcatttattgatggaaatggactgtggtcttttgaaaatctctgtgaaggaattattctcattattaagaaaaaaaggtagagaggttttag

SEQ ID NO: 19842 - DNA, 2300 bp, Homo sapien
cacccaggctggagtacaggggtatgatctcggctcgtggcaacctccaccgtctgggttcaagtgattctcctgcatcagcctcctgagtagttggggctacaggcgcatgcctggctaattttgtatttttcgtagagacggggtttcgccatgatgggcaggctggtctcaaactgctgacctcaggtgatctgcctgcttcggcctcccaaagtgttgggatcacaggcatgagtcaccacgcccagccctgagtctctttttgctgtaattttaaaataaaattgtacatgtacttcatattccttgcagaaaaattagaaaacatagggaaaaactaattttaaccacacaggatctcattacccaaagttgcaatattgttaatattatttgtcttttttccaacagcacatatacataggtattataaatattatagtaaacatatattacatatgttatattaatatatcatttaatatattaatataaatattatattaagtggcaaaaccacaattagttttgcaccaacctaatataattcacttatgaaaatttgatactatatatgtttccactcagtgtatcatgaaaatgttttcaaataaatatgcatccatagcattctttacaatgactgcatagtagtgtctatggctttttagttaggtagtttggggtttttttttttttttgagacagtgtctcgttctgttgcccagggtagagtgcaatggtgagattatggctccctgaagcctcaacctcccgggctcaagcgattttcccacatcagcctcccgagtagccgggaccgagggtgtgccaaccactcccagctaatttttgtattttttgttgagacagtgtatcgctatgttgctcaggctggtccttccgaactcctgggctcaagtgatcctcccaccttagcctcccaaagtattgggattacaggcataagccacagggcccagtctactttgggttttaatatgttttcctgtcataattctgcaagctcagtgaatttactggcagtctatgctagaaaagaatacctaatatttgtatagtactttacagagtacactggcacatattgactatataatgggaataacggtgctatctgttccatagggtcattttgcgaaataatagtgcatggcaaatagaaaataatccataatgtgaattgttattactacagtcatgtcaacatttcctgtaatggcagaatcatcatcatgcatatattttaggtgaggaaactggctgagagaggtgaagtaattgctcaaagacgtcagtgtggaaacctcagctcatttgacttcaaattccatagttttggcactatctcatattgctactctttcccgtgggacctgtcctttccgacaactttgcaggcagggctagccctgccagctgcctccatcaaaaattattttgctatttctcaattctccagaatcccacacaatattgcttgactttgggatggttattcagctgcaattaacagaggccttaataaggttaagccgccagaacgagcggtgtagcatgagcgaggactctagcacctggcaggtgaggttgactctagcacccggcaggtgaggtttttgcgcttctctctctctctctttttttttttttgagaagagtcgagctctgtcgcaaggctggagtgcagtggcccgatctcgactcactgcaatctccgcctctcgggttcaaacgattctcctgcctcagacagctactttttgactcactgcaatctccgcctctcgggttcaaacgattatcctgtctcaaacagctactttttgtatttttagtggagacggggtttcaccatgctggccaggatggtctcgatctcctgacctcgtgatccgtccacctcggcctcctaaagtgctgggattacaggcgtgagccaccgcgcacggctgtttttgcgcttctcgatttcgccacgtggctttgcggtagcccaggaggtactaggagggcggaggcacgaataacacccaaaggactacagtttccagaagcccgcgcgcgccgcgtgccacgtgaccacctggctggcgcgcgcgcctgggggtctggtccctagccgcgttctcggtcgcttccctcttctctcgccgcctcctggcctccgcaccgacgcggcccgggctggagccgagccggggccgagctgcaggccggaccggagccggatctgtacccgctgagacgtggaaacatggaggcctgagccggtg

SEQ ID NO: 19843 - DNA, 2300 bp, Homo sapien
ctcggttttgtttgtgatagtagaaagatttgtggttgctgtgatgactatcttaggacacctttggaataactatgaaagaaaactattctgagcaaccctttcacctgtcttattttggcttttgtaagtttgtttcttgactaataataaatggtaagttttctgtaatcccagcactttgggaggctgaggtgggtggatcacaaggtcaggagatcgagaccatcctggctaacacagtgaaaccccgtctctactaaaaatgcaaaaaaaaattagctgggcgtggtggcgggtatctgtagtcccagctactcaggaggctgaggcaggagaatggcatgaacccgggaggaggaactaggagtgagccgagatcgcgccactgcactccagcctgggtgacagagcgagacgctgtctcaaaaaaaaaaaaactggtagttttatattcagtacctcaggcccgtatgattatctgctgatggccccacttagatgtacatagccacttcaaaatgggccctctccccaaatctaagaagcttgttttcagtaattgatcacatttagttcttttaagtcaagaacctgagtgattctgtacacttctttttacatctaatgaacttaagttctgttgatttctaccatttaagtatttttcccccttagtccttaacgactaggtttcctgcctccagaataagctgaagtcctccaagatgtactgtggttttctctaagaaacttaacacatttttctttccccagatatcccagaagaaactgaagaaacaaaaacttatggcacgggagtaaattcagcattaaaataaatgtaattaaaaggaaaagaatgttggttgtctttattagtgaacatatttcaagtgtccttacaagatggatcaaatgaggattttttaggattagaactagaaacacaagattgtttaccctgcaccattaaaaaccattttcatggctgggcacagtggctcatttctgtagtcccagcactttgggaggtggaggctgactgcttaagcccagccagggcaacatgtcagaaccctgtctgttaaaaaaaagtaagtgtggtgtcacttgcatgtagtcccagctaattggggggctgaggtgggaggctgcagtgagcactactgcaccccagcgtgggcaagacagaacaagaccctgtctcaaaaaaagtttcattatcccaaaaggaatttgcagtggttttctttgcagaacaatccagtatgtgaatataccagttgatcatccccagttggaaatggctccattgagcattgcctttgagtatgataacagcactcaggctcaggttttgaagctttttaggttgatgctcaacctgtatcatttcgtcaattgataaaggggttttgtttttgctattaggaacgatggtactgtgaacgtttgtgtgcagatttttgtgttttcatttattgagtatatactagagtggaattgctagatcataaggttacctgagtaaacatctgaggaacttccaaatatttccaaaaaggctgcacgctacatttccaccaacggtttatgagggtcccagttttcacacaacttcgccaacacgtactgacatcctagcgagcgtcagtacttttcgtttataaagtgatgtaactgcttcttttaagcaactgacgtttgtaaagttggccttaatgttagtttgctctgcccttgaatttaagaaaccagcaaaactaatagcttatccacagttgcctcaacggcctagctgccaccttccgtgtgggtgccgcgccgtttgcacaggcatcatcctttaccgagatcctgcgttctgggtctgggtgtagtcaggtcaggctttcttcccgcagcgaagcttttagttgggcatctgggacgcgcaggactttcgcgctacctgcaggccgcagagccggaagcctcgccgcgccccttgggcaacactgctgcgtgctgtgcgaccccgggttgacgcaagcgcgcctttgtcgtccccgttgaaggcgcccattggctcggctgcggatcgtccctccctccggaagtgcggacattgtcagctgcgtttccgcggtcgcgggtgagtgtgcccgggctagcggcctgggttgggctttgtagctgctccgcaggcccagcccgggccgcgctcgcagagtcctaggcggtgcgcggcctcctgcctcctccctcctcggcggtcgcggcccgccggcctccgcggtgcctgccttcgctctcag

SEQ ID NO: 19844 - DNA, 2300 bp, Homo sapien
ggcgtggtggctcacgtctgtaatcccagcactttgggaggctgaggtgggcggatcacatgaggtcaggagttcaagaccagcctggccaacatgacaaaatcctatctctattaaaaatacaaaaattagctgggcatcatggtgggtgcctgtaatcccagctgcttgggaggctgaggcaggagaatcgcttgaacctggaggcggaggttgcagtgagctgagatcacaccactgcactccagcctggggccacagagtgagaccttgtctcaaaaaaaaaaaaaaaaaaaagaaagaaagaaagaaagaaagaaagaaaaagaagagaaaagaaaaatgactgtcaggaatatggaggatatattaaagtgcagaaataattagggcaagaagaccacttaaaagaataatccagattttgttaaataattgtatgtgcaaagacaagaagaggggagtctctcatctttctggtttaagatcctaggtgtatggggaagtcgccaaacaaggaagggagaaaggcagggtcgcctagggatgcagagcttggttacagaaggctgccttggatcccagggctgccactcccagctgccggaccttggatttgccggggagttccttttttttcttcttcacattgtagcagccagatcaacttcatcatttacaaatagttgtcctaaggattacttgaggaaatgcatgtaaaaacactgaaaatactgcctagaatctagtaagcttatagaatcattgtctgttactcttttttttttttttttttttttttttgagacggagtctcgctctgtcgcccaggctggagtgcagtggcgggatctcggctcactgcaagctccgcctcccgggttcacgccattctcctgcctcagcctcccgagtagctgggactacaggcgcccgccactacgcccggctaattttttgtatttttagtagagacggggtttcaccgttttagccgggatggtctcgatctcctgacctcgtgatccgcccgcctcggcctcccaaagtgctgggattacaggcgtgagccaccgcgcccggcccattgtctgttactcttgtcaccatgcaacataaaagaggaacccggaggagaagacaaagagttctgtttaagggcatgttaggtttcaaataacctcaggtcttcagggacctcccagaaaggatgtccagggagtagtttgctatcagggtctagctcaggagacagatgtggcgctggggtattaatctgggagttagcatgcagttgaaagctcatgtgaggggagggaattaccgaggaaacaccatggaatccagcatcagcaatggaagtggagtcgaggggagagacttagggctgaggtctcctacactgaggtcaaggaagcaagtgagcctagcctggagtctactctcctagagtttgagctgcctagaagggtggtgccatgaaatagaagccctaacaaaagctaagtgcatcactgactatgagggaataaccagagagatgacctggggaaggaaaaaagggaagaaaatgccaaaaggttttctcctccagatgaagatctagaagcagcggggaaaacgaggatattgaaccagacccttcagttagcgcatttttcacacaggttataatacaattgattggatgacattcccatcctgagaatttcctgattaccataattacgtctcatcctttcatctttttaattggccatttacaaaccactttcaggagtacagggccacataatcaaacctaactaatgttgacgaataaataaaatgtttctttcatatctaataatacgtagcctgtcctagaactacaaccctgtttttaattgactgacatttaaaaccctgaatttttatttctgtatacaaaaaagagaactttgagacagtccctaagtaggcaattcgttttcacacgttcttaaaacatattctacactcccttcgctttccgccttcctgcctcctcagatctcgtttcttcggctacgaatctcgcgagaagtcaagttctcatgagttctcccaaaatccaccgctcttcctctttccctaagcagcctgaggtgagtgtttctcctgcgttgctccgagggcccaatcctcctgccatcgccgccatcctggcttcgggggcgccggcctccaggcccccgggaggagaactcctagggctactaaatcctcgctggaggcggtggcttcttatgcgggaggacgtggcggagggcctgactttg

SEQ ID NO: 19845 - DNA, 2300 bp, Homo sapien
tgtactgccgaggaatagcttatattttgttttttttttgttgttgttgtttttgtttgtttgtttgttttgagacggagtctcactctgtcgcccaggctggagtgcagtggtgcgatctcggctcattgcaacttccacctcccggattcaagccattcttctgcctcagcctcccgagtagctgaaactacaggcgtgtgccaccacgcccagctaattttttgtatttttagtagagatggggttgcaccgtgttagctaggttggtctcgatctcctgacctcgtgatccacccgccttggcctcccaaagtgctgggattacaggcatgagccaccgcgcctggttagcttatgttattttactgtaaattcttggtaaacaatttagaaactgcctcttctttttttcctttaaaaattcacttgtaattgctgtgaaccagagcatacatttagggcaatttgaatttatgcttccaggttgcaatcttcaaacttggcccagataaactacttatattacttttgactctgtttttgccttgtgtgtacataatgtcatctgattgtctcacttttactgatattaacactgggcagttggccgggcacagtggctcgtgcctataatcccagctctttgggaggccaaggtgggaggattgcttgagccttggagtttgaagctgcagtgagccatgatcatgccacttcactgtaccctgggtaacagagacaccgtttccagaaccaaaaaaaaaaaaaaatgggcaaatgagttcaggagttgttgctgtgaccccttccttatgaagtttctcatcagcttttcatctaatggctttaggagctattaagttcagagcttacattcattatgtcatcaggtgttgaaaaataatgactttgtaattctgttattccatagcatttttaatattggacttgtgtaaaaaagaactttccctctttcaataatttggttatctttcaatatttttataccacagagcagagaataagcaaaaaagttgcaataagtaatgcccgtaggtcttggatccatgtgggacatcatccaggggaacctgcccttggtgtgtccagcctgcacctagtgcagctgaagggcactgggagggcctttgttccttgggtatgttaaataaactgggttgtgcacctgcattttcactgtgacctgtcatgtgaagtcaggtgtggaattttccacttgtggtgttatgttggttctcaaaaagttttcgattttggaacatttcggatttcagattttcgggttagggatactcagcctataccacgtgttgtggccggatgcttcacatttactattaatcatggaccaggcttggtggctcacgcctgtaatcccagtactttggaaggccgaggtgggcggatcacctgaggtcaggagttccagaccagcctgaccaacatggtgaaaccgtctctaccaaaaaatttaaaatttgacaggagtggtggcacatgcctgtaattccagcttctttggaggctgaggcatgacaatcacttgaacccaggaggtggaggttgcagtgagctgagatcgtgccactgcactccagcctgagtaagagtgagaccttgtctcaaaagaaaacaaaaaaaaaaccagtaaaacaaaaaacaataaacaaaaacaaaacaaaacaaaacaaaaaacaaggttaacggaacctcatgattggatgagatggctgtgggaagctgggctgcccaggaagcggactcagagagcaaaccgtgcgcctgccttccacactggaagggagcgtcaggaagccgaactgcagagggtactgacgcagccccaacacttctccccgacctcaggggggattcagtagctggagattcccgcagctgccccacgttgggggtaaggctgggcatttgttcctcccctattgttcagtcattggctgtgggcggccccaggaagaaggtgtgaccttgggtggggcagtcttcttcagccaatcctcagaaaggactaacagcactctcagcagagggagactgagtccttcattcctgggaggtgtctgggaagcacatcgcagtgtgcaccgcagcaggtattaatgtgtcattttacagataagaaaactgaggttcagaagggacagagccaggatgtcagcctagatctattaatacctttgaatcctgtgctctttcccaccgtccttgctgccatttccgcacattttcatgccttccccacttcttaccgggaccgc

SEQ ID NO: 19846 - DNA, 2300 bp, Homo sapien
aatttctgtttaaagccactaagtctatggtatactgttctggcagcccaaactgaccaagacatgcggtttgtattatatatttctgttggacagcattggtccagatatctgggaactcctacataccagccagccttctggcacttgtaactttctgtattgtgtctgtgagagcacaggcatggtctccaggccagtgtttcctccctagcagctgctcaataagcttctggcaattaagtcattttcttggttgtaagaatataaacagtctctggataatgtatgtaaaagaggacctcattaagagaatattgggtaacaactggaatctgcagggcagaagaaccaggcttggaggatatactcaggcagacagcaatgtcccaaatcccactgcagactagtctgggggtgactccactgctgccccagagaaccagagctggctgtccattggcagagtggcgtgggtatgtgcttccagcctcattagtttccagttcagagttcagttgactgagtttgaatcggggactctagctgcaagagaggctggggctgggaaggtgagcaattgcttttgagcttttttttagtggagagttgggtcttatcataagcagaagatttattcctttaacattggaagggtctttagatgctgggctgccacataaggatggaaccctttccttgtgttgtctgagaccttgaaattttgactgcaacacagcagaagttccatcaagactcctcagctggaactcctccaggcgagaggctcttcagatctccttgttcttgggaaggatgaagcagaacagttgacatcatacattctaatgctacaattataatttcatgatgtcctttgaaaattctcgcatgttattttaatgtggagacacaggagggcactctaaccaactagcaataaaacctaaatggtttcatagccttggcagttaaaaaatagatgttgatttgttgaacctgtaaaacacaggtttttcatttacttatttatttatttgcaaaggagtttcactcttgttgcccaggctggagtgcaatggtgcgatcttggctcaccacaacctccgcctcccaggctcacgcgattctcctgcctcagcctcccgagtagctgggatcatagggatgcgccaccacgcccagctaattttttgtgtatttttagtagagatggagtttctccatgttggtcaggctggtctcgaacttctgacctcaggtgatccgcccgcctcggcctcccaaagtgttgggattacaggtgtgagccactgcgcccggccgggtttttctttttttctaggcaggataactaactttgcaggactaccttccaacaataccctgcaaaataccctagcttccgtgggggtatctcacctataacaaaggctctcaagacacactctccacattatccagttaatgttctagggaccatggctatgagcaactcagaacagggaaggagtttttttcttctgatgtccaggctggagtgtagtggtgtgatcatggtacattgcagccctgaactcctgggctcaaggactccttccgcctcagcctcccaagtattaatagcttgcactacaggtgtaccaccttgcctggctaatttaaaaattttttttggtagagatgagtgtctatgttgccagggttagggaagaggacttttgactacagcttaccccctgcctcagccactagaccaggttgccaagagctcacatttaaaggtcaattggccaaattgaacctagagcagagaagagagacctggttgtcttgagactttcttcaaatctgcagcctgtccccatgactcagttttcccatctgtaaaatggagataacattagacctatgtctgtatagtttcctcatgaagagagagacagagtgggaacaacatatccgggggtgatatttaccatcgcacacagaccattgagttctatactaaaaaactaaagcccgcctgagtcttgttaatgaatgatagcacacgggagggacaaagcgtgctctgctggcagctggagtaacaaaagtaatgaggcgaggtcggaacaggatctgctggctccggctcggtttcctcgcacaggtctctccagctggatcctcgacgctagggaggaaggggcgcgggactgctgtgggggttttccctccccaggcaggggcaggacctgttccgggcgactgcagggttaagggtatcgtcttaaagagccggatcctcccggctg

SEQ ID NO: 19847 - DNA, 2300 bp, Homo sapien
ctttgcaggactaccttccaacaataccctgcaaaataccctagcttccgtgggggtatctcacctataacaaaggctctcaagacacactctccacattatccagttaatgttctagggaccatggctatgagcaactcagaacagggaaggagtttttttcttctgatgtccaggctggagtgtagtggtgtgatcatggtacattgcagccctgaactcctgggctcaaggactccttccgcctcagcctcccaagtattaatagcttgcactacaggtgtaccaccttgcctggctaatttaaaaattttttttggtagagatgagtgtctatgttgccagggttagggaagaggacttttgactacagcttaccccctgcctcagccactagaccaggttgccaagagctcacatttaaaggtcaattggccaaattgaacctagagcagagaagagagacctggttgtcttgagactttcttcaaatctgcagcctgtccccatgactcagttttcccatctgtaaaatggagataacattagacctatgtctgtatagtttcctcatgaagagagagacagagtgggaacaacatatccgggggtgatatttaccatcgcacacagaccattgagttctatactaaaaaactaaagcccgcctgagtcttgttaatgaatgatagcacacgggagggacaaagcgtgctctgctggcagctggagtaacaaaagtaatgaggcgaggtcggaacaggatctgctggctccggctcggtttcctcgcacaggtctctccagctggatcctcgacgctagggaggaaggggcgcgggactgctgtgggggttttccctccccaggcaggggcaggacctgttccgggcgactgcagggttaagggtatcgtcttaaagagccggatcctcccggctggagcgaggctggatggcgggacgcagcctctcagcctctcgtacccgccctgcgtccgcagtggttgttggcgcagccgccccgtcggtgttccgggctcagtccccgctccccagcgccagacgcagactccgggccaagttctccctccgctcgctgctttctgccgcaggacccggatcaataaagggaaggagagccgggaggaaatgatggagaacagagagaaaggagatgcttgatttcactcgccaaggagtgagtgctcatcggcagacactgggctctggccacgcgtcttagactccaaatctcggctcactggtccctttgaggaggtcgcctggtgttcccgtagccctccaccccaccgtaggagagcgcctgccacgagctccgcgcctcgctaagtgctttgctacgtgaactcttagttttcccaacatccctaagccgccgatacattatcacccacgtattgcggacgagagaaccgcctcggagaagctggctggctcgcttggagttttgcagctagtggcggagcgagcattccgagcaggtactgtgcgatcctccagcgccggccgcagctcacagccccttagctccgccgggttattgtgcggccgcgccttctgcacctgttgcggccctcgctaggcgggaagggagggagaagaggaggacaaaggggatgaccaggtggctctcccccgacggactcccggcccagggagcggatagaccactcccagagagagtgtggctttgagccttggagaggatgctctccttctccagggatcgcctccccagcggacgcagagtttcagggaaatgtccgcctccgccacttgggatggcagtggggagaggaggatctgggtgtccggaggagggcagtgggagaaagctggagctgctggagtcgcagctgcctgcggagcgggcccgggaggaagcggggccgagcgtgcggcgtccacgcggtgagtgtgcagcgctttcattcaaactttctccagtctcggttccggcgtcagcaaggtgtgaccaatcagagcccagagacgggaataaattatgcaaatcaccatctggcgatgggtcagatgactcccatacttttaaaaactacctctataggagcgtgacagcagcgagtccttgcctcccggcggctcaggacgagggcagatctcgttctggggcaagccgttgacactcgctccctgccaccgcccgggctccgtgccgccaagttttcattttccaccttctctgcctccagtcccccagcccctggccgagagaagggtcttaccggccgggattgctggaaacaccaagaggtg

SEQ ID NO: 19848 - DNA, 2300 bp, Homo sapien
atgcagacaaggaagtgtgtacagtggtctgaacattgtccaccttttatgtgtctgtcaccactgttggctacttcatcccctcaccaggctggataactgatgctttactactgactacccatctcattttcatgatttcatgctttagacatacaaagagaatctggaatcagatcctgtagtaaatcagtagctgtagtaaatcagtagccacatgaaactggcattttaaattgaagtgcattaactggatagtcctaatcaataagcacgtggtttgttgtccaaagagtattttaactacgtgacaaaataaatattatatttaggtttcattatgcctttcttgtaaagactgattttccattttataaggtaaaatgcttgtgaaacttgatgcagaatatttgactacttgaattcagcagaacatactacatatttttctttgtagacatttttggcagtttcattctttaagaacaagtcgagaagtagataatcttctctacccaaattttttaccttttgagaaaaaatatggatttaaattatgagcaatattaaactctcattacatcatcagaaatctgggagctaaagtttatttcagaagtcttattagatggagttgcatttcttaaattaggagttatgttttatttaaatttcctgcctacccttggagttgtaaacatcaccttacttcataaaaccttccctgaagtgcctcgtagtttcccatctctctgtgcccatgtggagatactgctatttcttgtcttttatccaaatgggcctgaaaattcagagtgtagccacagtaacttctgtgctgtgaatgcatatggcttggatcccaagtagagcactcagtctgccttgctctttgatatcaattataatctattaacataactaaaatcccatatatggactcctttggctgttttcaatcttaaagccgtttatggtagaacttttcatgtaattctcttatctgcagtttgaatgtataaacaacttttcaccttggttccattttatttttattattattttttttcttttttagagatggggtcttgctgtgttgcccaggaggctaaagtgatcctcccacttcagcctcccaaagtactgagattacaggcatgagccaccatgcctgggccctttttctgcctctttatggtcacttcatttaataggtacggtcaaggtagtaagatttgtggctactaataactgccgcattatttcttccttacttggaaagaaggagaagcttgatacgtaaatataagatgacatttatttctatatttttatagaagatttttattattatataggtcctgtccctgctatcagtggggcactgaagaaagcaggactgagtcttaaggacatggatttggtagaggtaagtgtttttttttttttttttttttttaacaacatgaataaaccatgtacttttatagcataaatgactttaatttggtctcattgctctttgaatttcattgtagttagcctttccaaatgatgtacatctaaataaatagtaccttcattagatgccttgtgttgatacttttccccacctggttaacatgctttatttatatttgaatattcaaactgcctgatttctcttactcaagtataaattcctgggaatttcttactactttataaaactgttacattttagactattaacatgcctgttgaatattaaagtgaaaaaatatatgtaaaataattgacataatagaaaagcaatatttagtgccaaatctacaagtttcttgcccttctcgccagatagagccccctcccttaaatgtatctttggcttttatacgatagttgtagcttgatttgggatgcacctatcataatttttgacactggaacttaaatttattgagtgatttctttttaaatgttagtattagaactaaagtgtcttaagcataattaaaagaagaggtggagaaacatttaaagatggttatatacattccacacttttggaatatttatttgaaaattttaggtgattaagcatgtgatgcctggcattgggaaataactaatagaacaaaggaaatctatttaacttgatagcgaaggggtaggcacaggtgtgatttcctctatgataatctctcacacaggaaaccatgatttcagacaaatggtttatctttaaatctcttccacttttagcagatcacagttcagagcctcaaagaggctgtttaatttattatatttgtgtcagc

SEQ ID NO: 19849 - DNA, 2300 bp, Homo sapien
tttatagtatttgtgaaattttcaaacaggtctgtattataagaaagggtaagaaccactgataaaatattaaaatgatatcagtaaaaatattatttccttttttagaagatagctcatgacaatgcaccttttaaatgaagtgtaaatgcctcgtctaaaaaaaattcaccacgctgctttatgaagtaaatgtagtaaattcagtcaggaagggcactggcaaatgaaatccacgttgcaggaaactgtaaacactgcatttggtcccagaatacggatttttcccttgatttgttcccatgccactttggttcttctcactttcagatccccctaaccaatgcttagctggcatctccacttggctgcttcacaggcaccaaaaagttttctgcctaaaactgaattctcaatccttctttccacatctattcctttcccaattttcctcactctgtaaagtggcatcatcatgaacacggttcatcaaaccagacacttttcatcattctcgacatttccttcttatatttactccaccacatccaatccactttctatcaaatccacctccaaatctatctcaactcatccctccccttttctccccaattacactgccccacacgagtcaaagccatcatttgctgctccctggacctctacaatagatccttaaatggtctcttcgccattacacagaccgccccaaattcggacagagtggaaatcagatcctgtcattaccccgctttaaatccctgtattgccttccactgaatttggaacaaaaccccaccttcttacagagcccacagggccctggagcaccaaaatgcttggttcttagatcctgccaagctttttcctgtctcagggcctcgatatgtattccacctcaatgttcttcgactcgtacatccttaaagtaagattccattgactgtgcccacttgttttgaaaagggagtttattacacagttgttttaaacaagttcataaccctagaacttaggtatagagtgaccgctctaatctaaagcaacagaagggaaatgggagcagggcaggtcttccagcagaacaccagctaccatttctgcaggcctctccatcgattcacccggggagccctgaccaccgaggccgagcggcgggctcctgtgcgcagctgccccgcagcaggcgcccgcggcctatggcgccgccccattttttctaatacttggactcgaactagtggggtcactgttaggcgaagaaaggaatgacctccaaggtcacatgcaagcaaactttggtctcaactaaacaggaaattgcaccgaaatcgctgtcgctagcgccttacaagtaagggttttctccttaacccaaacaagcctttcgggctgggtttttatcacgtccgctccaaaaccgaggaggttgagtgaacttcaccccacgaccccgactctccgcggcggccggaagcggaggcctggcctggggagggcaggaccccgaggggcgaggagaggaggagggggctgcgctcacctcggagcagagccatggcggctgctgggtcgtcggcggcgcgggtctgtggtgtgggggacgctgagcggccgctcgcaatcacccagatttcaagagcgtgggtggcgccccgagagccacgcccctgccctttcacctacttcctggggctccttggcggggtcccagcgtaagatggtcctaccccacgcgtagcgctgcccgcctcaccccagcccgagggagcccaggggacggggctcggatagaccacaacgcgccttgagagcggactctttcctcacatcctcatttttagattttctccgtttccaaaccgagagaatttggtttgacacctctcacccatcatatcctagccccgacaggcgatgactcttcccctttgtctccgccaacaccctaaacactgggcaggagccaagggctgaggaacttggcgcgcgggcggccgcggccgccagctgggggcgggaccgaacgtcctgtgggcggggcgcggcggcggcggcgggattggctggggcgggcgggtgcgcagtccgctgggcagaggcttgggccgccgagctggacccggaccggttttgggtactgtactgggggcagggcagagaggtgggcggcagttggggtgcggtgattgtagtaggctagggcgctttcgggtccccattgcagcccccggatgagcccgcagtattttccttatatgatcaggtcccattgcgggcggcgccgcttgcccgga

SEQ ID NO: 19850 - DNA, 2300 bp, Homo sapien
attcttcacccccatatatttcagtatgtatttccttagaacaaaggacaatcttctacataactacaatataattatcatgatcaggaaacttaatgtcaatattaccatgtcatctataatttatatgtttctccagttgtcccaatactgtcttttagagtatttttttaacccaggttttaattaaggatctcatacaatatgtgtcacatatctagtctcctttaatgtgatactattcctattttagccattttttgtttttcaccacactgatgtttttaaagagttcaggtcagttgttctgtggaatgtacctccatgtggatttgtctcattgtttccttataattagattcaggccagatgttttcagcagaaattctacgcaagtgagattgtgttgtcgctgtagcaaggggagcgcatgacgtcagtctgtccctttattggtgatgggacaccattacttcataatttggtgaagtaatacccgcaagatttatccattgtaaaggtaccctttcctcttcatgagacttggagactatgtcaatattctctcatatatttacgtgttttaatatatgtaaacctttcactgaatggtgttagaatccactcattagtgacatttccaattagagaaaacacagtacatctataaagacctactgatggtgatctgcagtgggaagttgtgatacttaacctttcttaaatatgtagaggcaaactgaatagaaaactgtgtacaaaaatgaacactctatacatgagcattttttttttttttttttttgagacggagtcttgctctgtcacccaggctggagtgcagtggcacgatctcggctcactgcaagctccgcctcccaggttcacaccattctcctgcctcagcctccccagcagctgggactacaggcgcccgccaccacgcccagctaatttttttgtatttttagtagagatgaggtttcaccgtgttagccaggatggtctcgatctcctgacctcgtgatccgcccacctcggcctcccaaagtgctgggattacaggcgtgagccacggcgcccggcctatacatgagcatttgtgaagcttgtctaagatttgtacatttgattgcgtggatattttgccttaaaaagaactgtaaatgaataatgtgtgctgatgtgttcatgggtgtagagtactaaggtctgcattaaaaagataagatggtttgatggaagaacaggtggatagcaatatagcaaaatgttaacaattgggtcgatatgtgtccactgtacaagtcttcccacttttctgtaagtttgtaagttttcataatacaaatttggatttaaaaacaccccaacattgcaagagtgtcaccaaagtgtttgaaaagcaggattctagggggggcattcgctgacgactcagagaaaccgtccatgccacccaccacccctacgcactcaaaagaagccctcgctaggcagcccggccctccgagccctggtatcgaggggctctccgcctctcccctgccgcggccgcctcctgcttgcccggcctcagtctgttctcagaacatactccatcacctggttcccagaactcagattgcgcagtggtctcgtcatcatcggccaggactcacagtgcccgcggcagaggcctccctagacctccctcccgtccagcctcacccgctgcctactctcctcacgcccctgctccaggtcccctggccccatttcgctcgccacgttttcataatcctctcaggctccgggcaagcggcgccgcccgcaatgggacctgatcatataaggaaaatactgcgggctcatccgggggctgcaatggggacccgaaagcgccctagcctactacaatcaccgcaccccaactgccgcccacctctctgccctgcccccagtacagtacccaaaaccggtccgggtccagctcggcggcccaagcctctgcccagcggactgcgcacccgcccgccccagccaatcccgccgccgccgccgcgccccgcccacaggacgttcggtcccgcccccagctggcggccgcggccgcccgcgcgccaagttcctcagcccttggctcctgcccagtgtttagggtgttggcggagacaaaggggaagagtcatcgcctgtcggggctaggatatgatgggtgagaggtgtcaaaccaaattctctcggtttggaaacggagaaaatctaaaaatgaggatgtgaggaaagagtccgctctcaaggcgcgttgtggtctatcc

SEQ ID NO: 19851 - DNA, 2300 bp, Homo sapien
aggagagccagctgcagcaggttccaggggctgttggtgatgtatattcacctacttagcaagcattcctgcctaccgtgtgccagctggtgaagcactgacctcaggcagagaggagacagtgtatacacaagtaaccacagcacaaggtgcttggcagtctcacagggagtgtaagggaagtcaggggaaatggcttgaggctggagtggtggggaaaggggtctgtgtagaggggaggatgtgattgtccctcctggtagcaacttgaaaagtttagcgccatcttcagatgtgctcatttttcatttccaagattccttatgaattgaattcattattctgtaagcttttgtaattttaggctttaggactttgggccttcgtgtctccacaagtttacaaccactgtggccagcactatgttccctttatttgttctaaatttgttgatttcaagctttaaagattcccaggtggttccaatacccctacaaagtttgggaagcatagctctatataattccccttagcacattaagaattcagccttctgggatttgtagggggttgggggttagacacccaggcatgtcttagcacaaagccaccgttagtgacatggatcttacaatcacctctgcttgagcatttcgggaggggtattggattttctgggctttcctgagaagatgactgagatgtcagagctctcaaagacaggcgtcaaagcctggcctggattaatctttccttcttgaagcatctggtgtataagatgctgcaaataggcattagagcatttattgcctgtcctcccagggtgtagtgaaggttttcaaagtaatggtggaaaagacataagaaatgctttatcttgtggatttgataatattgtacagaggagcttcggactgatggtggtcatagtaccagcgtcctggtcccgatccagtctggagcagccctgggctccccattcactgggctggccaagtcttgtggccccaagagttggttaatcctttgcaagagtcagagttgtagccgaggattcagtggggttggatctggacagggttatatgaacacgaggcaggggtggcagtgcagcggagctggggagccagggaatcacatgctttggtgctgcttggcaaggcacctaacaggggagacggagtctgagtagaactcagggttcacaggagaccttcggtagccacagagattcctggctcaattttctctagacacctgggtcctttctaccaactggcctctcacgcagaggccactcttaggtcactgaataaggttttacggtctgccgcctctcctgtcatttaagctgggtttttagatgcctctcaatttaagaagtatttttaaagatttgcttctttatcaagatgaataaagttcctaacaacatctataactaggtgtgtagcttgggatggccacatccctgggactgggccaactcctgtcaacaggctgatcttaaaaagttgtcacccaatgtgtttgtagaggctccaccatggaatactcgcttctgtcttcctgtcactctctagtcaccgaagccggctctagtggtggatggagcagggctcctcttctcctctttgtgtccctggccacagaggaccactgctcagctgggatggaggtgacattaatgacagcaaactcctccctcagcggcttgctgttctaggtctcagtgggctgatgggcttccagtggcaacagctgctagggtctggggccacaccagtgtcctgttttgccgctgggccctggataatctcacttgcccacttgctcttccaacctccctgccccctgcattctcacacctgtccgttccttcccagggcgctgcccgccccaccctgggactcctaggctgagtgtgtctcctggggggttggcatggcaaccggaggaggcttggcttggggaggcttgggattcagcaaggcgccagagagcctgacctgggaggagtcttgccttgagagaatggactctgactcatcatctcccacttcctgagttccagagcaggtggcaacagcctgtgaagagcagctctcctggcagcgtccctgactggcgcatttctgacggctgcccatgggccgcactggtcacctccaactgcaagcaggattttacccccaccatcccaggccgggctgatgtctgttctcacactgcttcctctgcttccaggaccttaaagaactggtagaaaagctggaaaagaatgagaggaagctcaaaaa

SEQ ID NO: 19852 - DNA, 2300 bp, Homo sapien
tagggccacagagggagaggtttgcatttgcagatgtctcagggttctctgcatcagggcggtcaatactctctccctgacactgcctgtttcctcttgctccccaggctggctgagcacctgcggaggatcagagcggctgtggtgctccagaaacattaccgcatgcagagggcccgccaggcctaccagagggtccgcagagctgccgttgttatccaggccttcacccgggccatgtttgtgcggagaacctaccgccaggtgagtagccactctgagggcctcagggctgcagattcagaactaaagtggcaacagatgaattactgccaacgtgaacctctgtcaagcactcccaacttttttctaaatgctttcacatctctgctctcaccaaatcctttctgaagtcccacaaggtaggaagggtgtgcatactgttgtcttagtccattaaatgttgctataacaatatctgaggctgggtgatttatgaagaaaagaggtttatttggctcacaattctggtggccagaaagttcacaattgaacatctgcttctggagagggcctcaggctgcttccactcatggtgggaggtggaagccggtgtgtgcagaggtcgcatggtgagagaggaagcacaagagtggctcttttaacaagcagctctaatgagaactaacagtgagaaatcacccttgaagaagggcatttatttgttcatgagggatctgcctctatgactcaaacatctcctgttagactccatctccaacataggggatcagatttcaacatgagttttgaaggggcccagcatccaatcatggcagttttcacaccccttctgatacctgagttgctcagagaagccaggtcacctgcctgagggcccaggccagccaacagcagggccaggtgacccacctagggctcattcacacttgagggcaggcggtggtattgggcatcatcaggtctaactcctccacttaacggatcaggagcttgaagcccaacatggtgaggtcaggagggaggccccgacctcttccctgccaggttcttgctctttgtgttgttccagtgaagccaaaacccttgggttcaggagccccacatcaggacacatctgttcaaccaggtaacaccaacacatctgaagcacagagctgacttgaaacacgaattggaaggaaatgtctaaaatggttttctttttcattaaatgaacatctgtctcttctatgatcacagaaggtgtgattttctaaataataaaagtaaagcacgaaattgataataataaaaatgtggtcagggtggagcacaccctggtgtagtatgtagagaaacccaggccattgggagaaggttctgtgagtgttcttgggtgatgggtggcgttggtgtgctgctcccatggaaggggcaggtgatgtttgggagtttctcagcaggggcagcatgtgcaaagagtgagcactgatgtggctcccagctctgtcactcatggctgtggcactgttcattgctcagcctgtttgcttgtttactcatttattccacaaacatttattttaccaggtattagggcgagcacactgatgatgctttcatatcctgagtggttttttaacttggtagaaaaaaaaaaacagtgaattacacaccaagtttgtaattataagccattagcctgctgtggacactcactgaagtatctcacttccagctcagtgccaccaggaggggacctccacctggtaaatgggtagagagcaagtggatgatcattaggcccctacaaccttgaggttttcagactgtggtttcctaacccataaaacaaaaagtaaaacaaagctgaaaagagtttgacagctgattccctgtggatatgtaggcgcagaacctcgctgaaatgtgttataaaacaaccaccaaagccttagatcttagggggcacattgtctgtgtaactcctagaaccaaggctgccctggcctcttccctccacaggcagtgatgtatgcttccttcactcctgtcctgcagtgcaaacccacaagatgtgtatccttgtttcccgccaggtcctcatggagcacaaggccaccaccatccagaagcacgtgcggggctggatggcacgcaggcacttccagcggctgcgggatgcagccattgtcatccagtgtgccttccggatgctcaaggccaggcgggagctgaaggccctcaggattgaggcccgctcagcagagcatctgaaacgtctcaacgtgggcatg

SEQ ID NO: 19853 - DNA, 2300 bp, Homo sapien
tgaaattatgtggaacttcatccccaccacttaaaagcagctcaaagctccagtccttgccatatgtttcctgggggcccaaatcacccctaattgagaatgtctcacttagagtaagatccttgtgttctgtggtggcctgttggtagtagaaccccaagaatcaactacgttttacttacaaggctggctgactggctggctttgcatctaagccaggcttttgggagtggaaggaaccatggcatcttgttagacttctgttcctcctgttccctaagtctctactgtgtgtcccactgttgctaagtatccttgaagcacagtcttcctgtgtcacttatccactctggaacatcaaacagctgcctgtgttgagaagcctccatgatcctgtcccactctacctgtccaaacctacttctcattattgcttgacatgccttttttgtttcaggtgttttgggttttattgtatcagttgttcttattctgaacagtaggtacaaaagatatgaacactgttgtgtcttaggttggaaatgtgcatcctcagactttaagaaactccagattgagacaagcttggatgcggattgaattcatggtcagaagatgaattaaatggaaagaaaaaaaggcaacttgtgcttgaagcctctaagcagttgctgagactcattcagctcttgtagttgtgcttggatcattcatataaaggccgttttaatctgttcttcagattcattcaggggagtataaaggtttacaactttgacagtggggctgggtgttgacagaggtgactaggaagctggtggccttggcatccttagggttttcttctgggattacaggagctggactgcaaggatcagaggttccatcatctgaactgctgtcctttggtgaaggtttctttcccagctgctcagttgaccactgttggtacctggattgcttatgctccaagagcatgtattggagtcattacattgatgatacagaggagcttactacattgtccatgttatctatgttatttcatttctgtttctaagactttctttttcttctgcataaatcctaccatctctgcaagcctttcccagttaatccagtccccatgccactgtgcttccaatctgtaccacacagttggacatttaccttttcaaagctaagttgtagtttgtaagctacttgaagttaaggcagtctatttccttgttgtgtatttgcttcctcacagccagcctagtaaccagtagatattttggtattgattttgatgggactctttaggacatctaatatgaatgttataacttcattggaatccatagaacatggcaactaagtttggagcctgtaactccaaagcaacgattgctagtttacaccttgccccttaaacaattggaacaatacacctataagataaaaaaaaacctgattttaagtaacatagtgtttccacgaatctgttggtattaactgttgttgaagtatacccctaagtaagtagacaaactgacctgcttgatggaggatgttggatataagcaagttatattgtggagtaaatgttaaagcaaatattttatttcgaagggaattctttactctgacttccagaggtgctctcttggcttagactttgaatgtggttcagggtgtgagaagttggtcattcttgtcctttcctgactcataccactagcctctttggcaaaaagcagtgtgtagtttctttgtttagggtagagcattagtttccagggtggtgacttttctttgctggtctgaagtcatgctgtctccagtttcctgtttcattctctgctcctcctcagtttcaccagggtgtgtgatccactgccctcatttccttgttggcagtgggtcctttggcacctgcggctgcttcatgggcagtcagggtttgcctgtaggccccgagaggcttgggacttgcaacagaagtttaccatccttccctaagcactggcttgtgtcatttgatgactacttattcagaacctggaactttctgcctgtgaggtcgacatacccatcatgcttattgcctggagaggaagccctacattctgctgctgctgcagagtgatgatttttaacagaccagaacttacacatctaaatgagtgttgttgttcagtgaagtcaccttaggacaatgatttaaataacaccgcgatttctcaagaagtttggaacttctcttatggttgagttcaaagccattttatgttatatgtggcccaaacaagttttat

SEQ ID NO: 19854 - DNA, 2300 bp, Homo sapien
ccatctgggagctcttcagaatcctttcacccagggcaacaccccccagacaagttaaatcagaatttctgggagtgggaaccagacatccacttgtttcaaaagtgattctgatgtgcataaagtgttgagaatcagagaattaaggaggtactgggcgtaagtggagatagctaaataagtgaagctactgctttaagaagtttagcaggagaggaaaacacaaaaagccaggggccagtggagagaggaagagttgctggtagagagatgggaccactaatggtggtggaggaagaggccaggatctaggcaggactgatgactttcttattcaaaaaggggagaatcacctggaggcagaaagaacaatgagtactggccccacaccagagtttatggttcagtaggtctgcagtggagcccaataacttgtatttctaacagttaccaggtgatgctgatggtgggcgtggggggtggggacacactttaagagctacaggaatccggggaagggaaatatgcagaaaaacttttgaggaagagaaaaaaatccctttctgctcttgccactgatgtgaagagttccatttttaggtccaatgagagccgcccaagctttggtcaatgcatttgtcaccctggaagtaccatcctttagactttcagaggagctttaaaaattgggatacccaggtcccatccttcattatatcagaattccttgggttggggcctcttccttggaacgcttaaagctccccatgtgactctcattgtggaggtgcccatgggaaggcctgcacaggtgaattacaacgggatcttgagttccaggtgggatgcctctgagaatcaccttctggggctcttgaacaactgccccggctggtacagatatatcttccggttgagaaccacttttcaggggccacccctgggtcagggacagatgtcagcttcagaagggagtgtctcctctgacagcccctcgtctccctccacagacttctggcagtttttttttttttttcttggttgaaatttctacttttcactggaagtaggagaggagctgaagttgctgcaggcagccaagtgccatggtcagagagggaacacaaataaacgaggtagtgagtggcaaaaggacccggagtctgcatgtagacgagacgggggttgggagaacgtgagacttcccggaaaagcagaagccctctgagatgagtggcctggagtctccttggaggctgtgggcgaaagtggacaatatttgtacagaaggagttacgactcccactttactgacaaggatttccgcgcagagagttcagtttgaaggagaagatccctggtgtatgtatatccaggtcgccttaataacgatctacgagtaactgaattttaatcatgaaagcgctgaatacagccaggtaaaatcgagggcaatgtctggggccttccagccatagacgcttctcttttttcccccctctctggttagttcctcttcccttttcttgtctgcaccgcgttcatgccggactccgcggggcccggtgcgggtggaagcggagcgcggcagggcaggtgcgggcgccggggcgcacctgtgcctgcgcgcgcgcggcgtccagcagggggcggcccgcgccggtcccggagctcctctctgagcgccccgcccccggcccggaggcccaggtggcagcgggggcgcgggagggcgcgtcgggccgggcaccggcagggctcagaggcgcggcggcgcacgggccgtccgctctgacgcgagcgggtcctccctcctcgccggccctcgcctcctccccacacctgggaggggagtggtgcggcgcggcctcctcccccggcgctcgcaactcctgtccggccgtagctgcgccgccgcggcgggagtaaaggtcgcgccgccgggagcgagccggccgcggcgcctgcgggaagccggcggggcaggtcggagaagagcgagaagatcgagaaactccaggccagcccgggaacatggcgccaggcgggccagccgcggactgagagccgcggggcagccaggagccggggcccgagccccgcccggcccgggccatgtcggtgggcgagctctacagccaggtgagcgcggccgcgagggaggcgccccggggccggggtggcgcgctcggggccacctagtactcagggtcgccttctccctcggctactggaggcgggaggtgacgggagacccccctccgcggtgtcctcctcgtcactgtcctcggagtccctaa

SEQ ID NO: 19855 - DNA, 2300 bp, Homo sapien
tagcatggtttagagctgtgatgtccaataggtagccactagtcacacatagcatttgagcacttgaaatgtgcctagagtcacatattgacaagataacatcttggatatattggttaaataaaatatactatcaaaattaacttcccctgtttctttttacttttttaaatgcagccacttgaaaatttagaattacatatctgttttgcattatatttatattgaacagtacagactttgaacaataccacgactgtgctgggattggcatcaccttttttgagaactccaggtcatacccctaacttatcaagagattgggtccttcccagaccagagtccttcacatgattcccaagccttaaaaggcttcctgaccccttgggtactgctcatggtatttgtcacctcttcagccaaaatatccctcagccctgtttcctgtcctgacaactggagccagtgtttctagatttacttggtgtttcattcctgttctcagctcacactgggacccttaattcctgctgtgtatgctgccaagggtgccactgtgatcctcctctgctttattttcacagatctatattcataaaatgccaactgtattggagaacagtcatctaattagctggctctaggctccagataattatgacatggattagctactttccatgatataacccccagcatcatcttctgtctccttaccaccccaggcttgccttatcttgttcagctaaatctaggtacctatatgtgtaccctgagccctgaatcttttcattaaactgtcttcaaatgttgattttctttcctcaggagacttcattacaaacacctaaccctagtattctggtaatcctgatggtgatattctaaatgtaaaagatcagattgactctctgtctcttaagagttttgtttctgtgaatcagcaccccagtatctcacaacttacctaaggatgacttgataaaactgttcctgaaaatacaaagctcaagactatggattttatggtggctccaggaggtgcagaaattgcatcaagcccacccagcaacattgtttcattcattcactcattcattcattcatttctattgaggacctcactgtagtaggcattatgttcaatgctaggaatacagaaaggaaaaagatataggctatgtgatttcattaagtgtatctatatatattcaaatggtacatgcatttctaacttttttagtggacatttctgtaaaaacagtacatttatagaaattcaaagtagcccaaaaggtcaggaacacactctttgcattaaaacttctgggcaccatagaaataggaataaagttctaccaccagctttttttcttttccctcctctcttcctccctcacttcatttcttccttcttagtcaaagatctttcattatcacaactcgttatatatccatatacatatacacatatatatacacacacacatatacatgtatatacacacatgtatattttttctatatattcgcatagtagcaccttttcattgaaagtattttgatgtgataactatggtgtccaaccgtgagaaataatgtggaataatgagtggcaatgtcaaggtcgggaattagaagacctctaattcttgttttatctgccctatttgaagcaagttcagcaaatcacttaatgtctctgggtttgactagacaatctcaacagagtcctgttcacatttttaactttgtaatttccatcaactatttttcaaatggcacattagaaatatttgagactgttttgatgacatcttaggtataggctcagagaatgaaacaagttactctttaggtgcataagctgtattcagttgtagtaggatgtattagttttttatacccaattttatttagtatgagtattgattgagagcataactaattgaaaatatgcagttgattctttggcttattataagtgatagttggtttttgttttcagagatccaagcctcctaaaggccaaggagctgagcaccatctagaaagaatccgacgcagccatcagaagcataatgctattttggcttccattaagtcaagtgagcgggatcgcttgaaagctgagtgggaccagcacaatgactgcaagattttggacagccttgtgcgagcaagaatcaaggatgctgtgcaagggtttatcattaacattgaagaaagacgaaataagtaaggctcacaaacctgggacataaaccatgaaatattcctaaaaccacaatttgagattg

SEQ ID NO: 19856 - DNA, 2300 bp, Homo sapien
agttcccagccacagtcacccaccggggccctggaggcaccgctcgtcacccatcacccctggcctggccgccctggggcgtggtctccgtccggcgcaaaccccagtacttgggctagggccagagggaagctgagtccccctcttcaaatagtggtaaaacaggcaaaaccgaaccggggttaaatttcggagctcgcccagggtgagggcggggctcgacgacctaggacgttcgagtgcggccgggtgtcgccaagggtcggtttaccccatcgcctcagaaattccgacgaggccctttgggctgcacaaccttgggaatccccaacgggcggccccgaatctgcgccgattttcccaagccgtacttcgggcccaaggcgttttcattgccgccttcccggaggatgtgtggtgggggtggttccgcccggaccgacgggcgggcccggagcccgttggactcgaagatcaaagaaccgcccctctggacactccaggaaaccgagacgaccacctaatttgtttgttttctgtttcaggccacgtaaactcttagtaaatgcaaatgcgtattttactgaactgcaattgaaagaaccgttatagaaaagaacacaaaatgacagaattattaaaagagaagaaaaacattatttcgtggctgaaaagctgaaccagcaattcaggaaatggaattcgtatttagaaacataccacatacaaaatccgaagtgggtggtttacaaatgattaaggaatgctaatttacagtaaattgcgtccttaagagggcatacacattagttgtacttattatatgtcagtttgacgtaggtactgatttgttgcatgtgctcacaagtgttctatgctcacccccactttagaatgggagtatcacagtgtcattcttaattggcttttaggtattaccaccttgctcttgactggaaatgcaactgtggttaccacctgtgctgcaggtccgtcctggttccctgatttgtgtttcctgttctgcctggatcctgattctcagaaaccagttactggacttctgatccacatcctgaccctggtccactgtgaccctcagactcttaattatgctccaccaggtcgtgccactgccccactagtccatttgatctgcccccatcctaggatatcctgagtctaagccctggtttctgccaatggcaaataggaagattttattaacaggttttaaaaaattattattattactggttatttggtttgacaaggcacttaggctccctgagctttgccttagctggaaaataaggatagtattacttgctattctatcaaccctgtaagatatttgcggccacgcgcggtagcgcaccctgtaattccaacactttgggaggccggcgggaggggcagtggggaggatcgcttgaacccaggagcaggagttccagcctgagcaacatagcgggaccccctgtctcttcaaaatttgtttttaaattagcagggcgtggtggcgcaggctttgtagtcccagatactctggaggctgaggcccaggaggacgaggctgcagggagccatgatcacgccactgcactccaccctgggcgacagagcgagaccttgtctcagaaaaaatctgtgaggttaaaaggctgtgtgtgtgaaaatatcttggaaattgtaaagaactacacaaatataaggttttcctgtgattattaccgtcatcaagattaacctacagatagtgcaaaatttaagcttcccaaaaaatgttcgctaacctttttcatacttttagaccattacaagatataaatagcaaagtcaactggaattgtaattagagctttgatttttcttgggctagaggttttttctgccattctgatgaaccctggaggaagggagcaaggtcggcgggatttggccgaggggcggggtgaggactgcgcaggctcagcttctcagctggaagaggaagtcccgagtgcaggcgtctgcggcccccatggtgaccagaccgacttccgcccgacccgcccacctctaccggcccctaatcccgcgaggcgcaccatggcaaccagacttctgcgtcgcggaagcgggtcccgcaggtcgccacggttgggggaaacgcggcggacgccgcccccgtcccgaaggggactcgaaaatgtacagccagcggtttggcaccgtacagcgggaggttaagggccccacccccaaagtggtgatcgtggtaagcacaggatatgtctgccagaccctacagctttctc

SEQ ID NO: 19857 - DNA, 2300 bp, Homo sapien
atccacagttccctccatttgtgctcatccctccagtatgagagccagacgtcctttgggtccatgtaccccacacgcattgaagggtaagtgagggtgccacgcagtgagaggtggggggttaaggcgggggtcagaagtgggatgtgtgtggagctggggcaggatacgggcaaccagccaggacagatggacctcccttccctccctctactgccctctctactccaaatccccagggccacacgactcttctgtgatgtgtataatcctcagagcaaaacatactgtaagcggctccaggtgctgtgccccgagcactcacgggaccccaaagtaaggttttccctcagctcctcccattttgcccctcctccctgcctcgctgtcccacattcatcccttccttcctcacctcacttttccttcactttttcctctcagcttccctgctgcttcaccctccattcctccttttccatgcctcctcaccgttccctgaaccctccattcttttccttctccctccttgagcccccattcctattctcccttatcaccgctattcatccccccaacctggcctccttgcaggtgccagctgacgaggtatgcgggtgcccccttgtacgtgatgtctttgagctcacgggtgacttctgccgcctgcccaagcgccagtgcaatcgccattactgctgggagaagctgcggcgtgcggaagtggacttggagcgcgtgcgtgtggtaggtttctgtgcggttttggtgctgcatgtggtaggtttccatgtcggacgtggccggggcaggcggggctgcaggtgttcctgcttaggactcctgccgctcccttggcagtggtacaagctggacgagctgtttgagcaggagcgcaatgtgcgcacagccatgacaaaccgcgcgggattgctggccctgatgctgcaccagacgatccagcacgatcccctcactaccgacctgcgctccagtgccgaccgctgagcctcctggcccggaccccttacaccctgcattccagatgggggagccgcccggtgcccgtgtgtccgttcctccactcatctgtttctccggttctccctgtgcccatccaccggttgaccgcccatctgcctttatcagagggactgtccccgtcgacatgttcagtgcctggtggggctgcggagtccactcatccttgcctcctctccctgggttttgttaataaaattttgaagaaaccaaggaagctgtctccacattgctgcggttgcaactgttccagacttctggataagatggggggcgcctgcaccccgcgagagcccagggacccacattcccagcctcccacgggcagagggtctacgcagcgcgccttcagtgtggtgacaccgcccatgcatgctcctgtctcccacccagagctgtcgtccgctgtggacgccaggccccgccttttccccacaagccccacgttggggatccgcctcctgcaggggcgcgccctcccgcgtgcctcagtttacctgcggtgtggcaccgcccctttccccgccccgcgcgctcccacagctgttcggcggggaggagggagcgggacacgaccccccctggggttgatgttcggagggacccacgaacacaggatagaccccagcgagaggtgggagaggagagcgccggcagggccagggagtgcgcaggcgcgaagcagcttccttgccgcgttcggtatcggctgtggagaccgcgggagggaagggagggcgcaggcgcaagccctccccgaccgcttcccttcaggttgaggctggaaagcgcatgcgccagctagatgggcagcgaggagagccgcaactgccagtccctcgaaggggttagctgtcgttgaacgtcagcacgcagatgcaactggctctcggcaggggggcgcgcgcaccgctgcggagcgccggcccgtaggcgcgggagcctccctattaagggcacgcgacatcgaggcaatagtgcgcaggtgcttagccagaggcggagcccgagaggcaggcagcggacttccggttccgggagcaacgaacagccgcggaggcgacagctaccgcttcagaggaggcggccgcggaggaggaggaaggggaggagggcgaggcgggaggtgcaggagggaccctcgccatgggtccacgggcctagagtggcggaagataccggcctggtgccaaactggtgagacagccttggggctggacgtggagagcgctcaggcggaggatgggaaggaattgtgg

SEQ ID NO: 19858 - DNA, 2300 bp, Homo sapien
cagcgccgggcagggtcagggacaggggttggggccatgcttgctcggggctctgcttcgccccacaaatcctctccgcagcccttggtggccacacccagccaggtgagtggctgcataaagtgaatggatgtgtaaagtggttccgtttcagccctgcctgggtccatgatttctgttctgggccccctcctgcagcatcaccagcagcagcagcagcagatcaaacggtcagcccgcatgtgtggtgagtgtgaggcatgtcggcgcactgaggactgtggtcactgtgatttctgtcgggacatgaagaagttcgggggccccaacaagatccggcagaagtgccggctgcgccagtgccagctgcgggcccgggtgagcatggacagagctgggtagggtcaggtgtgggagagctggtgggtccatgcatggttagttaagtctaggcatggataaaccaggtgggattgggcctgactgtatcctgacaggtgggaaggggcctgtcatgtccagatgaatggggcatgacctggtatgctgggctggcagaacacccccaccaaccctgggtagacagagtggggccaggtgttttcaggtggtcatgcatgttggtacagatcaggcagggctgagcattcctggcaatgaggggtagcggggaggtgtgtctggggaggtaaggccaggccaggtgggtagggctagggcaaggccgccctccatccacctggggctgacctgggccttcctcctgccggcacaggaatcgtacaagtacttcccttcctcggtgagtccagccccccagggtggggtggggcatgcgggcagggcggtcagggccagtcctgagattctgccctgcagctctcaccagtgacgccctcagagtccctgccaaggccccgccggccactgcccacccaacagcagccacagccatcacagaagttagggcgcatccgtgaagatgagggggcagtggcgtcatcaacagtcaaggagcctcctgaggctacagccacacctgagccactctcagatgaggacctacctctggatcctgacctgtatcaggacttctgtgcaggggcctttgatgaccatggcctggtgagcagacaggagcatccactggtggaagggtggaggttacagaagcagagagtatccctaatgaggagacagagggtatggaaggctgatatgggacatgagtaggtggtggggttgtcacgagcggggcaggtgggtcagtgcatgccctgcttgcagccctggatgagcgacacagaagagtccccattcctggaccccgcgctgcggaagagggcagtgaaagtgaagcatgtgaagcgtcgggagaagaagtctgagaagaaggtgatggagagggtaaagtggatgtggaaaggcagagggtggggttgagggagaggcagaggtcagaggctgaatggggcaagagccagaaagggctagaatggagcaagggtctggggtctggggctgactttgactccaccctgacctgacttgtcttgctcaacagaaggaggagcgatacaagcggcatcggcagaagcagaagcacaaggataaatggaaacacccagagagggctgatgccaaggaccctgcgtcactgccccagtgcctggggcccggctgtgtgcgccccgcccagcccagctccaagtattgctcagatgactgtggcatgaagctggcagccaagtgagtcattcctgagaggttcaagggagtcaggaagtgcatggtagggcctgaccacagccttctgtatgtctaccagtcaatcagctatccaccagtcaccaaacagccactacccactcacccatccacctacccacccacctgcccgtgtgtccatccagccaccattccgccagtcacctatttacttctccttttgccatttgcgtctattttgccattctcacttactgatcacctcactcattctgttgcttgctaccttccctgcagccgcatctacgagatcctcccccagcgcatccagcagtggcagcagagcccttgcattgctgaagagcacggcaagaagctgctcgaacgcattcgccgagagcagcagagtgcccgcactcgccttcaggaaatggaacgccgattccatgagcttgaggccatcattctacgtgccaagcagcaggctgtgcgcgaggatgaggaggtgagcaagcaggggcgcagcagagcagggcctgtactttgtccttcccagccttattgttccttcc

SEQ ID NO: 19859 - DNA, 2300 bp, Homo sapien
taatggcttttacttgcaattcatgaattggggcagatcccattatacaaaatagaacgagagcttttcctgggaaatagcagagcagtgaattttgtaaggttggagcaaggaaaaagaacaattttttttttaaagctgattggttaacatcagattgcttcaggttgcttttttataaaggttaaagcaaaggggactttcaagctaaaagtggcttgtatggggatttggctattatcctgtctctttctccttggaaggtcagatgaacaatttagttttggcttggtggcatggaacttcagcgtgagtgactccattttggtggggcctagagcaggagctctgtccaaactaatgacctcctataaatttgaacatgtcttacaatatttatagccaattacaaagtaattctacttttagaattttatctctaaggagagtcaactaagaagaggcaagagaccaagctgcaatgcaggagtttattggggcattaggaactgcaattcaggagacacagattcagctcgaagtcaaattgtactccaaagataggaaggggagaaggagtttttaagaaaaagaaaaaggaagctaagggtgattacacaagttcttttaaagaaattattattggtggaggcggctggctggcatcagtccatagttcattggttgttgttcaggagacgcagcactagtgaaatatagctggtttccaggactgtgtggtcattgcagtttggaccaattcaaaggttcgaggcaagttcctgttgtgttttaattttgttttgtttgttttcctttttgcaagtttgcagggagtccatagaatggcttccaggcgggccaggcacgcggtggttcacgcctgtaatcccggcactttgggaggccgaggcgggcggatcacctgaggtcgggagatccagaccatcctggccaacacggtgaaaccccatctctactaaacatacaaaaaaaatcagacgggcatggtggtgcatgcttgtaatcccagctactcggaaggctgaggcaggataatcgcttgaacccgggaggcggaggttgcagtgagctgagatcgcgccattgcactccagcctgggcaacaagagtgaaactccgtctcaaaaaataagtaaataaataaaaataaataaataaatacataataaataataaataaaataaataaataaataaataaataaataaataaagcctggcttccaggctccatcttacagctgttaaccagagttacacctggtatatcacatttgtatatttgtaaatttgtatatcacatttcacaagaaataatcagggatgagcatacagatctatgtttaagaatgttcgttgcaactttatttagaataatatttgaaaatgttctaaatgctaaacaataaagaaatggataagtaaactgtgtttaggcttattgtgcagcttatagaactaaaataagatttgatattagtttaagaattgtttttaaataaaaataaaataaatagaagccgaaccgtgccaggcctggcagaagaatgacaagtgggaggagtaaaagccggaaagagtggtggcaggtgaagtcggagacgacagaggaactggtttcctccgccccgcaaggcacacagcctgccgacgccccattaatacatgtggaaggggaaagagactgaatggaggaatgaatacaacttgatccaggtcgtgcttcggaagcggtcactttacctgtgaacctctctgcctgacaaacgggcaatgtacggaatcaaccaccaagatggcggcgcccgtgaagaatccgcaattaggtcgccgtcatatgtcgcctaggaacgtacggaattcgacccacgtacggaatcggattccaagatgacggcatctatgaggaagtcacgcagtaggtgcagccatgttgcctgtacgtcgaggccgtacaagcagccgccgtacggactctactgacaaggtggcggcgccctcgggaaagccacattagagcgcggccatgttcccggcgaacatatggattcggccaccatacggatacgataagcaagatggcggcgcctgaggggtcttgggggctctaggccggccacctactggtttgcagcggagacgacgcatggggcctgcgcaataggagtacgctgcctgggaggcgtgactagaagcggaagtagttgtgggcgcctttgcaaccgcctgggacgccgccgagtggtctgtgcaggttcgcgggtcgctggcggggg

SEQ ID NO: 19860 - DNA, 2300 bp, Homo sapien
ctgtggtaatgtgtagtatttataaaatggctgtgaatgctgacagttttttactgacaagggtgatgaatttacaagtttgcactggccgggcgcaggggctcacgcctgtaatctcagcactttgggaagccgaaggtgggggtggatctcttgaagtcaggagttagagaccagactggccaacatggtgaaactccatctctactaaaaatacaaaaattagctgggtgtggtggcacgggcctctaatcccagctactcgggaggctgaggcaggagaactgtttgaacccaggaggcggaggttgcagtgagccgagattgcccgctccactccagcctaggtgacagagtgagactccgtctcaacaacaacaacaaaagttcgcactaatctaataacctaataaggctctgatataggaaccttcatacactgctggtagaaatatatgtatcaaccattgaaagacaaaattacaacaaatttagttacagatgtaatggcttttacttgcaattcatgaattggggcagatcccattatacaaaatagaacgagagcttttcctgggaaatagcagagcagtgaattttgtaaggttggagcaaggaaaaagaacaattttttttttaaagctgattggttaacatcagattgcttcaggttgcttttttataaaggttaaagcaaaggggactttcaagctaaaagtggcttgtatggggatttggctattatcctgtctctttctccttggaaggtcagatgaacaatttagttttggcttggtggcatggaacttcagcgtgagtgactccattttggtggggcctagagcaggagctctgtccaaactaatgacctcctataaatttgaacatgtcttacaatatttatagccaattacaaagtaattctacttttagaattttatctctaaggagagtcaactaagaagaggcaagagaccaagctgcaatgcaggagtttattggggcattaggaactgcaattcaggagacacagattcagctcgaagtcaaattgtactccaaagataggaaggggagaaggagtttttaagaaaaagaaaaaggaagctaagggtgattacacaagttcttttaaagaaattattattggtggaggcggctggctggcatcagtccatagttcattggttgttgttcaggagacgcagcactagtgaaatatagctggtttccaggactgtgtggtcattgcagtttggaccaattcaaaggttcgaggcaagttcctgttgtgttttaattttgttttgtttgttttcctttttgcaagtttgcagggagtccatagaatggcttccaggcgggccaggcacgcggtggttcacgcctgtaatcccggcactttgggaggccgaggcgggcggatcacctgaggtcgggagatccagaccatcctggccaacacggtgaaaccccatctctactaaacatacaaaaaaaatcagacgggcatggtggtgcatgcttgtaatcccagctactcggaaggctgaggcaggataatcgcttgaacccgggaggcggaggttgcagtgagctgagatcgcgccattgcactccagcctgggcaacaagagtgaaactccgtctcaaaaaataagtaaataaataaaaataaataaataaatacataataaataataaataaaataaataaataaataaataaataaataaataaagcctggcttccaggctccatcttacagctgttaaccagagttacacctggtatatcacatttgtatatttgtaaatttgtatatcacatttcacaagaaataatcagggatgagcatacagatctatgtttaagaatgttcgttgcaactttatttagaataatatttgaaaatgttctaaatgctaaacaataaagaaatggataagtaaactgtgtttaggcttattgtgcagcttatagaactaaaataagatttgatattagtttaagaattgtttttaaataaaaataaaataaatagaagccgaaccgtgccaggcctggcagaagaatgacaagtgggaggagtaaaagccggaaagagtggtggcaggtgaagtcggagacgacagaggaactggtttcctccgccccgcaaggcacacagcctgccgacgccccattaatacatgtggaaggggaaagagactgaatggaggaatgaatacaacttgatccaggtcgtgcttcggaagcggtcactttacctgtgaacctctctgcctgacaaacgggc

SEQ ID NO: 19861 - DNA, 2300 bp, Homo sapien
acagaaaaggaagtgaggtatagcaacagctggattggttacagtcagtgtttgccttatttgaacacggtttgagcagctggccccctttcatcggccataactcagtgactggcacaagagtagattacagtctgtttacaccttcatttaggttatagtttgcgacttacagagaaaactttaggcacaacttaaaatatgtatggaggcaactttaggctaaacttaagtctcgaggatgcaatgtaactgtcaggcctctgagcccaagctaagtcatcatatcccctgtgacctgcacgtatacatccagatggcctgaagtaactgaagaatctcaaaagaagtgaaaatggcctgttcctgccttaactgatgacattaccttgtgaaattccttctcctggctcatcctggctcaaaagctcccccactgagcacctggtgacccccacccctgcctgccagagaacaaccccctttgactgtaattttcctttacctacccaaatcttataaaacgaccccacccctatctcccttagctgactgtcttttcggactcagcccgcctgcactcaggtgaaataaacagccttgttgctcacacaaaggccagtttggtggtctcttcatacggacatgagtgaaagtaactgtccagattacattttttacaaaagatttttttcagtctccttcgcagatgggagtgaccagtgagaagcagatggaagccactgggtgtggcttccagcacaacgctctcaaagtgctggttctgttggcagttaagcctattacacatgcctcttgctcgtttctgctgcctgggagaaagacctgaggacaggggctggcagcctgaaggtccaagtgcataataatagcgcagtggagccaagggatggacagaacctggcggtgccaccactccagccttgggtgcttttccctccttttcaacagggagaattaaacttttgtttttcttattttaaatttatatttgctcttaagtggcaggccaggtctcactaacagctgaacagacaggcctccgtaaccactgtttcagcactagttaagttaaatattaaaagctgaaagagccagtgtctttatagaaaggctggtatgtaacaaaagcccaccaagagttttgcccaggcctttcctggtccttgaagcatgagaaaataaagaaggaattcttaacaggacctgttcaagattaaacaagtttttattgggggtctgaagaaactcccccagacctccacaaacaagtttatcgggggtctgaaggaactgcccaaaccttcatgatttagcaggagacaagataagggtaatcacctctggcacctgcagccatctagattaagtaaatttacttaaataaagaccttccttaggactgatcttagttatagattagaaacagttaatcatttacgtctttacacacatgcacacttacatgtagacagatagtttagaaggtatataagctctggaaaactttgtaattttgaatcgatttggcgatattttccaggccttttccctgtacccggttaccgaaataaactcttctttcccagttcatcatgagaataagcagcccaacccctggtttggcccgggaacacttacagaggctgtctaagacccagaagacagggtcactgtttcttccacacaaacttagctgctctttggaattttctggggtgtttttataaatactaaggcttgtgcctcatttccccagtgtctgatttcaccgacttggggtgtactctaggcactgagacttgtaatagctgcccctggtgactctaaggtgcagcaaatgtcaaagaccaggacttggtgacgccaggtccctggctgggctgcggtcaagactgcatgacctgctgaaatctccccagactggttagcgcggaaagagcacctccgggttaccctttcgtccggaagccccgccttcgccgtcgccccgcctttccccggctcggccacccctccttcccgcccagctgtggccccggatgacgcaaaccgggaacagcggctgagcctgcgcttcggaagcatggatgtgcgcctgcgctgcgctagggcgcggcgggcggtttgaattttgcttacagagtcccgtctcaccatcctgggcttccaacggagactgcggtatccgcagctggagacccagcggcgagtagccttttgctcccggacggacttgaggttggagtctgtgtgttggggaccctgcctttggaagc

SEQ ID NO: 19862 - DNA, 2300 bp, Homo sapien
ttctagtgactgacaccgacttcagccagctgtttctttagaagtcttccctatggagtaaaaataagaaataacttgtttcctgatagcagcaaggagaacagaacaccactttacctgacagtggagagccccagacagatactcgcttcctgttcattcccctgccatcgtacggtaatgggcactgatattaaacatgcatatttcacagtctcttgtcccgcgatttggaggatggccattcactatgtatgaaccactcactcatgctcatcacacagagaaaattacattttcccagttgccaaatggaagagataaattatctcacgtggacaagcacattgctctcaagagcagcttccagacctaagataaacagattaaaaaaaaaaaacaaaaacacgctggagggggactctgagctttccaggtgttgatgggggtcagtctcttcattcggactcgccagatcctcactttgcagttagtgggcttaaagtggcgggacatttgcccttctgtttcttttggattaaatgagcagccttggggcctcttattcttccttcatagaagagatgttataaaaatgaataaatcaacacaaaacatttcatatttatgcctacttgctgaattgatactacttgtaatgaaaatcaaggaagcaaaatgttaaaatgttctctttggggaagacacattggaatgtcttaccacagatatacacacactcgcttgttacacactccttccttatccctaactattctctgaggttaatgaaggtcctgataactgcagtctctaacttagcatatcatcctaaacctactacctgcacacataggagtcgcagcgcaactatgtactaatggcagccaacactcattacccttcataccaccatcactgtgcaaacccttagtgcattttccaatatgatcccacaatccttcatttttatgttttgcccacgctaaaattcgacagcgaattcttgcaacaattattaagcgtctggaattgtattagggtctgggggtagaggtgggggacgaagcgggaataactgcagtacacagcagaccctatgaaagtgccaaaacgcaggtctcactcggaaggctttgggagttgggagaggagaaggctcatgggcagctaaagccaccagtgacctcattatgcaatatttaggttatcagacttttctatgcctagaaaagcagcgcctcaaccattccaacgggacgcaccgcgttcagtgacgaccctcatcggtgcccacagctctgggctcgctgaaggcaccacagaagcaccagttattaccagtgttagggtccagtggcttcttctgtccctttcctctggatcccaaagtgttggttctcttttgttagttttattccggtcatgccaatgagcacagattcacagcccaggcggcccgctcggaatcccaggccggctggggaccggtgcacttgggctccgcgccccctcgaccctcggcccagtgccccttcccgcgcgcgcgggtctccccggttccagagcccaccggtccccgccggctccttctccccacccaccctcccaccgggcccccggcggctgcagccgcgcggggctggcggggcggcgaccgggctcaggcagatccccgcttcccgccttctcggcgccccctccctcccggacggagcccgaggatcccccacccacggcgggcgtgaggaagggcttctgagtgactggagctctaccgcgtgtgccccgggaaggccaggctacccgggacggggctcggctccccaggtgagctcgtctccgcgggactgggtccgggaaggccccaggaccgcgcggctgagcggcctggaggctgcgggagggcagagcagggcgcgcgggagactgccgcccccgggcgcccagggcccggctccccagcgccaccgccgcagcaggtgggggcccagtgggcgggggcggggcccggctctgggcggagccgaggcggcggcggcgcaggctggggccggggccggggcgggagccggagcccgagctggagcagcgagccgggctgtcggggcgaccgcgggagctcgccgtgcgccgtggctgggaccggcctggccgagcgcgccggcgccgcggccgcagacaaagggcggctcgcgcccgggccgccacgctctcgggctctgcctcggtaagtggctcccctccgctggctttctcctcccgccgcctgcgcctctcggagttcggcgggctccgga

SEQ ID NO: 19863 - DNA, 2300 bp, Homo sapien
ttcttttggattaaatgagcagccttggggcctcttattcttccttcatagaagagatgttataaaaatgaataaatcaacacaaaacatttcatatttatgcctacttgctgaattgatactacttgtaatgaaaatcaaggaagcaaaatgttaaaatgttctctttggggaagacacattggaatgtcttaccacagatatacacacactcgcttgttacacactccttccttatccctaactattctctgaggttaatgaaggtcctgataactgcagtctctaacttagcatatcatcctaaacctactacctgcacacataggagtcgcagcgcaactatgtactaatggcagccaacactcattacccttcataccaccatcactgtgcaaacccttagtgcattttccaatatgatcccacaatccttcatttttatgttttgcccacgctaaaattcgacagcgaattcttgcaacaattattaagcgtctggaattgtattagggtctgggggtagaggtgggggacgaagcgggaataactgcagtacacagcagaccctatgaaagtgccaaaacgcaggtctcactcggaaggctttgggagttgggagaggagaaggctcatgggcagctaaagccaccagtgacctcattatgcaatatttaggttatcagacttttctatgcctagaaaagcagcgcctcaaccattccaacgggacgcaccgcgttcagtgacgaccctcatcggtgcccacagctctgggctcgctgaaggcaccacagaagcaccagttattaccagtgttagggtccagtggcttcttctgtccctttcctctggatcccaaagtgttggttctcttttgttagttttattccggtcatgccaatgagcacagattcacagcccaggcggcccgctcggaatcccaggccggctggggaccggtgcacttgggctccgcgccccctcgaccctcggcccagtgccccttcccgcgcgcgcgggtctccccggttccagagcccaccggtccccgccggctccttctccccacccaccctcccaccgggcccccggcggctgcagccgcgcggggctggcggggcggcgaccgggctcaggcagatccccgcttcccgccttctcggcgccccctccctcccggacggagcccgaggatcccccacccacggcgggcgtgaggaagggcttctgagtgactggagctctaccgcgtgtgccccgggaaggccaggctacccgggacggggctcggctccccaggtgagctcgtctccgcgggactgggtccgggaaggccccaggaccgcgcggctgagcggcctggaggctgcgggagggcagagcagggcgcgcgggagactgccgcccccgggcgcccagggcccggctccccagcgccaccgccgcagcaggtgggggcccagtgggcgggggcggggcccggctctgggcggagccgaggcggcggcggcgcaggctggggccggggccggggcgggagccggagcccgagctggagcagcgagccgggctgtcggggcgaccgcgggagctcgccgtgcgccgtggctgggaccggcctggccgagcgcgccggcgccgcggccgcagacaaagggcggctcgcgcccgggccgccacgctctcgggctctgcctcggtaagtggctcccctccgctggctttctcctcccgccgcctgcgcctctcggagttcggcgggctccggagaagcggggaagagatgagacttccccgcccgcactgcctccccaccttaccctaacaataagccccccaggccaagccactgccaaactagcgagtttccgagcggcgggggtctcccgcgggacccgcccggctgccctgggtgagctcctcgcctgcagaccgcgcgccggtgctgtcctggacccgtttgggatgggaggttgccgctgggctcctcgcgttgtgtttaggggaggaggacgcaggggccgggcgccgctaggggaccccacccccggggacagtccggagcgcttggggtcgccgaggggcagttcacactgcgagttcagattcggatcgcagtcccgattatcctcccctccagcctctccctttctcgttgaagggttaatacagcgtcctctcccctcgccacccgacagaggcgcctacactggcggtaggtagcccctgggagagggggagtggggggaccccgccgctttcgccgctgggcgacccagagccccagcctgccggag

SEQ ID NO: 19864 - DNA, 2300 bp, Homo sapien
ctgggtgctcccagcactgtctcttagtggctgggcatcctcaaacagagtgaatggtattcatttatccattcatcagatggatattgaccctatgtatgctgaaagcactaagctggtgctctccaagccttggtatcctcacctgtaaagttagaactggaatcagaatcgatgtttctcagtggaagtgctgttggcattcaggggtggaggggtggatgtcagtggatgtgctctgggcatttgggcatggaggtgggaatgctcggtagaatggttagcaaatccggccctacccattaaataccagtaatgactcccagtcaaataaggtgaggagggcagtaccatctccagataaggaccacgggccttgttttcttagatttcttcccaatctgaaattctgtaagtctatggttgttttgttcctggacccagtaaaaacatgcagaacagaattaccgaagatctgacaaattatcagaatcttgagtacatcttattcaaatgtaagggaatgtttaactaaacagcaacaataggtaacatctgttaagcaattactatgttctagacccttggcaaatttccttcattagaagtctttacaggcgatctgattgtttactatttcagatcatctgtgtcccctaatttgcccccttaatttcagagcattgagttgactatcgtttttgcttcatttatctttgcagagttgtgcgaagttcagatagcaaagtgtctctataggaggccctgcgatatgagaataaagcagcagtctgccaagttcatgcctttgtgttggatacagtcttctttctttgtgtgtctgtggtctttatgaacttagaaaacctgccagtctcttagacgctatgatattaccttacttcagagatctgaatttacatgtctagttttgcagggtttttcctccccacttagttcctatacctgtaatttgagtcaacagccaccagagggcagggacagtgaagtttagatttgacccattgctttgaagagcgaggtcacattgtcaaaaagaatacagctcaccatgccagttttgatatagcactgggaactctgcaccctggtttctgggcaaagagagtccttttattataggtggcaacattatttccttgtaatttggtacatgggcttcttcaacttacgtggaaagcaagagatacaaatgtcattacatcttagtccctgtgaaagcctcttaaaatgttcaaagacatttgtaaaagaaggaagaaaaggaacccaagtgcaaaaacacgagtatcgatcctttgttttctgtctgcaactcattgctttctactctcacccttcctagctagcgctgatgtgtgtgtttggagagcataaaacaaattaattttccgaaggtcagaagggataattctccaccgtaatttgcacatgttaaacttgggggagcaggcactgacataagaggcacagcatctgatggtcttatcaaatcaatccatcttctgtctcttccaggggagtgctacgcacagcaggagggtggctgggcagtgcaaagccccggaatcccctgagcaagcagtgtttcagctggctggacagatcaaataacacttgggctggttaacaaaagacgcaagtgggaaggtgttggaagccggagtgtggaaatttacccaacgttatttctttgacagggaaggagacttggtctgaaagatgccacattcctgcagcctctcttggtgcagtggaatacagtcttgggcgaggtggcgtggatgagctggtgaaagaggatgctgcccacatccaaaggctccagaggatcctggcctggcagctgagctcccctgcatttggaacctcaggcgtaacttggtgtagagctcatgaaaggtgcttgtgtttctccagcttttttcaccagtgcttaccagactggctcaggttttggaatctaaggtgagctggtagaaacaggagaggtagaaagaagcccctggatgcctccagaattcattgatgggatccctgcatactgcttggaacacagaaagaggctgtgacacagctgagctttggagcatcttaaggagctcagctcagcaaacaactcttgcatttcagccagaaagagcctcttgtaacaaagtattcaaaggggagagtttctgcatcttttactttgcagtccactatggtagaaaacttgacattccatagataatgatactgggttttctttccaagatgccagctttaaaagaaatatg

SEQ ID NO: 19865 - DNA, 2300 bp, Homo sapien
tcttttaaggacatcatgttatagatatgcaaatatgttgcaatcaaattatcaaacttgccctctaatttccaaagaactgtactgtgacccagggccacataaggagaatcttagactcttgtgggcatcatgcgttgattttgatgcttcccaagtttgtgctgtgtctgggattctctaggggcagttagctgcatccaggccgtttatgagaagtgtttagtagagctgaggtcagcacagtgcaagtatcagaaaggctcctggatatcaattccagttctggccctgatgttctttgtagttttaagtcaaacaggaaaatttatctgcatattagttctcctatttaacagtagagaagatactatttctctgtcaaatatcttaaaacatgaatacaaagaaactttagacacaaggggttattaatagtttgttgtgtttctgttcatggggaggaggggatgtaaatttcagttctgattcacaaaggagattttgcagagaatctttacaatcatactttgggcttcctttctccagtctcctctgttcttcggataatcttattacctttttggtcattctaagcactacatggattagttcagtatatagattatggccgtataaacctcattctcgctcttggcagataacctaactctggttttactgaaaagattaaagctaatttggaagaattgaactcgcccattcctctcagttttgtgttgatgtatcttcatctctgtggctgcctcccagttgcaggcagaggcagccatctttcttcctcctccagagctaaccctttccctcgtgcccttgatgccccctccacctcttcctattaccactacttggcaccagccacatattagggctcccttgcaaccactttcaaacaaggccaggctttattccatttcaaaaagcacacaagaaaaccaaaatgcttttgcctgaccttgctgtctcttctagtctatttattgctttccttttgcagcaagacatctcaatttcctctttcctcatagccccttagttttgcagtctagcttcctttctctgtcactctattgaaattgtgtcctcaaatgtcacagtggttcccttgtaacttaatctgaagagggtggtgttttagcctcattcttcttattttctcagcagcatcgattttctttctgcctttttctttcatcttccactctgacatagttctctggtttatatttttctgtttatctcctgggttttctagaccagtccagtgcatagcatcatggctgagtccaagctcttacattagcctgcctgtagctgaattttaactgccacaaattaactgcatgacctttgtcaaggtaatctccctgtgcctcagtttctccagccttaaaatggagactatagtaggagtattaacctttggtttgatgtaacaattgaatgagatagtctatgtaatatttatcacaacatttggcacacagaagttttaattgaatgttatctattagcataacaataagtgcctctgtctttgaaaatataactgttcttttttcctttcaggacatattttctccctttatgacccaatgcagagcgagacgataactaattattgttaaatagatttatgcacgtgtttggagagtcagggaaggagggctgatgagagagagaggctcctaaattctgcaggtgctgtaattccccggttttaattttgctttgctttttaccaataaatcattttgagagcttaaatcgctcctttcgggacatacggtgtttcttgagcaggaagggacgtcaacggttaaagctcttgttgttggtgcaacaatcagccacgatgaggctgcttggcatggaacacagtgtcccatccttagattaaatgcgctctaacaggattatgtaaggaaggaggcagccacggcggcggctttgtgcaggggtcgcctggaacccgtccattgagtcatgccgccatctcgcggccgcatggggaacgggccttggcagggaggttttgtttggtgcagaggaaaggtccccagaattgccatctgcagaatttctgcagaaagtgtcgaccaggctggcatgagggaagaaggaggggaaatcacagcaaggagaaggaaaaacacctcagcatggcgtggggaagcaaaggtagcaagtcatgcttgtgccaccctacaatattcttgtcggtttcattccagaacaattccctcccctgcccaaatactctataaactttgactttc

SEQ ID NO: 19866 - DNA, 2300 bp, Homo sapien
tggccctgggtaaatcaatattaacagaacaactgagtcaaagggcatatgcggccaggcgtggtggctcatgcctgtacattgggaggccaaggcgtgtggatcatctgaggtcaggagtctgagatgaaactcaaactcaggagtttggcaaaagcctgtctctagtaaaaatataaaaattagccaggcatggtggcgcatgcctgtaatcccagctgctcaggagctacctaaaaaaaaaaaaaaaaaaagaaggcatatgcacatggacttttgataaactattgtcaactttccctgcaaaatgtttgtaccaagagagattgatttttgacagacaatagggcttgatttctaagatctaaaacatactgtgttgttttaagtcatggtcaacttttatttacctgaggttgtaagaaagaatgagaataggaatagccaaaagctacctccccaaaaattctcaatgagaaaatcaggtaatttgcatgttacctgttttcctttcctttctagggatgatctaatgcacaatcccttgaaggattggatgccggcaggagacaaaataatctgctctagttgcagggcacctgaaacctgcatagttggttcctgaacatatatatgttgataaaaatgtttgcttttgttcttttttttttttttttttttctgagacagagtgtcactctgttctccaggctggagtgcagtggcatgatcttggctcactgcaacctccacctactgggttcaagtgattctcccacctcagcctcaccagtagctgggactacaggtgcctgccaccacgccttgctaatttttgtatttttagtagagatgaggtttggccatgttggccaggctggtctcgaattcctgacctcaagtgatctgcccaccttggccgcccaaattgttgggattacaggtgagccactgcgcctggctgttcttttgttatttactggggaaattaaatgaacaataatgggaaaggtgcagtaatgctgtgatggagttgtggtgggaagctggtattatgggatcaaagacagactgttgtaatgtatctattgtggggtatataaaaaaaaggttctactcttagagtcttctccaatctctcaaggaagagtcaacagttccaataatggactggatctttatcacggcagcaggcctggtaaagcacttttgggcatgggtttattgttttattggtcacattgtgcctgacattacactcattgtcataaaacgcctacaggtttgtcgctttgtgggattcgactggattctactctaagtataaaattgagggacaagccgtggaatgttaagactatgagaggaaggaatatgttaagcaatgctcaaaacaaacttaaaatagaaacaaggcaggtgggggtgggggagggggcagagaagaaaacaagttgagaaaagatttttaaaaagtgggaggaaggaaggccatgggaataagaactctgcctttagaggtgaaaggcagaatccatagaatgactggctggacaaagcacaagaggaagccaaacatttagatcccaatcccatcaactagctttgggactttggggaagttccccactcactcttctccactcccccaaatttccctatatgtcaaagaagcacaagaatgacctttccaaggttgagaggagaaaatgacaaatagcctaagaacactttgaggtgttaagagcagaaatcataggcagtgttgtctgcaggattggtttgatgtctcgtggtgccgtttactgattttgttctcttccacaataaaacatgtgtagctttctcactgggccctcgcacaaataggaaatgtaatgtgagaatcttagaagtttgcaaaactgcatcatttagaatgtatcactagcaattatcaggggcagatagcagaggccttattacgtatttctctcttgtgataaaactctaatctggcctatgtttcatccttaaggacaaaatgtggcttattgttcactgcaagcttgtttaaaggacagagatgtttctagattgattcatattcacccttcatgaggatgagcacagagcaagaagctagccacgctgggctcctcattgcctagctcaggtaagacagcacagaacagtttcaggactcaactgattctgttagacactgtagttcaacacagttgatagactgctatagacttaaccagttcaactgaaaaatgtttacagaagttcataattaccttttggaagtaggggtg

SEQ ID NO: 19867 - DNA, 2300 bp, Homo sapien
actacaggcggccgccaccaagcccggctaattttttgtatttttagtagagacggggtttcactgagttagccaggatggaattctgttttcattaggaagcctttgaccaatcactgtaagtggctaaggggaaagaaattgttgtcagagcagaccagaaaacagcagtttctacctccttgacagtagcgggtatttaataaggaataaattgacttcaatgtaagcaaaataagttccctccatgatagctctctacaactttcaatctgggattattcgaatgtaggacaaactgtccttaaattctttaaattgacaaacaattgtatataattatggtcgggcgcgggtgactcatgtctgtaatcccagcactttgggaggccgaagcaagcagatcacttgaggccagaaattcgagactagcctgggaaacatggtgagaaaccccggctctactaaaaacacaaaaatcagctaggcatggtggcgggtgcctgtaatcccagctacttgggaggctaagtcaaaagaatcgcttgaacctgcaaggcggaggtttcggtgagtcaagatcacgccaccgcactccagcctgggcgacagagcaagactccatctcgaaagaaaaaaaatgtatatactttaatgcaatgggatacaatgtaatgtttcaatacattgtggaatgatcaaattaggctaatatatccatcaccttacatgcttatttctttttggtgagaatattttaaatctactctttcagccattgcgaaatatacattatgaactatagtcaccatgctgtgcgatatttctaaaacttactcctgaaactttttaccctttgaccaacatctccccattccccatctaccccccaacacccccacaactgtctttcaaagacaaaagaatttcacctctactaatgaagcatttatgtagaaagacactggtaatgtttagtttccttcatccaacctgctgcatcttgtaagttcctggcaagcagagttactttaggtcattcatatttataacctctccttgcctgcggtggttattatagcaaccacacctatggattatcacctaactggagtttcctcctcacaggccccacccttcaatgttcagagaggggcgattgccccagattttatttaattgtcagagtttaggagggagcaattcactcttccctacttccactccatcttctcaatcctacatttccatcacttttaattttattctgccttgcctctttttttatattttacatcttatttttgaaattgtcattaccatgccttgttttaagagtacacaagctcattatagtaaagagttttgggtgataacattttctgaaataagggtgaagaaatatcctcccatgtcacaaccgttgggagggcgggggtagggatgttggaaggcacggtccctgcggctttcaaggacaagacaattaagtgttccggtgcttttctgaggcagaacattgagcatctatttatggtgactgtgacagtggaggtgattggtaaattcaccgcaggccaataaccttgccagcagccatgaggagtggcaaagaattctgcagaagagcaagtcctaagcacacaaaacagctcggaaagtgaaagcgtcgctgaagtgcggaagcctcgcatttcctgggtcctcttcttccttcctttgccgtctcctgccctcccgttctcccccttcctctgtggctcaggcaggacagaccccaactcccagcttccctggcctccgcgggttcggagactgggacccccgggccaggagtgctggggggcgcggtcggccagccccggcttccttcatggagcggcggagctccacctcctcctccgcactgcacttctcacatcctcagcatcgcgtccacgaggccgcccgccccgcctcagaaccgtaacctccaggagctgggttgaggaaggcgcggaggacaggaaccccagcgccggcagctaagcctccagacggagcccgcccctccggccggttcctgcctccaattggcccgcgagcccgtccgtctccaccgtgggccacgccttccgggccccgcggctggccggctcctcgcgccctcccctctctcggccgctcttcgggccgcctctgcgtgtggggccgcccgcgccagtgtgagcctgagctgacggcggctccgggaggctcgcagaaggggagggccgggcggcgcgggagctgagcatcgccagggcgggcggcagggcgcg

SEQ ID NO: 19868 - DNA, 2300 bp, Homo sapien
ggaacaaatgcacagaacaagcttttgaagccagttttacagtggaaatatagaccaggaagaaagtggctaagaggtacagctgtgcttttcatggaaagtggacaagatcggcaccatgtccgagtctggcactacctcccactctggactgaaaccctaaagtgctgtaccttggattgggggtatagtttgcagcagcaatgggtgatttagaaaacctcaagcctctgttcgggactgccagtgcccacaagtgcccagcggaagcaaacaaaaatttctctgaaataagataatggcatcctagtcctcaaattatttttataaattttcaagtacaacctaagtagaaaaataaaaaaaaagataatgaggcacataaagagacataacaacagaagccaaaaccagcaaaaacaagaaaaacagacacactgaaaccctggatataccgtaaatgctatgaaacaaatatgcttattatgtttatagagataaaagccaatcttaaaaacttaagacaagtaccactaaattctagaattgaaaaatgtagtagtctataagaactgagtgagctgggtgtagtggctcatgcctgtaatcccagcactttgcgagaccaaggtggaagaattgcttgagcccaggagtttgagaccagccctggcaacgtagtgagacccccatctctataaaattaaaaaaaaaaaaaaaattagccaggcatagtggcatatgcctgtagtcctagctattcaggaggctgagatgggaagatcactcgagcttgggaggtcaaggctggagtgagtcatgattgggccactgcactccagcctgggtgacagagcaagaccctgtctcaaaaaaaaaaaaaaaaaaaaagagtgaatgaggcttatggcagattagaccagagagaattaatcaactggaaaatatctcagaagaagcaatccagaatgcagcacagagagaccaaaaagaaaaaaaaataggtaagggacatacatttcattgatagatctttaattgaagtcctagaagaaatgagaatgaagcagaggcaacatgtgccggcctcatggctgagttttttttttagaactggtgattgacaatcaatattcaaaaagctcacagaaacccatgtgggatgcataaaaagaaatctacatctaggaacattattgtgaggcttcagaatcaccacaaagagaagaatatgaaagcagtcagaacaaaaagatttccttcaaagaagcgaccgttagactgacagcagactcctcagtgacaataagataccaaggcagtggtaatgacctattaaagttgcttatgggaaatacttgccaacctagaattcattacacagtgaaaatatccttcaagaattaaagcaaaatgaagacatttttcagaaaaacaaaaaaccggggattcaccacctggcagactgtttttatattaaaggaaaggaaattttgttccttagggaaaaagaaaataatcccacatagaaaccctaaggtgtaggaaggaatgaaaagcaaagaaagttatgaataagtgggtgggtacaacaaaatgaatgttgtttatatagagtgaaacaaacatcacatgggattttgaaaaatatatatagagagaattaaaatgcacaacaacaatagctccgttaaatagagttaagctgttatgtgggacttacattgattgacaggaaggtaaattaaaaattataatgtggagctggggacattggctcacacccataatcccagcactttgggatgtcaagatgggaggatcacttgaggccaagagtttgagactagccctggcaacatagggagactctgtctctacacacacaaaaaaaatttaactagccaggtgtggtgacatgtgcctgtagtcccagctactccagacaccgaggacagatgatcacttgagcctaggagtttgaggttacagcaagctttggtcgtgccacagcactgtagcctgggcaatagagcgagaccctgtctcaaaaaaaaatttaatgtagaacgttggtggttaaagatgcatgatataaattttaggataaccattaaaacactacaaagacttcctgtttatggtaaggtaatgttgggatgaaatgaaacaacaaaaatccgaaaagcaagaaaaaagaggaaaaggaacataggcaagacaagatgagatgagagtgatgagactaaatgtttgggggctaaatctgccccaattacttgaaaaaaaaaaaactaaaa

SEQ ID NO: 19869 - DNA, 2300 bp, Homo sapien
ccagcaagcattattgcctgagctctgcctcctgtcaggtcagctggggcatcagattctcatagacctgtgacccctattgtgaactgcacatgggagggatctgggttgcatgcttcttatgagaatctaactaatgcctgatgatctgagatggaacagtttcatcccaaaactctatgcccaccccctgctcccaaggaaaagttatcttccatgaaactggtacctggtgccaaaaaggttggggactgttgtcctcgctgattgtgatcaagaccaagctgtagaatgctatgtgtcttcttaaggaacttttagctaggcaagtgtcaggagagataagtccaagttccagtgttcaatgctttgttaatttagaccccacttgaccaagtccattttattttttttatttccacattaattcaagtgtcatcatcctacaagattcagctcaaatcctacctcttcctcactcatctcttagctagtgatctccctttttccatatccttttaagtggattgtttcctgactgagtgtaggctccttaaaaccagggaccggcagggcacggtggctcgcgcctgtaatcccagcactttgggacactgaggcgggtggatcgcttgacctcaggagtttcacaccagcctgggcaacacagtgaaaccccatctttacaaaaaaaaaaaaaaaaaaatagctgggtgtggtggcttgcctgtagtgccagctacttgggaggttgtagtcctgtagtcccagctactgatacttgggaggccgaggtgggaggattggttgagtccaggaggaagaggttgcagtgagctgagatcgcgccactgcgctccaacctgggtgatagagtgagaccctgtcacaaacaaacaaacaaacaaaaacccaaaaccagggaccatgacaaatttttaaaatctctcagccccaaaaataatactatccacaaagtcagagctccattaatactggaataaaggttaaaagagcccaataagtagaagtagatgagttaatgatttttaaacaagtggcagtctctctgtcctggtagtttcaagaaacaccactccgattcctattttgaagctgctggatttttttttttttttttttttttttttttaacagagtctcgctctgtcgcccaggctggaatgcagtggtgcgatcttggctcaccgcaacctgcacctcctgggttcaagcgattctcatgcctcagcctcccgagtagctgggactacaggcgtgtgccaccatgaccggctaatttttttttttttttgtatttttagtagagacgaggtttgccatgttggccaggttggtctcgaactcctgagctcaggcaatccgctcgtcttggcctcccaaagtgatgggattacaggtgtgagccacggcgcccggccagctgctggatattttgaccacctcaagtacgctgagcacgaaatcagtgcatctggcagtacacaggagcttgaaatactttttttaaaagttgttattcaaactgaaggagtttttccctgtggtctgtaatcgccacgtgcccgttctgtatacagccagcctgggtttttcaatcccacgtccgctacctaagagaacaccaaggcttggagtgagtatggcacaatcagcttcagatgttaagcaaatattccaacctagagtaggaaaatggaatatggacggggctttatgaaggtgcatggtcaggcaaaggatcttagtggatgaaagacagtaaagattcatcccaaccaaagaccaaaaatgacacatatgtatgagcaaaacatcaggaagaacactcttatgtggaaaatattacacggaaaacaaaagaagagtaactttttcccttttggtttatcccgctctggtcctcagggcgatagctaccacctgacacacagcgacctgggaaagagggaaactcaatcactgccctcgcggcccggggggagcccggaagcgcgcccagagccaggtcccgcgcgggcgccaccgagcgcggacctccctcgcatcctagagcggccgcgcgggacccggccggcggcgcacttccgcccgggcgcattgtagccccgcggacagctgggccagggtgcgggcctgcgcctccctcggctcctggcgcgggcctcggggagagggtgagtgcggtagggcataccagaggggggcgggcgcgcttcctcgggactcgccggctcgatcaggcacggcccggcgctggggacctaagcctggggagc

SEQ ID NO: 19870 - DNA, 2300 bp, Homo sapien
gaagggaacctgaagggaaattctgagaagaggttgagcttacagggaatatcatttgcataaataaatacatggtgtggtagactctaaagaggccccatatgattcccacctcctggtgttcaagcttttgtgtgtttccttccccttcaatgtaggtggcgcctgtgatttgcttctggccagcaatgtatggcaaaggtgacagagtatgagtgatactgtgtatgtgatgatgttacataagattgaaaccagtgtcttgctgagactcttcccgttgctggcttcgaagaggcaagctgccatattgttagcttccctatggagagcaccacatggcaaggaacagagggggtctccagccaacagcctgcaaaggactaaggccctcagtcctgtagcctgcaaggaactgaatggtgccaacaaccacatgaacttggaagcagatcctttgttccagcctcactttgtagaggacccagctaagccatgcctggaatcctgactcagagaatctgtaagatcataaatgtttgttgttttaggcttctatatttgtggtgagattgttatacagcaataggtaactaatacagacggaatagaagaagtttagttataacaatgtctcaatttcttaaaaacttcttctgaggtatattacctaagattcacatattgatctgttaccaaatcatgttttgtaatctatcagctgacagatcttccttcagttttgttgacagaaaagatttgaaaactatctgacttgaaaaataatttaatatccattcactaaggtcatttactttctcagcatagataccgatttttgaattgtcccttttggattgctggggaggttctgcattgatcccatgcaccttagtagtgggtgagaattttgactttcttctgtaaggtgggaggacagttttgaaaggggatgctgtgtcctcagctcctttctcaagctgggcaagtttagaaaatagaatatatagcaatggaagatgtggaaatgaattcccttaaaactggtctccataaaccccaggggtaagagaacaccagtttggagctttaggggctttctggtcaaagagggaatggcccaggcggtgatgtggaggatagaatgaagcactgagtatgagtggcgaaggcgtacggtgggtgtagagattttctgggcgacgtgacctaagaaatgactttagaactggctaatcattggttttggagggactaaaagtagttcctggttggtgaaaataaatcattaatgcgttttaaatgaaaaagaaatgcatgcgtcttgtaaaaaatgtgaaataaaagaggcataaagtcaaaagcagagcctatgccttcccccaccaaacaaacaggtaacctagttaacaggtgtgtcgtaggattcgaagttcgcctccagctccgagagtgcgcctacatctcttccaacaaaatccactcacacttgcaacgcctggcaaggctcttcaatatgtgattccttgactgtcctgtgcgtctctcgagtgtaaacacctctggggctcgtgattcggggctgccagaaagagaaggaaggtgccgccagcgtctgtttcttcccgaagtgaactcctacaacctagccaccttctccccagagctgtcgactggctgttgaaggccaatttttgtgcctacgcaggtcctcaacacagaacaaaacaaaaaaacaacaaaggccgggctaatagctatttataaacacttactggacgcccactctacgccgagctctcccgcgctccttggatacttttttgcaacgagatgccaatttccccggcgaccactccctcaaacaggccttcgcctccgcccgcgctgaggcccaggcccaggtccagattcagagccgcccgccggctggcgctgccctgtaggcgcctgcgcagagcgaccctccccgtcactcggagcgggaggcgggggcagccgggagaaaggaaagctgcgggggaaaagggccaaaccctgaaattacccggatgtggtccccgcgcgcgcatgctcagtggcttctcgacaagttggcagcaacaacacggccctggtcgtcgtcgccgctgcggtaacggagcggtttgggtggcggagcctgcgttcgcgccttcccgctctcctcgggaggcccttcctgctctcccctaggctccgcggccgcccagggggtgggagcgggtgaggggagccaggcgcccagcgagagaggccccccgccgcagggcggcccggga

SEQ ID NO: 19871 - DNA, 2300 bp, Homo sapien
cgtgagatcacctgagcaatactgtgggaagagtgtctagggaggaggaaacggggattcattttcttaaaaagcaccaaagagctgggcgaggtggctcacgcctgtaatgccagcactttgggagggcgaggcgggcgtatcacttgaggtcaggagttcgagaccagcctggccaacatggtgaaaccccgtctctactaaaaatacaaaagttagctgggcgtggtggcacgtgcctgtaatcccagctactcgggaggctgagacaggagaaactcttttttttttttttttttttttgagacgcagtttcgctctgtcgcccaggctggagtgcagtggcatgatcttggctcactgcaacctccacctcccgggttcaagcgattctcctgcctccgcctcccgagtagttgggattacaggcgtgcgccaccatgcccggctaatttctgtatttttagtagagacggggtttcaccatgttgatcaggctggtctcgaactcctgacctgacctcgtgatccgcccgcctgagcctctcaaagtgctggcattacaggcgtgagccactgcaaggggaagctcttgagcccgggaggcggaggttgcagtgagccaagatcgcaccactgcactccagcctgggcgacagagctggactccgtttaaaaaaaaaaaacaaaaaaccccgaagagctaaacttcagcacctccaggctgctgatgtaaccatcctgccggcagagaagccgggccagcggggcgtgggaggagcattcccgagtccgagagggaaggcccgggagccacgcggctcaggaaaccgcccccgcgaggggataggaggatactgcgtggcccctccttccgtgactcttcttaaggcccttcctctgaagggggcgatctcttcctcaacccaaggaaacaatgctctcgaacctatgcctgcagctctgctccaggccgctcacacagtgccttccctaaaagaactcagccacatgggctacagggatgaagggttggggggaaacaaatccaggtgtgcgcttcgaccgcacgcgcctgcgccaaaaccccgcttggcccttagtttcagcctctgctgcagcgccttcgtccgcctcctttttcccgcccccgccggggacgtcacaaagagtgacgtgtaaagtgaacaatcacagtccctctccgcgcgtgccgggaggaatgagagggaggtgggcggggagaggacggaaggagtaggcttcgggaactggctggtcccggtcacccaatcagagagctctggggaggggaggggcggggcccgaaggagggtggggggtggggctggggaaaggagttggaaggctgcgggaggagaaggcgggctcccagagattaaaagcacccaatcagagcgcgccggcttcattcggagagcggcgtggggcgtagccgccgccgccgcgcgcgccgggggctggttaaggccatgaaacaaaagaaacactgagaggggagccgctgccacctccaccagcccgccccgccgccgtccccacccacccacctagttacctacctctgcctccttcccctgcccctccaccccgccctctccggtctccgggcggccctggcgctcctcggcccgggtccccagccccgccgcctccccagaggaaaggtgtttgcgagctgagcagggccctggccctgtccgccatggggctcgccgcctgccgcgcctgacccggccgccgccgccgccattgacagcgcgccgccgcgatgcccagcggcagctccgcggccctggccctggcggcggccccggcccccctgccgcagccgcccccgccgccgccgccgccaccgccgcctctgccgccgccctcgggcggcccggagctcgagggggacgggctcctgctgagggagcgcttggccgcgctaggcctcgacgaccccagcccggcggagcccggcgccccggcgcttcgggccccggcagcggcggcgcagggccaggcccggcgggcggcggagctgtctccagaggagcgggctccgcccggccggcccggggccccggaggcggccgagctggagctggaagaggacgaggaggagggggaggaagcggagctggacggagacctgctggaggaggaggagctggaggaagcagaggaggaggaccggtcgtcgctgctgctgctgtcgccgcccgcggccaccgcctctcagacccagcagatcccgggcgggtccctggggtctgtgctgctgccagccg

SEQ ID NO: 19872 - DNA, 2300 bp, Homo sapien
tcctgagtagctgggattacaggtacctgccaccatgcctggttaatttttgtatttttagtagagatggggttttaccatgttggccagtctggtctcaaacttctgacctcaagtgatccacactcctgggcctcccaaagtgctgggattacagatgtgagcttccacgcatggcccagcctcctgccttcttctctccacccttcagggtttcctcatttatatatatattccagagattttagctatactaaatggaaggaaaggggaaattggtgtttacatgatataaagagtatttactttttttggagtcaaattttttttttttttttttgctttcattgtcatgcttcccctcctaagaaccacataaatatttatctatttttaatgcttttgtagtttcatcttttatatttgtctttaagcaagtgtttatcacagtctggcttatagactgtagtttcttggtccacctaagaactactgaatcagaatctctgggagtctctctttttacaaactctccaggtcattaaatatcaaccaacatttgagatccacttcttcatccattcaaaaaaattttttggtgtaagttgtaaggcaggcctctcacctatttttttttccctaagtggttagtcaattgccttaaaaccatttattaaattattctatttccttcgctgacttaaaatgctaccatgataaaatattaagtttatatatataaatataaatatttgggtctgtttccagatgttccattttgcatcattgatctgtctgaccattctggcgccagtaacttactctctttaattgctgtaactctagtctgggtagatttctgaatgttgccctgcaccagcctctaaaagcctcataagaaaccatttgccaggagagaagtagatgactcatatgtgaagatgctttgtaaattgcaaagcgctctggcctttcagcctacccttgacactagcacttcctaaaacactgatctcatcccttcccttcctgactctaaagccttactcagaagatgaagctcattatcctggcattcaaggtctttccttcaccacctggtccccatatcccccttttcaaaatgaccgtccacttgtcttcaatacaatcctctttaatcaggtttgcctgtgatctgtttttcaagacttgcctgacacatttcttgcattcgatcttattgttttctctaccatgaagtacattctttaaaattacttaccgtcctccaaggccaatctccttccagaaagctttttatctgaattttccagctttcctcgtagcatccactttacacttagcatacattgagctatgacagctctcctctgatgcaattacttttgttatttgtgttttctggagtgtgtatatcatttcactcaacagtagtgtaatattcttacccacagaggctttgccttctccttctttgtgtgtacctgcatttcccctagtaaagtgtgacacacacagcagacattcactcaatgtatgtttactggctaaataaagaaagggtactattagatctcaatgaaagtctgtgattgttttgtattgctcaaacccagacagaggattggtcatcttgcttcatctattttcaggtatgtgttcagttcagagaaaaatcataggtaaatgttgtgttctgagataatcactgctttatactaatcagctagacaatgatctcatgggatacaatggtcctgtgcagagatgtagaaacccaggaatttcttcttcacatccttgcaaaaatcgccctgcagctcagaatgctctctataagacaggatagagattgttttaggatgctattgtcttccctgcccacagtcccctcagagggggaacttactcacagaaagcccttgttgtctcagctgctgttctttttatcacttgattcagtttctccctggccacagctgattggacttaaccatagcagctgattggacttaccgtaccagcacagagataagctgagccaatcagggtcttgcttgggtgaatagaaatgaagaaacacaaaagaaagctgccaattggatatgggtattgtagctgaaacgtcttgcgagctgagtcagggtcggggaagctgtgatggcaatgagaagtcaacacactgaggatggagagaaagaagatgagtctgggagagaaagagaatgattcttctggccgagggaaagcaagaatatctgttcctgcaactgcactgattctagaaacactctcta

SEQ ID NO: 19873 - DNA, 2300 bp, Homo sapien
ggggtaaccaaagagtttcatccaattctaaagaatccatccatgtaagctatttcagaaggttttgctttagtgaacacaggcacttcatattttaacttttccaggacaggaaggaatgggcatgactagggatctaaaacactgttgtccagttccagcatcataggagtttccctgatgatgattttatcctggatttttcatgctttccctcacgcctttcttcttaaatagatgttcacattctctctgctcacagcctggtgagcatgggagggtgacaagaacaggtggggaagaatctagtaaggaatggtctgaatccacagctgaacatctccttaaacgacagaattttaccagaatgacatttctattcattatccttcccggccaaattaattggtttgtaagttcacttattctgcagaaacgtattggcatgtgcagaattccaagttctatgctagcatctgtgaggagtgcaaaaatggatggcatacaacctctctcttctcaaaggagcttgagttcccgcagcagagacaagttatgcaaaggaactcagcttaaaacagtttcctgaaagggctttactgttcacccttcctaagtttcctgctgtgtgtgtgcttgtgtgtgtgtgcacacacacgcgtgtgtatggttgcttcactttatctgccagggactggagaaatgtctctcttgttttcccagagcaccccctccattacgtgaaccatcatatttatcacgatactttataattatccatttagcttctctcctgacggatcacaaaccccttgaggatagagactgagtctcactggatgtcccaactatttcctgggagccaacagaacacctggaacatgataagtgcttttaaatatgttaaagaaaacaattgcgagagaagagagaacacagacgacatgagacgtcctacaaaaggaggccccttagctattatgtcaggaaataactctggcctttgtcctgtccgctgtgtgtttcaggatctcgatttccctcccgtcctagaagggagttggatcaggtgattctttccaaatgaaaaattgtattttaaataatgccaagggcagagaaggaagtaaacatcctggccacctcctccgccttaaacgcccgcctaggttttacagtcaaataccaataatttcctgaaggctgagtgtcaaacacggtcgctgcaaaacctccagacgctcaggatgttcgcaggctccattgacaaaagtgacttcccacgctttgcccacagagggcatccctgcgcattgatacgcagaccaggcaaatgcagctcctggaagcctcctcggtccgctcttttttccctaagccatagtctgtctgcccccacccccttcccgtggaatctttgcctgatccagttcgtttccctccggtctccacattttcccttccagccctccacttctccggatcaatgtgtagtacggttccaactcccagctcgcacaccgctggcggacaccccagtaacaagtgagagcgctccaccccgcagtcccccccgcctctcctccctgggtcccctcggctctcggaagaaaaaccaacagcatctccagctctcgcgcggaattgtctcttcaactttacccaaccgacgacaaggaaccagcctcaaccttttaatgcacagcccggccacaggattgccttccatctcctcttggtccctcctggatgtggtttattgatgacttgcgagcccctcagagagctgtcttccctcctctggctccctccgtttccttgagttagttttctaaggttttaccggggctcgggatctcttggaccgaatggaactttttgctgcctgcttttgctgctgattctgtcagtggacaaggaaaaaggcttcgaaggcagcagaggcgcaggggaggtggagaaagaggtggaggaagaggacgaggaggaggaggaagccgaaggggctcggcgcgtgtgtgtgcatgtgtgcatgcgtgtgtgagtgcatgtgtgtgagtgctgccgctgcccgcgacccctggccccgaaggtgttggctgaaatatggagaatagtcttagatgtgtttgggtacccaagctggcttttgtactcttcggagcttccttgttcagcgcgcatcttcaagtaaccggtaagtggctctttcctttcttctcgtcgcacccccttccgtaccccacttcccttctcatttcatttggcgagtagtagaattggggtgggggatagcaaga

SEQ ID NO: 19874 - DNA, 2300 bp, Homo sapien
tgatagccaccagtgtggatgatgagaacacaggttcactcctgaactcctttcaaagcaccaaccacataagaaaaatcattacactctcaaaagtaacaacgccaaaacaaagtctcaaagattgagcagataattccatggaggcctattcagagcacctccttccattatagtcaatttacttccatatgatgtttatttctctgtcagatatttatagccctaataccaaaagtccattgaacatcagccattgatacagtaacataaagcagatttatatattcagcttgtctaatactctgttgggaaaggaaggcattgctcaacataatagcctccattcttaagagattttccttttaaaatgttgtcttataaatacaagatgagttgaaacttgtgtgctctaaatattttaagggatttatgtttgcattaactgaccttttaatcaaacttcagtgcattgctaccactgcagaggtttcaggaagaaaaatattacttgcggttttcaaagttaaaagttttccagtagaaaggaaatctaaaaagttcttaaaagatgacattatgaacatattgtcagacttgttattatttgtagaaaatattcctacattaaattatagtgtggatttaaaaaaacttccttattactttatcttgaatactttctaagaaagtactgtatatttgcatgtctgcatttgtgtgttgttaaaaatatgtaatatcttacctgcctggcctctatttgcatattttatttttatttgatgtatttcagtttctaaaatattggcagagtcttcaagaactagaacatctggggctgggcatggtggctcaaacctgtaatgcaggcactttgggaggctaaggtgggcagatgacttgagcccaggagttcaagaccagcctgggcaagatatctaaaaaaaaaaaaaaaaagaaaccctgtatctacaaaaacctgtatctacaaaaaaatagaaaaaattaaccaggtttggtaatgcacacctatagtcccagatactcaggaggctgaagaaggaggatcgtttgagcctgggaaatcgaggcggcagtgagcagtgattgcgccaccgcactccatcctgggcaacagagtgagagcctgttaaaaataaaataaaataaagcctggcatacattatagttggatcttactccattgatcatttcctcccttgtgattcattctttcttcctatccactgcactttcccctcaactagaaacctattttctgtattccccaaataacatagtcctcaattttgcaccattttctctttctcttcacctccagacttcttgagggaatagctcatacgttggttccactttctcagcatccatttattcctcaacccattataatctgaacccagtctccaaccactgcctgcaatctctcttcctccagtccgtaataacaaaacatattaatggcattttgtttattttgttggctttgtccatgcattgagtcataggtaagcaaatttgggagaacatagatattgtcatatatagtgttttcaaaattaagcaatgaaactttcttaaatgctgttcagatgcccaatatagacatggggctgacataactgaactgagatggggctacattgtactaattagaaatctatttgaatgccagttttaaaaattcctgacttataaaggctttaaaagcaaggaaatcatttctgtaattgtacaacaagattgagttaggttgccactgttagtggtttagcttctgttcttgaactggtaatgaaaatggtgatgcagccataagcactgggtccacttttcaaagcaaaaagctggtagaagataagaaaggagtggagagtcactctacttgacctcattaattaccaggaaagcaaaacctttcctagaagtccttcctgcagtcagcccctcaaatgcagaagaactcagttggctgcccctagctccaaggcagcctgacagagaacaggcttgtcataatgggccagatgagttgtgattcattgcttgggtacagaagaactctgaacaagatcaaggttctatcagtgataaataagggaggctaaggtattgaggaaccatataatgttatttacactacctactttctaatctgcctcatctactcaccttcctctttctcttcctgtaatcttattgcatggaagaaatttttggtgaagacaagttgtctgtttttcttaaaatcatttttttagctagtggtatgtctc

SEQ ID NO: 19875 - DNA, 2300 bp, Homo sapien
tagttcccacatgagaaaatgcaatatttgtctgtgcctggcttatttcatttgacataatgtcctccaattccatccatgttattacaaatgacaaaatttccttctcttttatagataaataatattctattgtgtatatgtgccacatattctttatccatttatctgctaatggatacttaggttgattccatgccttagctattgtgaatggtgctgcaataaacacaggaaagcagatgcctgtaacatacttattttatttcttttagatatatacctagtagtgggattgcagataatatatttctatttttagttttttgaggaatcaccatactgttctccatggtggctatactaataatatacattcccaccaagagtgtatgagggttcccctttctccataccctctagtattttaaattattttgatatttgaggctcagctcattacccttcctccatgaagtccttctttaagcgtcccagaaagaaaacaatatctaatgttctcattctctgaatcttattgggcattagcccatgttccttgtattggtaatttattattttatgtacattagctcatttcacaactagatcataactttattgaatcattaacgcctttgacaaccattcactaagcaacaactctgacactgaactacatggtacagttacaaaagtgagtaagaaaaacaattgtcttctagaagttcacagcactgtcaaagaagcagtggtttgtatactgctttgtgtccccaggacacaaagttaaattatgaaaatggtaagtgatatcaatagtataaaataacatatagacttctcaaatggcaagagattcaattctttataaaattgacagtccttcattattcacttccctgaagaatttgaagcaatgacttctaagtcctcttaagattctgaagattctttttgccatggtatgctaaccagtctcactcatctcggcaaagcttcatcttaacagagaaccatcttgatttttacttggagtagttccaagaaaagaaatactctccactctccttcaactcaaatgggcatttgagttagttccatgtctttgctattgtaaatagtgctgcaataaacatacttgtgcatgtgtctttatagtagaatgatttatattcctttgagtacatacccagtaatgggattgctgagtcaaaaggtatttctggttctagatccttgaggaattcccacactgtcttctacaatggttgaactaatttacattgcctccaacagtgtaaaagcattcctatttctccacagcctcaccagcatctattgtttcttaactttttaataatcgccattctgactggtgtaagatggtatctcattgtggttttgatttgcatttctctaatgatcagtgatgttgagctttttctcatacatttgtttcaaagggaacacttccagcttttgctcattcaatacaatattggctgtttgtcataaatagcttttattttgagatatgttgcatcagtacctagtttattgatggtttttaacatgaaggaatgttggattttatcaaaggccttttctgcatctactgaaataatcatgtggtttttgtcactggttctgtttatgtgatggattatgtttattgatttgcatatgttgaaccagccttgcatcccagggatgaagcagacttgatcgtggtggataagttttttgatgtgctgctggattcagttcgccagtattttgttgaggattttcacattgatgttcatcagggatattggcctgaaattttatttttttgttgtgtctcttcaaggttttggtattgagatgatgctggcttcataaaatgagataggaaggagtcccttcttttcagttttttggaatagtttcaaaaggaatgataccagctcctctttgtaccactagtagaattcagcagtgaatccatctggtcctgagctatttctggttggtaggcaattactgcctaaatttcagcacgtgttattggtctattcagggatttgacttcttccttgtttagtcttgcaagggtgtatgtgtccaggaacttatccatttcttctagatcttctagtttatttacgtagattgtttgcagtattctatgttagtttataatttctgtggggtcagtggtgatatcccctttaccatttggtattgtgtctacatgattcttttttcttattagcctagttagcagtctatatattttgtcaatttttttcaaa

SEQ ID NO: 19876 - DNA, 2300 bp, Homo sapien
ctgggatttagcaaatggaatctggtagtagaagttaaaataatgacccgaaaatcctgtgatttatttctttaagcatgcttttatatccaatatatcatttgatctacagccttattagcacagcatgaaaaggtagaattttccaaaagcatacctgttcccatctgttgtctcaactacctgtctcaattaccgtttctactgagatttttgctcatgtttaccctttactttcaattatgtgtgaaaatcagagtactctcttatgtcatacaaactttaatatcatttttttcctttattccttcagtggaaccttaagtattggcattcctcaagattcagttcttgatcctctttccttttattattaaccacgcaagcccttccttggagagcttacttacttccagggcctccttcaactgtcactttcacaaatgactttttttttttgagacggagtctcgctcggttgccaggctggagtgcagtagcgggatctcgactcactgcaatctccgcctcccgtgttcaagcgattctcttgcctcagcctcccgagtagctgggattacaggcgcacgccagcacgcccagctaatttttgtattttaatagagatggggtttgaccatgttggccagaatggtctctatctctagacctcgtgatccgccggcctcggcctcccaaagtgctgggattacagaagtaagccaccgcgcccggccacaaatgacttctttttttttttttgagacagagtctcgctctgtctgccaggctggagtgcagtggcgtgatccagttcactgcaagctccgcctcccgggttcacgccattctcctgcctcagcctccggagcagctgggactacgggcgcccgccaccacgcccagccaattttctgcatttttagtagagacggagtttcatcgtgttagccaggctggtcttgaactcctgacctcaggtgatctgcccgcctctgcctcccaaagtgttgggattacaggcgtgagccaccgcgcccggcccacagatgacttctaaatgaatgtctccagtactgatctcctcagaactcatttcttgatgattttttacattcacatttctaaatttcttgtaggaaaccacaaattagtgtctttcaactaaaggacattaaaagaagactaaggtcaggtttagagacagacaagtttgtgtgtatgagttaatgtttgcatatactgcaaagataaaccaaattaattttagatttttgttgctttatattaatcaactttttctatacgttaaacttggtcctcagtttttagggcatatgagtatagaaacccaagatagcttatcatcaggctgataacatgtgctttacatttttcaatcttccaaatatttcataatatattatcttgaatatcaatagcacacttctataagtgttcgacaacttatagaaaatatgcatttctaaaattcaagttggcagaccgaaaagaataccacacagtttcctaaaggcttgtgacagtaagttaggctggactttcaacataatggaatatttaccaaataaaaggccactgatttttgtattagacaaagacatctggaaatttctagatggatttagggattctggtcattctaaggagaatctagaggtaagccccatctgactcatgggcatattccaagttatcatttcctttcctacatccttacaaggttccaggagaatctgtcaatggctctgaagccaggctcaggagggaactggtattcagcgaatgggacactttgcttcattccttcattataagctcccctgcaagctttgtgcagaggggcgggaaaaggggctatcacccccttaaatgaatagccgagttggtatgtaatataagatctattttgcttgttattcattaattgggaagcaaacataggtaaaatcacataatggtggaggttaccccgtttgaaacaaactaaccacagtcactatgacacccccagctggtggctagcccgaccaaccttcccagctccgcgcgcccagtgggggccggaaaagcgcgggagggggcgtggccccgagaaggcggagacaagatggccgcccatagcgcttggaggacctaagaggcggtggccggggccacgccccgggcaggagggccgctctgtgcgcgcccgctctatgatgcttgcgcgcgtcccccgcgcgccgcgctgcgggcggggcgggtctccgggattccaagggctcggttacggaaga

SEQ ID NO: 19877 - DNA, 2300 bp, Homo sapien
agaggttgcagtgagcccagatcgcaccactgcactccaacctgggagacagactgagactctgtctcaaaataaataaataaataactaaataaaatgaaaaaccaccaaacaactatctagacttatcaaacagctttcacaaagatagcagcctagctctctgaacaggtaatttataacctagatagcagactttgaaagaactggtccagacatctaagaattaaatatgcaaagaggaagattttgtttccaaaccactgagacccagctctgcttgttattcccttttcttcatggatgcatcaacatatcctttaaagcaggggtccccagtccccaggccatggaccagaaccagtccctggcctgttaagaaccatgccgcatagcaggaggtgagtagcgggcccgggagtgcagcttcatctgtattcacagccactctccactactggcatgactgcctgagcactgcttcttgtcagatcagcagcggcattagattctcacaggagcctgaacgctactgtgaactcgcatgcgagggatctaggttgcatgcttcttatgagaatctaatgcctgatgatctatcactatctcccatcaccccagatgggacagtctagttgcaggaaaacacgctcagggctcccactgattctacctcattatctattaaaatgtaataataatagaaataaagtgcacaacaaatgtaacgcacttggatcatcccaaaaccatccccctcccttctgtctgtggaaaaattgtcttccatgaaaccagcccctggtgccaaaaaggttgggaatggctgctttaaagggtttctcaaggttctaatattttatttgataagaagtagaatcatataaaaaaccaaacatatgtgttaatttgggtatttatacagatatagtgtatatacatacatacaggcatggaggaatttccaaatttcctctattgtaaaacatacacatacacacaccaacacacacatgcacacatggtatcctaatagaaggcaaggagaatagacatttactgagcacttcctatgtgccacatgttttatatacattaggatattacagtatatggtagcttttatccattcattcaatctcaatacttttttttttttttaagagtagagcaactgaggctcacagcagttatgtaacctgcccaaagtcacacagcatgatggagggtctggattggagattttgtctgactacaacactcatgtatcaaatcctattcagttttgatgttaaaaattctgtggttgaattcgtcacagtgtctttaaataaaacaacaacaaacaaaacacagcaaaccttaacatagttgctaatcatatgagtttacaaggccacctgtgtctttactatcagttacactccttcccaccccatcacattaatcactcaggtctagggatttgcaagtttgctaacagccgaatggaacaaagacaaaacgctaaaatttgtgatgtgggcctaactccaaagccttcaagaaaaaaaaaaaaaggccaggcgcagtggctcatgcctgtgatctcaacactttgggaggcctaggagggtggatcacctgaggacaggagttcgaaaccagcctgaccaacatggtgaaacctcgtctctactaaatacaaaaaaattagctgggcgtgatggcgcatgcctgttaatcccagctacttgggaggctgaggcaggagaatcgcttgaatccgggaggcagaggttgcagtgagccggtattgcgtcactgttgcccactccagcctgagcaacaagaacgaaactccgtctcaaaaaaaaaaaaaatagccatttgtgctttcaatctctccgcttccggcctccacccggcgggaaaaaactcccgcacgtgggcctccacgattccttggcatgcgtgtcactctgggcaacaggctggtcggccacgactgcgcaggcgagaggcacagagcgactggagactgtagtcccccggtttccctggagaccaggcggaagcggccggaagtagcgctgcggttggcagcggcgggatggagaagctgggggtggagccggaggaggaaggcggcggcgacgacgacgaggaagacgccgaggcctgggccatggaactggcggacgtgggggcggcagccagctcgcagggtgcgccgcagccagaggagccagcggcctccttgggtgtaaatgagaagggtggggcaggcggacgctcggggcggcggccactggggcgcg

SEQ ID NO: 19878 - DNA, 2300 bp, Homo sapien
aactgagttcctttaaaatagtttcttaaagattctttttataaacagtatcttttaaagttttttgtactatatttttctttcatcttggggcatatatgtagcaaatgtttcctaatgaagacaaagtatagataaaggacactgagaagatataaagaaaattatcaaatatattgacctaattcatggatcaaaataattctacttctgccttgtttcctcacaggttaagagatatggagatttccacaaggatttggagaggagccccagtagttactaaaattctgcattagatctgtcaggaaaggtaaagaaaccaggactctgctaggaaagaggaggttataataatggtttactaaaacttttcaaatatagagactatcaactacctgttgtgccttgctggagaattaaataagagaaaatagatttatgatccaacctgaagagttttaagtgagagctaaggaagaaatgttccaataattaaactttaagaaggtttatttaagtgcttaaggaagcagatctttggagagttttttaaatgatggatttatatgtgtccatttttttaaagagaaactaactattttgataacctagtatagggctccacactgtttaaagcatttttacatatattaactcaactaatccttataatgattcggtgagatagatattattatccccattctatagatatggaagttgaagttcaaaggttaagcaatttatccaaaataatatagctgtactaagtgacaaagtcaggatttgaatccagttctgttttcaccttacctgccagcttcccctaactgaaagctggatgatgacccgaaggaccagtgagactgcagcttccggaactcattcacagcagtaatagttatgtctagtatcttactcaactgttgttgctacatctaccacagtgcctgtctcagtccttttgggctgccataagaaattaccaaagactgaatgacttgtaaacaataaatttatttctcagagttctggatcctggaagtctgagatctgggtgccagcatggttaggttctggtgagggccctcttctggttgcagactgctaacttctggcagtgtcctcacatggaagaaggggccattgagctccctggggtctcttttgtgagggcactaatcccattcataagggctttgccctcatgacctaatcatctcctaatatcaccctgggagttaggatttcaacatatgaattttagggagacataaacattcagtccattgcagtttctaacttcaagcagggttcaatgtgtttaaattgagttgatttaaacttgatcctatctgaggaggtgacatttaagcaaagatacctatgaaacagtcagttatatgaacacattgcagaagacagtgacaagcagaaggaacagcaagtacaaagaacctgaagtcagaaattgctttattgtatgtgaggaacagccaggagatcaaatgattggagctaagtggacaagaagaagactggtaggaggtatatttgaagaggaagccaggggtcagatcgtgtagtgccactgctacgcactttaaataatcctcaagaacacataaccaacagctcataatgcttcacaagacaaaggacgtgtgattaaactgttagaaattaaaattatttattgaatgactatcgcatgccaggcactggatagaaccttaagcatatcatctcatctaatcctcacgctaattctacaagacatatattatcctaattttaccttgagagaaatggaaaaacagaaatattaagtaacatgcttcacacaataggtggcagagacaagatatgacccaggtttctgatttcaaagtctagatttttccactataccacagtttctcatttgaaagactgtaaggagagaggggttcatgcatacatgcattcatcaagtaattatgttcatttctatgtgacaggcattatagaaataatattaaaatgtaagatagcactttttaagtttttatatggttatattcttaccagttgtttgtttttaaaacttgcagatagatggacttcaaggcaattgcccaacaaactgcccaagaagttttaggttataatcgagatacatcaggctggaaagtggttaaaacttcagtaagaaaataagttaaattatgtttcaagactttgtttttaagtaagaaacaattcattgtaaagacttttttaaaaaaatattttctgttccaggtgcagtggtgtgc

SEQ ID NO: 19879 - DNA, 2300 bp, Homo sapien
tacaaaaatttaagtttttaagcttacgtcactaacaattaacaaggattgttaatccccgaccagggctcgtcttagcatataaaacaccgttcttgatttcctattggaaacctacttgatattaattgatctagagactttgaagattattgggacataccactagcagggtatgtcttattttcaaatcaccaactattactgccacaatagacctgtgtttaaccactaaactgaacgttatagcttccggactttttcatttgctaagagaaaagggaaggtaaaatttagtaggctacaaagggtaaaaagaagaaagtgcaaacagtaagactacaattgtattacatggtggtggaacgtcggatgagctggaacatattcagatggactcatggtcaaggatatcttcactcatagggtcagtggaaaataaacataaaccaacattgggatggcctctttttttgatacaccaattggttgaaactggattccttccagacttacagacaggttcacacatgttagtgagtctttacatctgtttgtacaatgaccctctttctgagctgcctgactgggtccccaatccgtgcggggtcactgccattcttccctgggaatcaaggcttcctaggagtttgttaaatcccatccctggctaaactcgggtctccaatctcccatctgctttgtgtgtgagaggctccggggtgtgagaggaaaggcactgaagagggagtgaaagaagtggtgaggggggactgcctactagctgagacgatatcttatttttggcgggggatgctctggaagcggggaggctgaactcacttggaaaaactggagctgtggggcagactctcagcgaccggaacgacagccgccagcgcccttaagtctccctccccacccagtcccctcccgcagaccccggggccggctgaagggagatcagcaagtccccgcgcaaactggccgagaatagctgtgacggaggttggaagggcgtggggggcagcgacttggatgcagcccacatccccccattcccagccccagaaaggagggagaaacagcaccttccagcaggggtcgcgacctaacgctcaacagcatcctctcttctccggccgctccctcatctccgctcgcgcccggcgccccactgccgcgcatgcgcaccgcaggccggcgccatgttggggcggtttgaaagcgagcgcgggtgtcgagctctgctgtgactgcggaggaagctgcgagtgagccgagcctgaggcggggcggtgtccgggttggggatgctttgtggtgtctcgcgttgggtaacaggcctgagctttcggcggagagctgtggaagtgtgcggtttttgtttttgttttcctttatttttattttggggccttaggggtgagttaggacggaaaggagggtgtcttttcgagggttgtcccatcctgtgacagccgagaaaaggcgaaaggagagtggcgaggaaagaggaggagacgtctcctgagggagggcgcttgtggagtctctgtggaaggaagaacactgtagggggagtgccccctgggcgagggagggtcgcgggacgcggcggagggggctcacacgggcgtctgcggacctgaggcggcgacaggaaggggcttgcgctctggggctgtcgcttcggaacacttctccttcagtccattgctgcgctcgccctggctgctgaataaatggtttcggagtgaaaagcatctcactgaagaacttgtctgtgtctgtgactgacgggcggtggaacaccaaagggagggtgtcgcctgattgggactggaaaaattggaattcagggcgcccggggtaggggaacgatgcgcactgctggagacgggcgaccttcgctggccggtcggtgggttcctggttttctgctgccgagtaaacaaacgttccctttcctaacttagcagtcacagagctatttccaagagttgttcttaatttcctgtgcgatattcccattggctatttaacactgaacattctgtttttgaatcaaagttagttaaaatttgttgtcaataagtttaacattctgttcttccgcgtgatggattttcttttggagattcgaactgaagcctgtacggaggaaatggtaagatatatgggatttgcatgagatatgtggggttcaaaataatcctgtggctgaagtggggagaagtgggtgggtccctacccactttagctacaattggggtctgttcagcgattgttggaagcag

SEQ ID NO: 19880 - DNA, 2300 bp, Homo sapien
gccctggctgctgaataaatggtttcggagtgaaaagcatctcactgaagaacttgtctgtgtctgtgactgacgggcggtggaacaccaaagggagggtgtcgcctgattgggactggaaaaattggaattcagggcgcccggggtaggggaacgatgcgcactgctggagacgggcgaccttcgctggccggtcggtgggttcctggttttctgctgccgagtaaacaaacgttccctttcctaacttagcagtcacagagctatttccaagagttgttcttaatttcctgtgcgatattcccattggctatttaacactgaacattctgtttttgaatcaaagttagttaaaatttgttgtcaataagtttaacattctgttcttccgcgtgatggattttcttttggagattcgaactgaagcctgtacggaggaaatggtaagatatatgggatttgcatgagatatgtggggttcaaaataatcctgtggctgaagtggggagaagtgggtgggtccctacccactttagctacaattggggtctgttcagcgattgttggaagcaggatgatgagtacataggggtttattgaacgattctacttttgtatactcttttggggaaaagttggaaaacttttcataatgaaacttaaattgtgcattttctttttgtctgtcctgtgagttgaaataactagtaaatgttatcacccacttacggagaccaatacaacagctttctctttcaaggttttgtaaaataaaatcagtagcctgttcggcattcaaagacagaaaacatttggtcaggcttatccaaacaaatttacttgagtgagtttaaacttctttaaataaaagggatacgaaaaaggtaaagctggcttagtttagccattcgtcagagatataccagtattacagaattcagataaatcaatgagacgaaacaactgttaccttatgttctgccatttgcactgaccacggtcagatctcttgtaatggccattgcatgctctaacgctgtggtaggatgatgttttactttgtctcttatttaattagaaaactttcgatgttttaaagccaaatttaatagttactaagattacattaaaagttgttataacaaatatttctaaaattatagccaaaaattaaacattataacatcatagcatatgttaagtcctcaacattaatacttttttagtataggaaatccattcatttaattttaaaaagaatgtcatcatggactgaattagtgccggttcgttctgtgatttcttaggttttcaaatatacatcctgttactgtactgaggtagacagggattctctcaattttaataatggaaaaacagaagaacacattgagttgattttcacattatttaagcttcctttgaaagaggtgagctgaatccatttaacataagaattgaaaatagggagggtggtaccaaaaacgaaggtcaggaaatgattaactattttaggaaaagtgtatattgctaactcattccagaataagacctgcagtttatttacagttaaatgttgtaaatgtactagcatttataacattgaaagtgaatattctccattgttcttgttttgaatacttcatttgatggctttaaaaaatttattgagcgctattatctgcagcacatggtagtaggcttatgatttgaaaaatatgatgtataggggaatattaggtattgtgatgtcatagaatatatcaccataagagaaaagaggttcataagtagtttttaggactttttaagaagtgagtactctctccttggtattttccatgtatattctcagataatttttgtatacatacttccagccacatagtaggtactcaaaaaatgttttctaaatcattgatgaaggaattcacaataataaatataacaaaaatctacaattcctaacaaggagtgtctgttatagataatggattttattatttaaagaaaattacaaaaggtttacatatttagtaattttgtttgtgtatggtcacttttaattggcatcttaacatttcgtttttgtattacagttgtttttaagggaaatgaatagaaacaatccactttgaagaagccatggcgaaatcaaagacaaaacatagactttgttctcaggaatcttcagtatctgccctgctggcaagctgcaccctgagtggtagtaattcctctaattctgatggctcgtttcactataaagataagctgtacagatctgcttctcaagctct

SEQ ID NO: 19881 - DNA, 2300 bp, Homo sapien
tggttaattctcacttcctctcactatcctgcctacctgctgctcctcaccagctcctctgagctgaattcatcacagccttcttcagtcctgccttagttcccatcattgttccatatccaaacctgactcaggtacgagttctatgagctgctccagcttcgtgagctctcgtcttttaccaccccattctccatccacagtgaggtggatgaaaggagccaagtcctaactttgaactctgagactgcttggtttgcactgcccactgtacaccgagcctggctactgcagccctgaacagggctatgatgttccactgctgagcccttgcaccccactccgttcctaggttgagttgaccccaatctcgggtccagatctgataacctagttatggttctggaccttatgaatcccagtttctctatttgccccatcttttaaacctgacattttctgagagtttcattctgagctctgattctaataagcagtctatctgccacaattttttcatgaggcctggatccctgccttaatctttttgtgttcatccctgaaaactgtagtcccactgatggataaacctcagctccaaaagctggggccttgatgttcacaaaaataaggcccacacagctgattgccgatcctcatactctgtgaacgtcctaacatttgtctcatgcttggacagaacttggagggtcagcaaggatgatgagacatgtctccaccctgggagttgctaaattctgtgttatttagaaacctgaattccagccatctctgttttcatgggctggtctaattccaggtggcagcaccaccctggccatgcttccagtaaatatccatacctccctgatgaatcttgatacatgtcatcagaatctctaaaggtgccaaagttgtatgatcttgacagtgaattcaagctctgagttgtctttcccttttccccccatccttcttagggctcagtgtggtacacactagacactaataaatggccacagacaagaaacgaatggttatcttgagagccacacactctaatcttgagtttgtaaaaggtcactgaaagcatacatgtgtcatcagaaaagtggggatactactacttaattcttgtaggtattacaaagattagctttgagcagtgtggtacaccaattggaagggacataaacgtttctataatgtcagtaatactatggtaaaatcaaatctatgtcagagattgcctaagggtagcaccttttcctgtgatccagcaattaaagctattcttttcttcttttttcaaatatactttattttttagagtagttttagattcacatcaaaattgagtaaaaggtacagagaggaaaaatatgttttgatggtccctgccacatgcatagcctcccccatcatcaacatttcccatcagaatggtatattttttcacaattgatgaagctatattttcttctcattcacagttttaaaatggcagtcatgagagtcagtttactatttcaagtcttttatgaaatagttttccagcacgatgagaataaggagggacgtaactgtctttaaaaaattgtaaaattttacacaaatgagtgtgatagcgcacaactggagttcctgctacttgggatgcggaggtgggagggttgcttgagcccaggagttcatgtccagcctgggcaacacagcgaggtcctggctataaaaaaaatgtaaagtttctacaaacccatcatacctcatgtgaaaagcttgagttaaatatgtttcataattcaaatttttttaaattttatgaaatatggtacatatattgcatattacacaacacgtgttagtagcctgaaacacacattaatattttttgtaattgaacatataaataaccatgctaagattattaaagacccaaaatgttcttgtttatattaatttttactgccaaataaatttatgccaaacatacaaattaattttcagtttgcaaagccttttggatttctgaaattgtgtatcagggattgtatatccatattctgaagaaaaaatagtttattttgggtctctccatataggaggatcagggtgtaagtcagccagagagacaaggaaaattttggatctataggagaaagaactttcaaacagcaaaagtcacccaaaaatggaataccaacttctaggtaagtcatgaattcctagtcgctgtgctcaaacacaggtgaattatacagttgccttttattctgtagaagttgttatatatttatcat

SEQ ID NO: 19882 - DNA, 2300 bp, Homo sapien
cagtagaccaaagaaataataatcagagcatatcaaaatttcaggtaagaaaatttttgagtaagatgattttaaaaaatcaactttgacctaggctttgagacaacagccaattcacttctttattggatgactgaaaaacagcctcctccccttgccgccttagagtggaaaaaatggccagctatcagagttctctcaaacacatgtcagccaacaagactttcagatttctttttggttataaatcctgctcagaacaaagatcctttattggcgactctgagaaggtaatgagaggtatccatgctgtctgtcatgctaacaatccaggtgtgctctgctttttctgttaaggtttagattgaggcattcaaagaattgttcataatacatggtgaagaaatattctttgcaaaataaaaatctgactttcacatggtatatttagctatagaacaatgtgttgtctcatttttatgttactattccttttgattttaaattttaaaattttctcccaaattttgtggctgagtcatgtaactgcttggccggttagagatggtgagggtgagactccagtgacaagaataatcttccactctttatgccattgatgtaatgtgtggatgccatcaatagtaatggagtttcacttccactgtggctatgtggctctactgccaaatgaaatgtttttgcagaataaaattgtagtaatattttaaaaatatacaattaatatatattattggtttaattatattcttctgattttcaaatgaatcaaaaaatcaatcaaaaagtctttcaaaagtcatttttaatattattgacaccttcaacccatgttggtcccttgtaccccatggctgtttgctttgcttcaagaagagtaaatctttatgtttttctttgtgtttcactttttaaattgtggtaaaatacatataacacaaagttcattatcttaatcattttaagtatacagttaagagtattaaatacattcacaatattctgcaaccatcactgccacccatttccagatctctttttatcatcccaaactgaaattgtgtattcattaaacaataactccccatttccgcctcctcccagcccctggcaaccaacattctactttctgtctctatgattttgactattctaggtatgttatataagtgaaatttacagtatttgtcttttttgtgatgacttatttcaattagcacaatgtcctcaaggttcatctgtgttgtagcaaatcatcgtattttaaactcctctttagaacaattttttttcccagtttttcaattccttgacagctttccatgttctttatattctacagcttgagggtaaaacttacaagctgaaggtattgaatacatttataagagaaatttcaaagattaaactttaaaaatattcagaatccaaaagtgtcatatacaaagagaataggaatttttttttattatggaactttctgcactacaaacatacctggcacacttttgaaacagtattctcacttgttgagtgaataaaccaatacaagaattgatcattttacaatttaagacaaactagattttttgaccaaaataaaaaaaccctcttcttaaagattttcaatattccatcactcctttgacattattgcctaggaaattgattctaatagtttttaatgagtgtgaattgcttgagcaactgaccaaagagacttccagacaccaacccagggactgaaaaggtgaagtgtccctaaggtcatgggtacctaagaggtggtgccaacaaggggagagaggcttttgtgcttgagtagaaagcaagcaatgatacatttctatctcagaacgtttttctggggtcggtcctaaaataaaaggtgagttcctgaatgatgggactaaagaggagagacggaacaataatgtaaggttttcagagggagtagtcacaaaagctttcagaggaagtactggttttcttgcgtctttctgcagttaacatttcatttcctcctctaaggtggatcctgttttagtgaataattagtatttagtttaatccacacttgtactgatgcatcatagttgacttccaccagtgttttaattgtttcatggttgcagatataaagggcaatgaacaaattgaaaaatattcttggagagaagcttgtgatactggcagctcaagaatggacagaaagcatggaaaatacatattgaacgttgagcactctgaaaaccagccggtgagtgtccttgctccat

SEQ ID NO: 19883 - DNA, 2300 bp, Homo sapien
tcatggagtggccaagcaacatttctcttatgtcttcctactctttctcttccttggaacccctcttcccagggaaggaaatgttccaccactctctggtagtgtcactatgtaacactactgaatctgagccttggaacctcggagacaggaccatatgtggcaagtcactccaggagagctatccctgcaagagttggccctataaagcaggtgacacacttatctagggaaaggtggcaaggagagtcatcaataaatgtgtgtgtcagattttcttatggcaggaaccttttctagaagttgcagtgaggtagtacaacacagtgaccactgtgagctcggcattcaggatcaatagacctgtcttccaccttttgaacttcatcactttggacagatttactgcgactttctcaacctcagttacctcattctgaaaatggagacaataaatataatagacgccttgcctatttcacagtaatgttgtgaaagccaaatgagatgaaactctattgcatacaggaaataatagctattaggactaatgtcagtagtgaacacatgaactagataaagaatatgggttatcattgtatagcacagagggtgattttaagtcaatgtgttaacagtggaaaagattcaaggctcttatgttctttcttttatttctgtctgggcccatggacacacacttcttatatacttagatattgctgttaaatgcaaagtagatttatcataaatatagattccaagcatacatactttgaaaatctacaggctgagcctcaaagacttttatgcagtagatccaaaataatttttaggaactggatcttacttggggagaatggaatagattgttaccaaaattataagtatagccaacacattcatagaacttactgtgccaggcacgttctacacacattactgatatgaagtcaattcttcacaataacactatgaagacattattattactcttcttttcaactttcaagaacattgaaggacataaaatagaacttctttaatagtttcataatagaatagacagatttctatgagaccaaaatgttttctctaatattccatttttccactagtttgctattgtttgttttgtgttttggtttgggctattcctttgctcccttctacaagaaattctctgggagctgataacagcagtgcctcccagattgtctctagggcatcgaataagaaacaagttaagtaattaaaattcaagcagtcattggcatctcgttgtttactaacatgaatgcaagacacaggtttggaacttttaaattttgttcacagaggagtaaatcggttgttattataatgtacctaaccttgtattcttacctttactaccagtctgtaaattagggatgtctgaatgtgtctaaaatggaatcccaagatgggcagccaggatctttgctttgtggacgaatctaatgtgtttagaacacggcatagcacatagtaggtgcttaacaaatactggttcaatgcctccgtgtgctcattatcttacttagtggtaacctattgatctctgaagtgactttaggaagtgaattagggctttgggaagtgaatttggatgttgcatactgattaatgcattcatacgaacacatcctaacttttaaaatattaatttctttccaacgccctcttttatttcccgaggccatcctctgctccccactcgcaatccctcgccttcactcctcatagttaatgagacaccccctcggaggagagaacgcaatgtcagggccccagttctcacagcgccctgggctctttgaatgagagacatcaaagaaaacacagaacaaaaatgaataaaaatgagctcgctggtaaggctagaagccccacagtgtggagacttcatccccgagaggagtgtgtttctcactgcagcagttgagtcaccagcaagacttgcctgaggtgagctccgcacatccgcgttgggacttgcagacacgccttcttctcacacaaaccttacccagccccgccgccgcggcggactccgagggtggtgccaccagccctgccactcgcagtcctgacgggcaggggctgcggaccgcccggccttggacccatccggagccacaggttggaggagataagtagctgtccccgtgctcatcgccctgtggagcagatcctgtctccttgctgacggtggagcccgggagttccagggcttgggaaggggaaggaaacctctctgaaatctgacacctgctctc

SEQ ID NO: 19884 - DNA, 2300 bp, Homo sapien
actcctatcaccactccatttcttcccatagattatatcaatgctctactaacgacattttaatgattagacatcactcgtaaggtaatgcacaaactccttacaaagctggcaaggctctgcaggaagtgatctttgttcatctatccaacttcatccctttgactacccacagacatgctgatcttcttttagttcttagaaagttcactctgctcccctgggctttcacacatgctggtctttctgtgggttacttagtcttagtgcttccttttcttcctaccccttcgttgagcctggatagcactcactcatacattgtgcatgagcaaatacataatggtatcagaggaaataacacttcccgaaggggccttcccaacactgcatgtgggctatgcgctcctcctggtgggcctgcctatgtctttgttttcctgttagtatcctaaggctccattgcgattgtttattcatccaaattctaccctagactgtaagctctaaggggaagggagctgtgtttctaacttgctatccatcatattttcatggctcagaacctggtatttgctcactaaatatttgtgaagttaaacagtgcaagtgaaagaaagaaacagtaaaagatatacaattattaaatattttaaatgactgcaacagagaatgatacttttcataccaaaagatgggagaagagatattttcactgctatttatttccaaagtaggatttgtctgtagggcatcatcatgatctaaaactgtagagcagaaataccaaaaaaatttattcaattttttcttgtggatttgtttctaccattccttggaagcccacagagattatagtgctttgattgaataattctccctctttggaaactagctgtacccacaaaattgtctcctacttgaccataattgtgtcatgccaggaaaactgctctttgttctctccttaagtgtgtgtgtctcatttgagaacaaaactgtgtgttattccctctcattgcccagagcgtatgacaaagttactcaaaaacatgcttgctgtagtgatctgtttggggcaaacaatttctcctccccagcaggatggataggacacgcttgttccagagcagtaacagacatcttgctctattctgtccagtatctttgatatcccccatttcccccacggggagacaagtaattcatttccagcctcccccacccatctcattctgtctattgagtcagcagggtggaggaaccagtgaaaccatgttccaaagagttacagaaaccaatgatgaacagaaattgagtttgcaggatggcagataaagaaggaaataacttgctgaaacactgaaactccctctgcttataagataagagaactggctgaaatcgactggaaccgatatggccgactggaatctgtacagaatgagcttgctaatgtcacagcctgaatttctaccacatgtttcatactaactccccttgaatttccacacgtgacccctgagatagaatgcagagataactgcccacgtccaaggactttccagccctcccctttagaacccacccctgccacaactttttctaataaaactactacttcaaaaagccagaacaaaaagacagatttgagcttgaccctcctgtctccctgcaagtcgatttgcaataaaacctttctttttctcaaaatccagtgtcatagtattggcttctagcgcattgagtgatgagccccttttgctccagaacactaggatcacagaagaaacagaccccaaagctacattatcactcctccccctcactgggaatgaagtctgtgccttgtatcctttaagtttccttaagggccatgtgttttctcttccttcccatgatgtgacttctatcaatacccattatcttacatggattgcacagccagatgtccttaggcacagggctgaggtgtgaggcattgtttatcttgttgcttagttacaccttatatatacacagaatgcaaaattctcaagtgatgaataacccaagtgttctgaagcctgccctgagtattccccatttcccccatacagcagctgccttcaggggacagacagagaaggctgccatcatgcaaggctgacatatcatgtgcgaggacatatgggaaccacattttctcatattacttcttcaaaaatgaattaaagtgctctgtaaaacatacatctttgtgacaacaaaactgacatatgaacagagattcttgtgaggaatggcttcagaggaaccag

SEQ ID NO: 19885 - DNA, 2300 bp, Homo sapien
ctaaatgcagtgtggtatcctggctgggatcctgaaagggaaaggcgttagccaaaaagctagtgacagctacatcaagtctggagtagtgttaatagtggcagatcaatgttaatgtcttttaaaaaatatttttagtagaaatgaggtctcgctatgttgcccaggctggtctcgaactcctgagctcaagcgatcctcccgcctgccttggcctctcaaaatgctgagattaccaaggcgtgagccaccgcacctggcccaatgtgaatttcttagttttgacaaatgtgccacagttatggaagctgtaggcattaggagacaccgactgaggggtatatagacgactctctctactatctttgcaactttttttaagttccaaaagaaagttttttaaaaaaacaacaaaattgcacttgtactccataaatttatactaaaaacaataaaatcaaaaattatttaaaaaacaaaaacaaaagtttataaacttagggtgcaaatagaaccttcttgaaaagcagcggccgatcccctccccccacccgcctgtacagcaccctagcgaggggcgtgaggggcagagcctggctctccagcgctgggcgtacgcgtcctgccgcgactcctccccggggcctcaccggcgccggactctgccctgggcgcgccccgcggggcggagccaagcctgcgggcggtggcggctgcactcgcagggccctggcagccgaccctggccccaaggtccgatcgcccaggggaggagcagcaccgggaccccgcgtcggctgggcgccccacaaggtaggcgagtctggccaccttcgggcccggtccctgcggcgcgcccccgcatcccctccatgtgtgtgggtgtccaggtgcctttccagcggcttccccagtggagttcctggcatcaaggacatttcctgtaaaagggtccttgttgaagaggtaatcctccctggaaacctcggttctgggctcgaatttcctgggcgagaagtttcttccccattgggaagagctgcttttccgcagagaggaacccctacttagtccggcgcacacctgattatttatttaggttgttgttatacaatccgtttgtcaggggtccccgcgatttctgcctgctaatttcagaggctatggagaaaagtcctgcggtaaacgccctgacctaggaactccagcgtggtggctttgacaggtcactgcgctcgcattttttaaagagcagagatgaatgaaggtggctgtcttcattcatttgtgcgggcttctgcagccgcaggtgtagtaaaaagagcagcccattgcttgaccttttccttaatgttgagtagcatcatgatattttagatgtggaagttacagagtgctaggcggctagacaaaggaacactcttatcttactgaaggttagtacgggaccgtgcaagtgtagtttttagattggatgataacatagctgtgaattttcagcctttttggaagtgaagacaaaattgaatataaggatcagaacaagcaacaagccctgaacataactgaaggtgtacctgctccccattatattctgattgttttattttaggaatcaaaacctcttttactttcttggtgtatatagttcggatgaagtgtcagaatacaaaaaggaattattctgtgtttgtgatagggaggagataatctgttcttttgattttacctaatgccattaaatattcagagctactgaagtctggttttcctgatatgtgagctgggcaggagtgtcaggtaccctggcagacacaattggtgctgttgttatgcttttcccccgctgcccactctcttccccaccccactcccaatttgagagggaaggcccctgacacagaggaatttctgcccaaggcagggagtatccccgtgtggttcctcaaatgtttgcagaaagaatgaaaacaactacacttcttgggacccaggccaacgtcataaggccgacgtcataagaaggttctttcctcttgttatttacaaaataaattgatcccttgtcctaactagaaagagacttttgaaattaatactgttgctattttgtgaattactgataggcatgttatttgttagcttatttgtttacagtatgctcaacattgaaggtgagttgtaatccaaattttggccaaagctaaaaaatgtaagctagatttagacaaacctgaaaaatgaggtgtttatttgcttggaataatgactgaaaggggaaataactgaagattttgatg

SEQ ID NO: 19886 - DNA, 2300 bp, Homo sapien
caccacgttggggattaggatttcattatataaacttttaggggggaacacaaatcattcagtccatagcagatatggtgagtcttaggtatgaaatgttttcctttaactcttacttttctaactttgttaaaaatagttgaaagatagaaaatgagttagctctgcagttctggagtactcactggtacttcaccgcatcctgtgtttacccagctcaacccaagctaatggagaagtagatttccttctccaggaagggtcaaggccaggaagagaggtggacaggtctcagaaagcaggcagtgtcaaatgctgagcaaaagccaagctcagaaggaggaaatgtggtgtttatggaaccaacttgcaaatgcaaacatgagcaaaccaaagcaatgtaacaaatgatcctcaacagctgggtttcttcaatgctgaaacttgtaataaacatccatggctatctttggaacacgatttgtctgtaaacatacatacatctatttactagaaccacaaggattagttaacaaaaaaattacctaagaaccatcaactttcacttctccaattgggtcacaatctacaagttaatctgctaggaaaaaaaaaaaataacattcctctctaactgtggtgggaatcagtaatcataggattcccaggaagattctgaaaagcccttggatattgaaggatttgggttgcagttttctcaatctgttagatgttgagggggggcggaggaaatacaccttttttttttccccacaatcctaaaagtttatgaactttcagagagacacaggagccaacctgaaagagttcccagtggtcaaagctggaaccatttgagcaacaaaattaataatgtagtattgaattctagcccaaagtataaaataaatatacatgggtccatactgacataacaaatactgacataaatgattgaataaacaagagagatggaacaaatcttccttacagaatcattctaaataataacatatagatactccctgctctgggatggagtttaatcttgccctcatcttgagtgtcagctgaattgagtcatgccattcatgccattcagagtagagtgtatggaaagagaaaaacagctttgcagtagagaaacctggcagacacaaccttaactatgggatcaaggtcaagtcaccagtgataagtcacctggccatcgtgccatcgtccctgagaggatgcagtggggaaggcacttcatctctgagtctttcctccccccagtctcatcatgagaaaaaaacagtagacaatacccacatgagtgggtgtcgaggtacccccacaaaactataccttaccagaatacttcatcacaatactttactagaattctttacagctgtcaaagtcaagaaaagacagagaaactgtcatggattagaggagacaaagggcacaggatgctaaatgcagtgtggtatcctggctgggatcctgaaagggaaaggcgttagccaaaaagctagtgacagctacatcaagtctggagtagtgttaatagtggcagatcaatgttaatgtcttttaaaaaatatttttagtagaaatgaggtctcgctatgttgcccaggctggtctcgaactcctgagctcaagcgatcctcccgcctgccttggcctctcaaaatgctgagattaccaaggcgtgagccaccgcacctggcccaatgtgaatttcttagttttgacaaatgtgccacagttatggaagctgtaggcattaggagacaccgactgaggggtatatagacgactctctctactatctttgcaactttttttaagttccaaaagaaagttttttaaaaaaacaacaaaattgcacttgtactccataaatttatactaaaaacaataaaatcaaaaattatttaaaaaacaaaaacaaaagtttataaacttagggtgcaaatagaaccttcttgaaaagcagcggccgatcccctccccccacccgcctgtacagcaccctagcgaggggcgtgaggggcagagcctggctctccagcgctgggcgtacgcgtcctgccgcgactcctccccggggcctcaccggcgccggactctgccctgggcgcgccccgcggggcggagccaagcctgcgggcggtggcggctgcactcgcagggccctggcagccgaccctggccccaaggtccgatcgcccaggggaggagcagcaccgggaccccgcgtcggctgggcgccccacaaggtaggcgagtctggccaccttcgggcc

SEQ ID NO: 19887 - DNA, 2300 bp, Homo sapien
ccttgagagtcccagtcattcctttcttcacctgagtgcattagcagatggcttcagagagcctccagaaaaggatcacctgtaacccacctcgggcgtttgtttgggatgatgttatagagtgagtgcttgtgcccccctgtattcatatgttgaaattctaacctctaattgggatggtagttggaggtggggcctttgggaagtgataaattaatgagggtggtgccctcatgaatgggattagttcccttataaaagaggccctagaaagcactattgccctctttttaaccatgtgaggacacagtgagtagagagcaatctgcaacctggaagaggaccttaatgctggcaccttgatattgaactttcagactccaggactgtgagaaataaacttctgttgtttataagccaaccagtctatggtacttagttacagcagcaagaactaaccaagatagattataagtgacatggggagacactggccaaaaggacagatggctcttagagtgagtgttgctgatggatcatgagagtcacccccaacccccgaccatcagaacaagccctgataggaaatgcagagtgggtgtgtgcacatatttgtagtccatcgtggctggtaaatagtcccaacttatttccagggatgtgagttaaacaaaatggcaaacactacatggaaacgagagggactgattgtgcataatatttatcacctctttaaataagttaattttctttaccatccttgcaatgtatttcattcaaagattattaaattttgtgtgtttgcctcacaaatgacctgtaagtcgtaagtgtttatatccaaattttttggaaaaaaaaatcatctcagggtcacctgcttggagaaaagtcaaatctccaggtaatttttgaaaagtcatgttctaactcagtatttttatttctcaaataacttattcaaatgtttctctgatttgttcaaaattgataattttatgttttaaatgtctcagggtctataaatgctaaccttaaaaaaactaacttgctgtaactgtggatattttctttggagcatggggatcattgtagggacaaatactggaatgagtctaattatatccaaaccactccactaaatcgctgctgaaagcacaagccaacgataccgtacatccgagttcaggaaatccatacccttagtttgctgagattggctgaggacaaaagaaaagcctgaacctatggatccaatgtgtatctcctcaaaatgaactgtatctctagagattctccatcagctctgtgtgggtttgtatttttctctaccagatgagaagctgtgttaagaatgaaagtagaaaaacatctatttttctttgcgacatctttcttttgtttccattttatccaataccatctggaaaacatgaagagatatactgtatgtgatatatgaacacgttcagcatcattgttgagatggagagggagtttaaagtgcagtaaaggaaaaattataggctgagcttgtagatcgtaacaagctaatgataggactatcagccagttcagagtattccctaaaactgtacactgtatgtgtattcagtgatttttgctttattatttgttggattttaggatttatatatgtatgttattgaaaatatagaaagatgccatagtaattaaagtcaggctggatttatcattcttagagaatttgtaaagaaatgaatatgttataggcagttgacttggagattatgctagctccataacttacatctgagatcttccaagctcatattatgttaacacaagtcactcctagggcttgaatgaaaaatgcatgattgtactacaacgctgtgttattgtggcatttctcctcagttagtaagactttttctcttccaagtgtacttataatgggcttggtaataaaaaccaacaaatttcttggaaattgttttctaatggtgacagtttgaatattacagaacaataaatatttagttgtctctatgccatatagccacttcagtgagtgtgactcactctttgaaagattacatccttcttgggcttttggtgtttgtctcctgggatgctgtggggttgaccctggatagcattcacggtcattagctcatggtgttcttgggagacatttgaagtcagctggtgtcctgctgatggagctgctgagttcagcatcacatcgacataatttcatgatgcgtttgcatgaagggctttggtgccatttctgagtgaggtaagcacttttg

SEQ ID NO: 19888 - DNA, 2300 bp, Homo sapien
ttttccctttctgcccccctgtatcagtatgggcacaccctgcactctaactttaatctacgtcaccctcacctgtttggtttgggtttaatgtctgcgagaaaaccaaatatcttgtgtattgtgaactgtcaaagccatctaaaccaatcccaaggtcaagtggatataaaaattctgccaaaaacatggcataagatggaaaagttccctgaaaactctggaagaaaacaaagtaatgtagacaccttctttttccccacaccattagaaaatgttgcatcccttttgtcccacagcaataatgacgatgaggacctgacaccagagcagaaggcagagcgtgagaaggagcggaggatggccaacaatgcccgagagcgtctgcgggtccgtgacatcaacgaggctttcaaagagctcggccgcatggtgcagctccacctcaagagtgacaagccccagaccaagctcctgatcctccaccaggcggtggccgtcatcctcagtctggagcagcaagtccgaggtcagtgcaggccagcctccttgcagagctcgtgaggagcttgtggcaggcacaagctgagatgggcacgccagtcttgagcagtggcagacagtagactttcaagcatcattccaaagaattgtttccattgcagactgtgtctaaatccataaggcagcatccctttctcctgtaattaagttgtgggattctcttataactaagattatattgcaactttccctatatcctttcagtaatttgagcttagtttatttgctttaccaacctttgcttactgtaaagtggctgtacacactcacatgcagttcaccttttactagtgactgaccaaatggattgccacagtacttagtaactgttccttttgttctgtaatataaacactgagaaaaaggtcagacacgcaagaagagtgcattgctgccctctgccagaagcctcagcattaaacaaaggttctgtgctttaatcctccacagaaaggaatctgaatccgaaagctgcgtgtctgaaaagaagggaggaagagaaggtgtcctcagagcctccccctctctccttggccggcccacaccctggaatgggagacgcatcgaatcacatgggacagatgtaaaagggcaagtttgttttcagccatttctgagatcgatcattcaaaactctcatcagtgtatcagccataaaagtgaatttcacccaaattgacagatattttctttcatggaaaaagaattttttttaaaaaaagcatactttttctgttacaaatatattaatgaattttttctctcttttttcctttctcaggtccaagttgccacattgcttcattaaaacaagagaccacttccttaacagctgtattatcttaaacccacataaacacttctccttaacccccatttttgtaatataagacaagtctgagtagttatgaatcgcagacgcaagaggtttcagcattcccaattatcaaaaaacagaaaaacaaaaaaaagaaagaaaaaagtgcaacttgagggacgactttctttaacatatcattcagaatgtgcaaagcagtatgtacaggctgagacacagcccagagactgaacggcaatctttccacactgtggaacaatgcatttgtgcctaaacttcttttggaaaaaaaaaatataattaatttgtaagtctgaaaaaaaaatatttaatttaaaaaaaattgtaaacttgcaataatgaaaaagtgtacttctgaagaaaactacatgaacgtttttgttggtattcaagtcagctagtgtttataattactggatattgaattaggggaagctcggctgccctagtaacaaaaccagcaaacgtcctgatgacaacgaagtgatgacattagccattccttagggtaggaggaacagatggatcttatagacctatgacaaatatatatataaatatatatataaatatatattaaaaatttagtgactatggtaagcttttgttcatttgtttcagacttttttctcctgtaaaaaaatagtactgattaacttttttaaaagaaagattttactgtaaatatggatttttttttttttggtcttatttctgtccctttccctggtttgttatcgtaacctgtagtgccaactctgcttccagaggggtagtgcaggatgaaatgctgaccctgatgttgcttctcattcataaataagtagaaagttgtttctccagtcttttgggaacacaggacttaaaagtcacatca

SEQ ID NO: 19889 - DNA, 2300 bp, Homo sapien
aggacaagaaattagatgacgacaagaaggatatcaaatcaattactaggtcaagatctaggtaacagtatataatactgtcgcttcatttaattcctttattggactttgatgaagtgaacagaacgggaagaaactattcagttttttcctggcaggtaaatttacagctgaaaagaaaattaaaggcctactctagaagtactaaaagtatcgtttcagatacctgtactctattggagcctaaactgttttggcatttatgaatctggacccaatgctaatgacacacagtgaaaaaatttgtctctgattcaagtacagtttatttgtaaaactatacttattctacaaatttggtcagaaatgttgtgtctataatatttctaaaaagagattgtagccatgttaaaaactcaactgatgtatgtgccaactataactcttttcttacctctaaagtaagaaaataatttcctagatttatcctaaacatgctgatgtatataagagtaataccttaattgtttatggtttttcttcctggacactcttttctacagaaaacacaactgcaggaaaatagcttctgtctggttttcttaaatatctgctatctttaaattcaaatctatatctccttgaactttaatctggtaatcagatggtttttgaataccaacacccgtgtactttgcctcaattccctgaggttgtttttattcacaaattcaaccaattgtcctaagactacagctttccttctaaaggctgtggttctcaaggttctatctggaatcttttgtgaattaagaacatgctgcctctttatgttgctgttgtaattattgagataaattccgtgtcttgccacaagtttaaaaatgccgaatacttctagataacccctttccttccttgttgtctttttctgattcttggccactttggcaagaaatcccaaggaggggatttcatacctttagcagcttctgtgttagaccagtcagttcttggtaatttaacttattgtggccaaacttatgcatgttaatggattctttgaagttttggaacaacattttcattcgctgttgagaaccttcttatttaaaaaggtcactcttatgacatttacttatgtatgcctccaaaactgtattataaggcagtgctttttcaaatctaggcagttttatttgcataactagtttatttgtaagtgaataaccaattctaattggtcgttagcctgaaaatctttggaagaaaagttcctattttccagtctcctttgtgtaaggtgtagcatttgttggatgtataaaaatatcacccaaatgctcagcttccggacaggcctggcagagactgttttcatttgctttttacagcctatttgcatagtagaatataggagtgaattaatcattactgatttccttggcactggcagcagttgggggtgagggcagaggagggatccgcagaaggcagagaaagagggccttttccagtggactcagttgacttccatgtttaccatacacacctgtggcagacagtgccatctggaaaggcgcttacgctatggagagagaggagcctggtcttacagcatccttctgtggtgtcatcctccttgcccctaacttttctccttcacccaagtgttcttgacttacgtgcattatctttatgtgtaacgtatacttgcaaccgaagaataccactcccacttttgattgattggagcttctcaagtgtaattggtccttattgccacttggaagttacccagagattctccaaaatggaacatcagagtcatatattttaaaccagcattcattaaatatacatttaattgagtagataatttcccacatcttccaactccgaaatgttgtgattaatcatctttattctgtgaacatttccaatgtgtgaaattaccctttaggttaattgttagtcacttccatggagtttcttgtgatggggagtctactgatgttcagtgaagtttgtttcattttctgtgtctctcataagccccccaaaagtcctcactcatgtttattcacaatagtcattcagagctttatagcacgtgctgctctgccttcttgagacaagacgtcgtgcacacttctcttttttacatgacagcccttggaatatttgaaccctgctgctgtgacgacttcctcatatgatatgctttccaggtggctcatcatcctctttgccttccattcaaaagtttctaatttgtcactgtaacactcagaaatgga

SEQ ID NO: 19890 - DNA, 2300 bp, Homo sapien
gaggtgcttgcatgaatattcctttaataccttgaatgtcttggataatgaaatgtgccccaaaaaactaccatttgcattacttaggttcattcctgacaaggaattctgccctcgtgtgatatgttcgttgttgtctcatgcaatcgtaaatggatcttggaagttgggacagttttttttaattaggaagtagattcaagaaatgcatgatattgtttttcatataatctcctcagtctatagtggttgtaaaggtgtgctgtttagcatacctttagcaaaactgtatttataattctatgtatcttaaggcactttttaaatgcttctgacaaactgcattctgtttttccaatgtctatttgatctctgttacattaggcttatttgtcttactctcacatcgaattcctatatttttgtttatgttttctggtgttcagtcatttctgtatgcttgcctagtatgtttctttcataccgtcttcttcactgaatgaaatgcagaccaccttggccacttccttccttctgggcttcttttcctattcacaacttccgccattcacactgaccctctagctttacttatatctattgctcctgctgctttgttgctctaattttcatatatatttcctttatgctaatatcctttccttaactctttggatttcactggtttgtctttccagctttatttagaaaattaggccatataactaatgtttacaccgtagaaaggaaaatgagattctttctttcttttttggaagtgaagaggtgagaaggttgtggtagaggttttcttttattttaaaccagatggatttattttgtcctgctttgctatttcactatttcaaattgattttaaatcagtgatggtgttttcaaggattaatttttattaaatcttgattttcatgtcgtgttaaccttttccttcccctcagccaaagggtcttcttccttttttctgtccatttcacttgtttgttttaataacctgatctctccagccattattttatcctcaaatcctgccacttttatccatctttttttattgcactgttgtccttacttcaccttatatcttttcttcttctgtaattattacagaatccatgataccttctccaaaattctaacaaagaattctggaaaaggagaaattgggaaagagaaaaattgcaagtaatgttctttgctgagccctaggaagtctgcttggatttttatattcgactgatattcctccctagagttgcagtcatgattctatgtagtagggacacgaaggcaaaagtttaaatagactaacactgacccttaattggaggtgataatcctacatataaactttcaggagggaaagcgatcctgcattttacatcaggtaaactcagttgcacccattgccagtagctgggtcaggtgtgtaggggtgtgtgtgtgtgtgtgtgtgtgtgtgtgtgtgtgtgtgtgtacgtactgggagccaggttggaagtaggaagagaaggaggttcttctttcctctcccacttgcaagctattttctttcttttctgtctgttttcattatttctatggcaagtttacttgccacgtcttaaacaccttcaacctttttgtctcttcctttacttttttgctttactgctatcaaagagttaaggaagtccattaaattggaggccattcctcaccataagagaaatctggatgggatgcttttgacaactgggctctctttagtagcttctctctacttgggaaaatgtcagatattttgagaaataaatgcattgccccaaactgaaaacaccacttttattctgtaaaagaggcattcagggaaggagacctcctctattcccaggaggtcacaggaactgggagtggcaagaaggaagctgctaaacgggctccagatgcagctttatccaggggacgcctcatgcctggtcatttgggtggctgggcttgtcccacctccccttcttcatgccctcctcccggtctcatcctaggccctcccacccctaggccagccacaggcctcacagcggacatctgcgggtctgagtttcatatatccagcatgaagttccctctctccctcccattatgaattctgggctgtggtcctgcttgctccttgtgtgtcagattgaagttctgatgctgtcagccatgtctgaccaatcagcaaacaacaccacaggatgaaatttaaacaatgcagatgctcagatacagggctatgttgcctggaccacgaagggaaa

SEQ ID NO: 19891 - DNA, 2300 bp, Homo sapien
ctccccaacttatctctttaaattccagcctcttttctaagtggtggtttttacatactgtcctctggtaggtgggtaccctggccttgtgtattaagcagtgagggtggtttaaaggttacaaatgtgatcctgtcagattgacaactaactgttctaatgaggaaaaaatcctcaaagcatgaaatttgaatgaaatgtgtgattataattcaagtactgtttacacaaacctctggggaccttccgaataaatgcagagcaagtgagttagacaaacctctgggccttcgatacgtgtgtgtggatgtgcggtgtgtgtgtgtttattttagagagtggggaaactttccaccattagcccgggctttgctcctcggaaccaacaccactattcctccttgtttattaatactgtatgtgttttgttagcatattgagttgtaaggaaataggtgctttgaattattaaagttgattcttgagaatagatgtatgctcgggtggcatttgcttcggcatatgcaaatgatttagtttcatttgggatcaattcccagaggccctcctttcctgtgatgctctgaatttggcaagctcaagtcagcccatctcctctccccacatccctccctttctttctttcctttttttgtacctccccccgcctttttgttgattggtataatatttttaaaagacaataaataaatatatcaacttgcttgtgagaaaccttgccatctataaggattctattgttcagttgtgatcaataaaggtgaacaaaggttttcacgttcttaaagtttagcaaaatcgaagtttagtaaaaatgtgcatgagatgtttgctaaaatatttatacagatactgggctgcggggatgctgcaaaactctgaaaatgtggtctcaggggtgcctttggggaaactgacagctgtaagatattcgtcggttcgaaggtaccaataaacttgctttagagcccagcaaatagcgtgaagttgcagtagattgtctaaagctacagtgaaagcacccaactccagagtggagaacgtgcgcccttggggcgcccagcgccagcgaggggagcagcgccccagcccctccgtaggctctgggcccatgcggctgtctgcggcggggcgaggtgaagttcatgggcggccgcgcttcccaccagctccggggaggccggggcccgcggagcccggggcgggccgcactgctactctgtttcattccgcaaccccgttttgtaggttgttgaccaagcagtcagaaaacactgccccctctctccttttgagcgaggtcagagacgtggtgtttttttttttttttttttttttttcttccctcccctttccctcccctttctccgagtcgagttctcaggcagctgcgtacaatgctgggagctagccagcagcagagacagatggcagagttattagatgtgcatcatacgattcccttcctgccactcgctttttaatcaaattaaaacaaaaaagaaagagagggagagagagagagggggagtcaattaactgcatttgtattctgctcaataatggaccctgttccacttttaccctaaggcagttgagtggaaattttagagaagaaaagggtgcctagaacaaaacaaaacaaaaaaaaaaaaaaaaaggaaaaaaaaaaagaaaagaaaaagaaaaaagtgaagactgcagaaatttgtaagaatcggcattattcgaggaactaataaaaacccctcggaaaagttgaatcgatctcgcgtatgcattaggatttcgagctccatcagggccgggctgccttccagctccgctgcgcaaagttgagcgtctgacagcagcgccgcggcctcccccgcccgccaggaatggtctcttcctgctttgcatattcaccacgcttggcccggccatatgggaaaatgcaactgaaggaattgttgtgaaaaaagggacagcgagtttgaaataaaagttgttagagtggtactgaggagaaaaaagaatccgagaccatgtactgcgcatacacaatcccgggcatgggcggcaactctttgatgtactactataatgggaaagcggtaagcgaatgcgggctgcgagggggatttttgacaagttttattgtcgcagggatgagcatcctaggtggtgatcattgtttgcaaagttgtgcaggactgccgcaccttcctgggtgccatgaaatatttatcatttgccaatcctaagatcttcttcttgcctacttcttctccttcgtc

SEQ ID NO: 19892 - DNA, 2300 bp, Homo sapien
ggccattggaatgacagtttttggaagtgtggagcagtttggctaagaataggaatgaaggatatttttttccagtttatcatagccagagtgaggaagtgttattccctctcttgcttgcatacattgccagtagtgcctactttacgtatgtaaacatcggggaagagcagtagatgtctgttacctggaggagatttttttttaaggaaaaacacaatttacacttttttgtcgtttctcttggcaggtaaaacagaaaggggctcatactcatcttatgggagagaatcaaacttacagggttgccaccaggtaagtgagaatctctgttgcggaagggttgagaggattaacctggtaaatcagtttgttttctaaattagatgatgcattttaaactgtgacaccaaagatgcaccggcaagtcagatgatggctctctctttaagtaatgaaataacacagagcttagaactaataaacacctcatctttagatcgctgctgtatcagaactacattcatgggcttgtttttattttttaatccatcagccggtaccagtggcactgtttgcaaaccagcaatgtcggtgaaagtggttctattaaaagagtttatttgcaattaagaacttaagaatttcttacgcaggaaatacttcgcggagtcatgtgtcagaccctgggtttcgggtggctattgccctaaattatagttttcataggggctgtatgatgttgtgtgaaaacagggttgtattgagggataaaaatgtctgtgaaaatatgatttgttgtccctttttgtttctgaattgtttttggctggaagtcaaggccagcaggctaacagcaaagccgtctcaagggaagcatgcgtgagctagaaaaataagagtactttaattaaataataaaatgccagtgtaatacaaaggtatagcatgtgtgtgtttgtgtctctgggcactttgcatttgtatactttaaactctccagagagagcctatttctaaaaatactgtcaatagctaaaagtataagctttgtttcaagacaactgagtttttatagatgctttctttttcagttcagtatcagtattaatcatgtatttaaaatcttttttaaaaatttatacttcctttttataagtgcattggtttcttactttggaaaactcttgatggaatttaataatcctctttaatattcagagctctctactgtttttattattcacgcaaacaaaatgtactttttttttttcaaatgctggaaaggggatgcttactctcttgaactctctcaccctctgatgttcttgatgggggaaaaaaatctattttaattttattttaaacagcccatttaatatacccctgaaaaatgtaagcaaagttttgtttttgtaattaaatcgagcctatgaggaaagtttcctttacgtaccagacataggaaggtacgacttctggtgggttggtgtgtttgttttttccctgtatatatttgcatttttaaagtttactcccttggcccagccaccaattcagtcatattcggcatctgaaagatttgttgcattgaggtgaacagtgcttggttaagagctcctgccggagtgcagttcatggcagtttgtttggaaagaattctgcaggaaagaaatttacagccattccagcgcaacggaaacatctttggaatgtgagtgcaaatgttcgggctagatagcctgggcgacaagcctctgagtgctgtgtctctggtgtaaagctctcagttcctgcagaagaccgtgttcctgtgggtctggtttctgagggtcaaggcggaggtcattagagttttggggagaagaaagttgacaacatccttcctttctgcagatggtcatggcagaggtctctgttttcgctgggcccctttttctggtcattgagagaataggcttcctcacccctgtatcctttcttactaataggaattggcgtgattcctcacagacacaaagatttcctctgctgagtaagcgtgaggccccttaacttgtgaaagcatcatccagaccgtgtgagtctgtctgtgtatgtgcagaacacagaccctcctttctccgtttgtggggaatacttccctcgggtgaaactgaagttaatttttttttttttccaaacacaaggtgagaagtggaaaggggcagagggtggaagagaggtggatggattggcatgtgatggctgaatttctgggccttgggaggttcgttttgaggcattaatgtccaggaaaa

SEQ ID NO: 19893 - DNA, 2300 bp, Homo sapien
gcctctttggtacctcgcagacttcgacagagccctggacgggtgcccattgatgtcatggaaacactcaaattactgagaatgattcatgtctatgctggtctcttatcctcccccacacaaacaggagtagatttttaaccctgacaacttgtaatttgcagtgggtttatttttgtatctggataaatattttttaacaagcaaaattaagattaagcagtctgtatctgatatgatagtaaagaatgctgggttccatgtagccaagagtactttggggactctgcagcgtgaattcatattcttctcctcctcctctccctcctgcctctttcttttcctacctcttgctctttgcattccactcttcctctctttgtttttctcctacttattctctctctccttttaaaatcctgcccttttatctttaaaataatggaaggagtagcccaacttatatctataagtgaggcaaatcctggcagaaagattcctccctcctgttctgtgtgttggagtcaagttgggaaataatgctgagtggtgaaattctacaggggatagcttcaggaattccttctagagaaaaaaatagatgctttttcttccttaaactgtattttacaatttggatttttagaaattaccaaaacaggacactagatgttcagtttcttaggaagtcagagcagattctactttatccatctttctgtctttctgcctgcctccttacctgcccagcttcctgcctgcctatctacctgttaaacaagtgaatattacatcaaagtaagtgatgtaatggtgatattgaagcattcttagatgcaagagcttaaggaaggacacgcgtcctttgatagctcatgaaggtcgagccttttctgttagtaatatttatagagagaagttaaagggtataagtagcttaaatttgatgtacacagatgagtaaatatgtctttgtgaccattcacactgctgatacaagtataaatttatcttttcttcagtgcaaaatcctcatacaatggaagttattctgttagatcttctaagactgacagtctgtgcgatggtgtcttgtttcactgaaattgaaactgatatggggcattgattttatactttgcgctgagcgctagaccagaaatggggcggaggtgttttcccaactttaagattcattaaaatcagtagaaaagttaatactgggaaacggggttaattttaagacttaggtttggctttctttgaaaaccaccatccattttatatatgtaatgacttggatacaggatacccttttgaccacatagaaaaatttatggatataaatgtatcaaagatacattctttgtgtggggtcaggaaggcatactctaataacattgccattgccattgacctaaaagataaaaagactactgttacttttagcattcgtgttgagttgagaggggaaaacttgggggttgtaaacttcagaaggaaatctattcagcctctcaaaatacaagtttagagttttcctgttggaaaaaggaatactgtagtcctatgtatcaagtacaattactgtaaagctccagtcttgacgaaagaagtatcctttagacttgcgtggggtggggtcttaggcacctgcctgcctcttttagccccttttaatgttctggtatggacagatttctacaatgattctccacatgtcactatctggactctactgcttagatctcttgtaatgtgatttcattatcctccctaatgattattggggttaaactttaaaaagaaacaaatgaacacccttgattttattcttagatgtggccgaatagcatcgaagggtctatagatctctgtagagcagtctacagataaaaattgggttgttagaattggaacaagacattcacattccatgatcccttgtcctgctgggtctattggtggaatctgaacttgggttcagagtaggcaatttttcaaaagccctgtttcccaaatgtaaattccatcatcatcttgatcatgatggggttcactcctgggaaagggagtttttaaaaaagagagagagagagagactcagaattttgaatagtttctttgctaaattcaccatctggagagcctgtgattgattagttttggcctcactattaagtgtcaatataatcaatgggaattactaggctagggtcattacatagataatttgcctgctgtgtaaataaaaatgaaattgtttaaattttgtgcaagagaaagtgaaaataaggagt

SEQ ID NO: 19894 - DNA, 2300 bp, Homo sapien
agtaccagtatttctttcaaggttgatcttatgatgctactgtattttttcttgccttttaattatttttttaactttttattttgaaaaatttttaaacacatgcaatgtatacacagtagtagaataatcttctgtgtcaccatcatacagtttcaatatttaccagcattctgccttcttggctcatctatatataccactcccactcgattttgataaattcttaataatagactatgagatccttgaaatttgaaactataattaaatatctgtctatagacaccatacacatatatatacagctatatatgcacatacacacatatatgcatagacacacacacctacccctttattttattttttattaaaatgtaacgtatcctcattgtggagatagccaatgttaatattttgattactgtgtagattctatcttccattggtttttaaaaacataacatgaaatttgtttattgcttttaaacttcatattttaccatgaatattttccaatgtccttgaatgttttgaaagtgtgatttttaaaggcagcgtaatattccatcacatggatcttccataatttattttaagagtttgcaactgttgaccacatcttaaactccttgcacataaacacttgtctgcatttgcaaggatgttattaggatagtttcctagggaattattaggtgaaaggctctttatgtatcttgccaagttgctatctaggaaggctgtgccaatttgtattatttttatcttattaacgtggtagtcgacatagtatctggttgtgttcttttagaaattggcattttctggattaatgacactgaacgtttttcatgttcatgattcttattacatgtgtaaaataaggtgttatctggaattgtagtgaatggtacatgccatttagtttagctccaaatctagtgctttgcagcaatgattaattatttttagtatttcacaaatcagtttttgctgtctttggaccagaatgtctgcctaagtgcaagttacattagttgagagttggtcttattttactttttgagtattattttaaaaaattgtcactgtgtataattttctccctttatgtcatgtaactttattgagaaatgcaattcaatcaggaataatttagtttaggtaaaacttctttgtccaagaaatatactgtcaggtccaaatacattttaagttttgaaaaaaatatttatttagataaaaatttgtaatcactcagggtatttgactggatttgaagcataatttacttccagaatgaatttagaactctgttgttaaagtacttggtacaatttgtatatccagtaaaataaaagttgccatttttgcaagtcagtgttttaatgctgatttggtacttttgctatgtgaaattccccatactccagtataggaactgaatgaaaacatataccttattaaaatagtagaggtaagtattttcagcttcctaaacagcagagaatgctttttttttttttttttttaaacttttggaattactctattacctacatctaagttgcaaatccaaaaataaaactaggattttattaacatattctgcccttcattgcttccggttatactttgctgaactgtgttcgagtatgttgaaaaataattccgtgtattgtgtgttgaaaatgatattaaaagtatatgtgttatgtggaagaaacaatcaaaacagacctactcagacatcaacaggatattattaccccaaagaaatgacgacagtttgccagcttgatgcgtaaaggaaggaaatttacaaacatctccaagagaggcatgttgaacggttgaaggaaatgaggcacgtcctgcttttattgtgcttattgcagtgggattcccagaagactgaacaaggctgtcctgagacctctgtttggcagagatcttgttgattcatattttatttttgtttcagaaaaggtctgctattgttcaaatttctaatgtagctcataaacacacagccagtatcatttccccttctactgactgatatatacaaataaattaaaatctacggtcatcattaactcatgttctgtttccatggagcacaggagagtaacaaggaaggccccttaaaagaaaggccttttaaagtggaggtctcagttcacaaactttaaaagtttacgaagtagtattttagaattttaatcaccagatatattgggggaatttattacttcctattcatatggaagaggacagcagaggtaaatatt

SEQ ID NO: 19895 - DNA, 2300 bp, Homo sapien
ttgcttttctgttgcaaagactaaaagctattgttttggagtagggaaatttccatttaaaattccattggctaggttagcggtatcagttgatttagcaaggaattaagagatgaaaaggaattatttctttcgtggtggcttcatctttatctgtatccactataaaattcgtaaagtgggcgttatttgctttacacagaccagaaaacaggctacagaaggtaactgcttggccagaaatgggttgagtcagtcgtggcttatggcacaaactacatttgagtctacaaagcaatagatgaaggtcttcgccaagtgaagactttttggacttggaaagttcacacacttccagcgctctataagaagatagggtgggggagttggaggagaggacccacatccctcttccagcctaggaccaacttggcccagaggccttttcccatgccgcccaaggctcgctgagaaatctggctccacacagtgggagaacccagggtcaggcttactgtgagtgaggccggcccagtctttcccgagccttcctcagggagacctgggggtatctcacttccctgcggaagtctgtggagtttaatttgtaaatttgtgccgaaactacacttttgtgtcaaagagcaaggacggccaagaagcggcaacacgaataagagcgcagggaaatggggcctgcgaacgacctcggcctcgggaactcccacagtgccgccccacgcgcgacgcctacccgagaacagccacccgcctccgctcccggaggaggcgtggtcgaccagcaccgccatcttggccgcctctctaggcgctctgtttaccactctatggtcgcctgctcccgccccgccccttcccagtcattgtctggaggagcagccgcggccgcagctccttctctttataagcccgcagttcccggatgtgaatggattacaatgtatctttcagggaaacctattattatcaatgtgactccacgggggagtccatggtgatgatgatgaggaggaggatgatgatgatgagacacctctaaacttggaacaagtttaagactttatgagagaagaaaaaaaatcaccaacaagaattgtttgaggaaaaattataactatcctgtgttcatttttttttttataaacaataagaaaaagttgttggatttttttttaatgatttcttttttgggggagggaattttgttgcagttttatggtggaaaatgcaaaaaccagagccaggtgcataatcttgtaatctgtggatatccctggagcaggactgagtaccagttaaaatactttttggggatacacatgtgagatactaagtacttgcagaagatttttgtctctctttttaaagtctctttccttggaatattgtgagaatatttgtggccatttaaggtaacgtttcaatttgccgtcagagtaaactgtttgtaattgaatttaatttttaaaatgtcgatcccgatgttttattaaaacaaaagggacaacctattaaataattgccaatgggaaaaagtgtgtgcatgcattttgtgtatgtactcgcacatctagcaataccaggatttgtagaatgtgtgttttttttttcaaacacacgttaaaatagcttatgttgcatataccggataaagcacgcttgttattacgaaacgatagaattatgaagcttaaattttatcctaaaaagtgatgtgaaaaagtatgttttaagagcatgcagggcctataatggtaaatgttgaattaaaaacttacagtgctggcgaacagggacttagcgtgcctaggaactcaagtgcaaaaacaaaacaacatccacccccaaaaattgccctttttttttttcgaagtttgcagttatactattctgtgacttaaaagggaggggaaagaaagtatgcaattcagatttcgcccccaacgcaaaactaccgaaacgaaaatctccccaggaaaatgtggcttgatttatagacgaaaaagaaaaatattgttcctcttggcaaagtctttttgcatcacgtgtatttgcagcctagtataaacttgctttgccgtgtgtggatgtgtgagtgagagggaacgagagtaagagaaagaaagaagtgaggggatgtaaactcgaataaatttcaaagtgcctccgagggatgcaacgggcaaaaactgaactgttcaggcttcagattgtaactgacgatctgaggaaaaatgaggtgctcgatgaattttcgtttgtattttttggcgaggcgg

SEQ ID NO: 19896 - DNA, 2300 bp, Homo sapien
atcaatctgatcctgttcctctgtatgtaatctgcttttttagaactctctttttcttcaaaactattcaattgaaatatgtttccttgtaggttttctttatctgttattctaagggctctttcaatttgaagtctttcttccttgtattttaaattgtgggaaatgtattccttccatgttttcttttcattattacttcttttattggactcttattagccagaacttataaccattatttctttcctttgtatagctttttaaaaaaaatttgtaatttgtttgtactttccttcattctttcctcaatcctttcttccaattctaatttatttttcagttgtattcattctgccatttatctcattacagttttatttcagctatcatgttttttacctaatatagctgcttgagtatattttttattcttatttcatattactactagtttcttatgtcttagaatttttattaggctaattttaaatcgtttgtctttctaacaatgctgcttctgatgaactatgtaatccagtgtttgtttttcctttgaaatagttgtgctcctgataagacctattagtttggactgtgaactcatctccccacgagggcatcaggcagtgtacgtggggagaagccggatttcagccctcatcagagtatttagtatgggggtaggggtgggatgaatgagacttagtgtggaaagttttctggtggaggccccagaaaaccaaagttaatcattcctcgttccacagaacagctcgtcaagattttactgtttgcccttcttgggataccatattaagagacattccgttcgggtgcagtggctcacacctgtaatcccagcacttggggaggccgaggcgggcaggtcatgaggtcaggagtttgagaccagcctgaccaacatggtgaaatcccatctctactaaaaatacaaaaattagccgagtatggtggcacgtgcctgtaatcccagctactcaggatgctgagccaggagaatcgcttgaacccgggaggtggaagttgcagtgagctgacactgcaccactgcactccaacctgggcgaaagagggagactccgaaaaaaaaaaaaaaagagacattccaatgctgtaaatccccagatctgcagattttgagatggaaaaaaggaggtagaaaagcgatcctagtttagtgaatctacacctgttcttctcagtatctcacaggatcaagacttttatgctgccctgctcttatgtttgaagcatcagagtcattgcaagtagaaggttgggtattattcgtcccaaagcaatgtttggaaaagtaagagcaaaattcctaaattcccttcctatgttaacctcccacagaagtgctgcaccacccctggtctcagatatgtctccccctaaggtacacacacacacacacacacacacacacacacacacacaacttcaaaacagctactattaccccaggaacttcccacaattttctccataatttggtatttttcctctatggccataagtctcaattttggctgtgtattagaattacttggggagattttttaaaatctcaatgcccaagccacactcctagaccaattaatttagaagttcttaggatgagactgagacatcgttttttttcttttttctttctttctttctttttttttttaaccatcccaaggtctttatttatttagtttatgcctatcatgccatgaattcatggggaatagattctagcagctcgagctccttttctttgggtctcagaaaatgtgcttctctgggcagagcaggctggtttttcggttgaacctagatccctttctcttcggcttccttctttttctgatcattttcctcctaccatttcaggatgctatctcagctcttagagtgcttaatatgctcaatatgtacattaattctcttggcaagaatctttctcttatcttgtttgtttacaacaatgccaacagcatgctgggttacacagtagactcttccagctttgccatggtaacacttgtgcagcattccttttcgaacagtgcccattctcttgatgtctacagtatcacctttcttgtagattggcacttatgcggccaaaggaacaacaccatgttttctaaaaggctggagaaaatagcacaggtgcctctcctctttcccttcatcttcatcattttgacaaattactcaaagatggagggtgcagttgaaagccagccatcattttttaaaacttctcaggacattgtaac

SEQ ID NO: 19897 - DNA, 2300 bp, Homo sapien
atttctgaaattttttatctgtgtttttggttttttttcttaacatgataatgagagatattataaagcacaccttttgtctttaaaaaataacctcttcattgtttagattagtatctagaaatagaagattttagagcttgcatggatggaattaataatcttatcttattttcataatattttaagctcaccttaaatccttttggggtggaagtagagtaccattaatacataaattaaaatcctgaaaatggctccttcatttgacaatttttcatttaagagacatgggacttagaaaatttttgagatttaaaaaaatccctccagattattatttcaattgactcatttagctaagaacgactaaagatatcagcacatttgggagtgtgaagatactgaagaaacaaaagccatttcctttctccatggagcttccaattccgagccagatgtaacatacgtgcatgtgtgggttttatcaactacagaattgggctctctacaagaagtcattgggtgttgcaaacaataagtgcaaaaagagaaaaggaagcaatctgtacaggtgaagaactgacaggaaagaggtaagcctcacctatgacaaaatgaattgtggatgctggatcactgaagtaggagagaggatggcagtgcaaatcagagaaatgtcattaaaaagggggggtgcgtgcacacagtaagttgggagaaataaaaatcagagagtagaatgaatttgagactatgaactagattaattaagatttatggtcttggccaggcgtggtggctcatgcctgtaatcccagcactctgggaggctggggcaggtggttaacctgagtccatgagttcaagactagcctggacaacatggtaaaaccttgtctctacaaaaaaataaaaattaaaattctaacaattagccagctgtggtggtgcacaacagtaagtcccagctactcaggaggctgaggtgggaggatcgcttgatcctgggaggcagaggttgcagtgagccatgatggcaccactgcactcaagcctgggcgacacagcaataccctgcctgaaaagaaaaattaaaaattaaaaaaaaaacttatggtcttatgagtgggctttcagttccatttttggctttacaagattcccactcaatcaaaattacacatacaaaatggagtgaagaaaagctttgcatttacttaggaggtgaaagaaccatgataatgttggcccatccattttaactatgttagtgaacattaaagtttgctcctttaagtgatttgcccatgtgtaggtagggaatgtatttcacacatcttttagactctccactgtatggaccaagagcaggactgactgactacacgttgataaattgtttcaggccactatactggatatactgaatagactgagtgaaatctccccgacgatcttcacagatgactggagtccacagaagtccctgacccccagtgttaaagaggccattacgaatacaggttattattaggataggagatattgtctggaattaaagtcaccaccagtcaaattggctggtaccagattcctgtgatatctttgtgctgtcaacacatacaaagagaagtgtgtgaaaattattcagtcaaagaataactagcctaacaaagggaacaattctggacaaaaagtaatcccgtttgattccaagagtaatcctgtccgcaggacagcttggcaaatcccccacttgaaattttgttttagaaacacgttctctgacaaggcaagaattcctcctaagatgacatacagaattcaggcccgaagcctggaagtcttgctctgaggcccatcagcatggaaacaggcctttttaaaggaaataatccagatattttctttttcctgatgcctgtgtagacgtgtttccttgcagctcctttcagttggcctgaatgcgggaaagcaccagggggagctcacacatcttccttctttttctccccctcttacagaaggttggctcttgtatcctagcaaaagggtgggtcaaaaacaacaacatgcatgaaatgattcagaaaggtaaacaaaggcaattcgttctgtaaaaatactctagattctttctgaggactgggcactacactgctcatagtgggcacctaaagtcagcattcagccaactcagcgggctttaagatggagactcttaaacctcctgcatcaaaaagacataagggaatgtccctgagaagagcctgtgtctcctttgaagagagagagag

SEQ ID NO: 19898 - DNA, 2300 bp, Homo sapien
agagatagaagaagaaaggttgacttatagagtatttctttatttgctttcttactcgttttgctttcctgttcttaagtttcaaaatcctgtagtaactggaatgtatttaaccatgtgctgcctggagggaatcaaggctgtaagagaaggaaatagagattcggcctgaagaatgcctgcctatgctaccattgcaaatatgttgttttatgaaaatatatacaatgccccttgcttaaaaaccatgtactttgttaagatgttaaatatgcctccttttcatatgggcctactgttttttggttatcaccttaacagagagaacaagagtctacttttaccctaaggacaaagtcccaaatcgatgaaattttgcagatgagagcttatggcagtcttttagaaatgttatttttcctggaaataggagtagacatctcctctttatccagacctataaagcatcaattgtccccaaatgactctactgacctggaatttacattttttgaaggtagtgatttaatgtgcctctgttttgcataaggtgaaagtagtattttcaattaaacaacaatgtgcttcaatcattcactctgcctctttctacaaaagaatccccagacaaaagaatgtattataaaatgttacttcattgaatatatgctaaaatgatatatctgtatgtaaattggtcacttatgtgttgaccagtattgctctaatatcttaaacaaatatgatactttagccagagtagtctctgtaactgctttataactactataactttggcctttatttagtctatgtgaactattatttcctgaaatccaagtagcatgaactagcatttatgggaattcactctgtgacaaaaagactatgtcaagtaatttagatctgtcatctcagttgatcttcatggacatatctgtgagataaatgtcattatccctattgcacagatgaggaaattgtggcagagaaaattcaagtaacttttctaaggtcatttatatgatatgtagaatacaatactgagccccaaatttatacactatttactatatcaccactagaccattattatgtaactacaggtagcttatggaattcatttattcatcttttctttaaaaaatatgcatgtatgggcacaacattgggagcctttaagaggcataatatgcacctgccatagtaagatgggaagaaaaaatctaaatcattgttttaaaaaaccctccgcacatgagaggatatttttaggttaagggagacatacatgtttaaaaaaaaagtgacagagagagactgattgacaacactggagagatgggagttagttgaacagtgagcttttagagaaggaggcagaactcaatgaaatcagtaggaattagccttggaaagagcagatgtcctaccgtggaggcctgaaggatatgaagatagctgaagtccaagagattattgggtgtagagagaaggaaaggcatgggatcttggtagggagtcttggaattgtttagcaaagtataagatgagtcaactgtccagagtgatgggtggaatttggagtttaaagacagaaaaccatttgactcagtaaattttgggactgagctatacaaggtgaaagggaaggatgaggaagagcaaaaggatccaggaacatttcaacagccagatcagcagagtcccattaatctctacagcgaagcttttcaaccaggcattacagcatacactgtataacatttgtgcatgtcactaccatgacactaagatcaactgtttctgtgtctgtctttacctaacactctctgatggtgggcactagatattatttgactccatgttaccgtgttaccagcatggagatgaatatcatctgttgcctgccatcgagtgtacaatagacactcagtttacatttggctaatgaatattgactgacatggtggaagatcaggcagggaagagttctaaaccacaatgccaacacacaatggtgtgtcattatgagactagggttgacttgcctcttagtgacacagcctataatttgagcacatcacagggaattgcagtgtacagagctgctgtcttttgtagatgggaaaaaggtgagtatgtgctgatgcaggcattctccagtgtcaggtgaggtaaggcagaacatagcttcagttattagtacattaaaaaaacatgagtaacaaataagagagagcagagatccctaaagaggacaaaggcagttggagagggattcaattaagacatatacc

SEQ ID NO: 19899 - DNA, 2300 bp, Homo sapien
ccaccatggtaaggcccagtggacactgacctccccaggcaccaatgctcccacattccagggccaacagccagttcttcttcctcctcccaccccactgacaggctgtactcaacacagtctctcctccttggacacttctttatttcaacattcttctcttttccttctgccccagtaactgctctgtctcttttgctagtttctcctcagacccatgacctccaaacatcagagtgctccagagatcaagatccaccctgttttctcttctgtctaaaatcccaccctgggagatcccacctagtatatggccttaaatgtcatctgtatgctagttactgtcttagttgctgatctggcctggacctactccttgaactctagaatgcagctgcttgtttggcctcccttcagttgagatctgcctcctgaacctgcccaaaactgagctctgatccccacccccaaattgctcctcctactgttggcttcatatcagtataattctggttgctcaggtcccagaccatagagtaactgtgattctttttcttacaccccatatgcaaatctcacattcccccggaatgttactatttctctctccttcccagctaattcctcagtctgagcctgtcccacctggaatattgtagtcacctcctagctggtctctcagcttccacacttgtgccacctaaatttgttcccaacatagtagccagatggcttccttgaaaatgtaaatgaaatcgtataatctttctgctagaaattcttcagtggcttcccaaatcatgcagatccaaatttgtgatctaagcttatgatccatcctctcaccgtccctctgatcttacctcccactcccttcccactcatccctgcactcccactgtagtggctttcatgaccaaccttgaacatgcccagtgtgctcttgcctcagggcctttgacttgctcttctcctccttcaaacgatcttccaccacacgtccacgtggctgtttctttatctttgttccgttccctgcttaaatgttatcttatgataaaggccttccctagtcaccacatccaataaagcatttttccattcatctatcattctctatggtcttacctggccttatttctttttagcattttataataacttgatatattcagtattatttattttgtttattacttatttctttccttgaagtgtagaatacagctttatttttaaaaatagcttcctgtttgtgcaccactgtgtttgcatgagagtcactgtgcttacatggagtcacaacaaatgtgtgttgaattaataaataaatttcttcccattagtagaagttaacatgtgtgtgtgtatctgtgtgtgtgtgaatctgtgtgtgtatgtctgtgtgtaatgtgtgttgtttctgactcatcaaaggctgtgtgcataggaggttagattttattctcttctcaaaaagtcagtgtgtttttccctgtatcctttctgccaccatagccctagtgaaaggagcagagtcaatgtatttctggaaagagaataggatgtaagagaggatattgctgcacagaaaagaggaaggaaaagcacatccctcttggtacaagatgattgtatggaagggaagggggtcagaaagagacgagatcagatacaaacatgttggactcaccttctgcacctgccctcctaccccaggggaaattatgaaaactctgagagtacagaaagtttttccatttcttatttaaaattctgagaagggatcacttcatggaataatttcttaccctctctatacaaatctatgcatcagaataaaattgctgctatggtggcatggttaggagaacaacagcttgaaattagtaccctagaacaccatctagttcaatatgccttcaaaaatatctagaagtcccaactggctttgtggagggacacagaaggaaggtgatggtgcttctggtggtgaattactgaggaatcactgcagggatggtgaagtggccttgttgccatggcctgttgaggaggttgcctaggctaaagaataaatgaaaagaactttcagacctcatagatgaatagaatgagcaaaagttgcagcacagcgtgtcaccagagaggaaaagaatatccttgctgtgccaagaaagaaaagaccatggatctactagttgcagatttcagcagtaatgccaagggggcaagaagtgaccagcagaacaattaggccatggcaacagaagccaactacaacccatgttccaatctat

SEQ ID NO: 19900 - DNA, 2300 bp, Homo sapien
aattggctcgtggttctgcaggctgtacgagtatggcaccaacatctgcttggcttctggtgagggcctcaggaagcatacaatcatggcagaaggccagttggggagtaagcatgtcacatggcaagagcaggagcaataaagggaggtgccacactcttttaaacaatcagatctcatgtgaactcagagtgagaactcactcattgtcacgagaacacaccaagacattcatgagggattcaccctcataacccaaacaccttacgctgggccccatcttcaacattggcgattacattttaacatgagatttgaaagggacacacatccaaacaatatcaatggataatcaaaaagtcgtatatacatacaatggaataccatttagcttcgagaaaggaaggatattctgacaaatgttacaacatagattaaccttgaggacattatgctaagtgaaataaaccagtcacacacaaaaaaatatggtatgactctacctatatgaagtacctaaaatagaaaaattcataaagagaaattagaatggtggttactagaggctagggggaggcagggaatggtgaattgtttgatggtacagagtttcagcttttcaagataaagagttctggaacttgcttgcacaaaaatgtgaacatacttaacactactgaagtatatatctgataagatatactgaattatatatctgataacacatactgaacactatttaagtgtacagttaagtacacttaaaatggttaagataataaattttatgtgtttttaaagtcataattaaaaatttaaaaattaaggcaagtgatttttaatccccttctctgtttcagatatggtattaattttagcagagaggaagaaagaaatatctagtaactcccaggaaaataggctccctggatgcataatccagagattatatatcaatgtggttgcactttgtggctgaatttagaaaactctagcctataaaattatagttggttactaacatttggtcatcaatgaaatgaccggaacaaaggctctaatgactaggttatcaggaaacttatctgaattctccattgtgctctcaatgtggacatactttttataatcaaagtacccatcagctagagctggagaagatctgggctctctcactggtgccactgctgatggcatgtgtggctgggcattctcagcctgtgttcctcgtttacaaacaaagatggccagctcatccacattgcttgtgtttcctcatggcataatttactccttcctgctgcacagggaaatgtttctctgtatgtgtttagtggtattgatttctattttttactctatacctgctttctaaattgtaactattaaaacatttttaaattgtggaattaataaaactctattactaatgttccaaagagagcacaagccagatatttcaattgaaggaatttaataaaagtaattcactatagagttgctggaggggctgaaaataggtgaggtgctgctactcttagggtcataaagggaaaagatgggagtccagattgactaacaggtgggagctagaactacgaagaaagtctggtgggagctgggaccacgacatgggctgcaactacgatggagctgttggaggtactacgtgagggatgaggaggtgggccgctctcccctcccaccctccagtttccaccagtgctgcccattgatttaaccttaatggaagccagtgagcaagagcatctgggaattataacttgtagagattagctctctacagagcagaacgagggaaggaagtgtgaatggatctgacagccaacaggcaaatgaccagtacaaacagcaaacttcaaaaccatatatttatttatcaggattacaattaggtatgccacctcccctatagataagtaactacctgggaccagggatagagataatttgaaagagtctttggcaaataattaatctgagtgtacttagacccgcacttcttcacacaagcagattaattgttttttagtgaagtattcaaatgcagaaacactaaggacttagaaaccaaaaattaattagcgtgggaggaagagacagtgaagcagccccttaaaaatggtctttcgggtggaaacactttatttgggaagcaaagtgcaagattcagcaatagaaaccactcagtgtccttggtgaatgatttgatcctggccatcagaacctttacttcagccagcaataaactcttagaaacagaagcttcgaggtatgta

SEQ ID NO: 19901 - DNA, 2300 bp, Homo sapien
gtacatataaacttatttttgtttttctaggtagttggcaaaaaaggagaaagccactaaggtacaaaagacactggacaaccatattgcaatcagatctacagctcctggataattgcttgattctcgccagagactgtcaatgtttcattcattgccattaccaataaatcattgcttttgttcagatggtatcactagtgtttccattgtaatcttgacacatgcaattgtaaataaaagtcaccacttttgccaagcttaatttttgtctttctaaatcagtattttctctttccatgtatttgaaaactggttaacttctgattttagtagagacttaagtgtctggtagtatattgattgaaagccagtttctttagaaaaggagaaactgttctagggaattaagaagtacatgtgtacacattcatggcaagttattttgataagtgaacctggaacagctaaccatgttaaattattactgcatttttattaaaggacatttgtatatctgagctatggaaattactcaaattataaattagaagaaataaacaggtttaatgagatttagctactcttacctaaaacttagctaatgggtccacagattctttcttggtatatatcaagattttaatctcttctggtaaactttaaaatttgagtcagcctttttttttttttttttttttttaactaatagaagaatgtggaaatcagacagttggggaaaaaatacagcatagtgaattcagaaaacaggaattggccaggtgtggtggctaatgtctgtaatcccagtactttgggaggccaaggcgggcgaatcaccagaggtcaggagttcgagtccagcttggccaacatggtgaaacctcgtctctactaaaaatacaaaaattagccaggcatggtggcgggtgtctgtaatcccagctacttgggaggctgagacagaagaatcggctgaacccgggaggcagaggttgcagtgagctgagattgcgccattgcgccccagcctgagcgacaagagcaaaactccgtctccaaaaaaaaaagggaattattacccttaatcaagtatttattacctgaactaccaaaacgtgcagtgtaaatatacagagaacatgatttaaggttgaaaatgaggtgctcaaatagaaatgtttaaaaggtctttcacaaaaggctggtaaaatacctattcgttaccttttttatcttaaaattgtaatctaaaaagtattggtagttttaattttaaaatttctgagtattttgaaaactatttttaaagagtacataagactgtaaaattgtgattcagttaaacatttgagggcattcttgtctaggaatatggtagagataccatttgcctttgtgagagcagtgtgtttatacttgtttatgaaaaaattctacagaagttttagtgttgaaagagtccctttctgaaacccaagtgtcattagatagtttagttcatttgtatatgggcacattaactggtctgtgatgatcttaacactccttaaatagaccatctcagattaatcacatctgaaattaaggataagattaatatgcagggttttggtttacagttttgtacacttaacctttctgagtaattgttaaagtgcctcatcctaagtattgctgaccttttcctatttatacttgatagtttgaaaacccagtgaaacaaatttcgtatttgtaaaggattggacatcagatttatattgtctatgtgactcttctataacaattagttgcagtatgcaagtattacataattcaaattgtaaatagtgaaaaatgaacgtttataggtaactataacgtttcacttaatgggaaatcttactattataaatgtgcataattggcatttaaaatatcaaactgaaatgctgttttctcctaaaacagtatatatatatacacacatatgtatatgtaacatttatatataacactgaattttccagatgaataagagcatttgaaaaaatgtaactctagttattttaactgaagttatttattagtgcatctagaaaactggtattcagtttcttgttcattttgtcggacatagcaaaaaagaatttcatgatctctgtattttgatacattgacatcaggtgcttttgatgagaaacaacagtgaaatatcgtgttcataatagaaacgaaagtcaggtattgcagtaggaagtctttgtcagcttaatgctgaagccaagagtagcacaaggtaccacattcttgtgccc

SEQ ID NO: 19902 - DNA, 2300 bp, Homo sapien
tttaagtagcaaggccggtcatggtggctcatgcctgtaatccaagcactttgggaggtcgaggcgggcgggtcaccttaggtcaggagtttgagaccagcctggctaacatggtgaaaccccgtctctactaaaaatacaaaaaagtagccaggcgtgctggtgtgtgcctgtattctcagctacccagggcgggctgagacaggagaatcgcttgaacccaggaggcggaggttgtggtgggctgagattgtgccactgcactccagcctgaacgacagagtgagactccgtctcaaaaaaaaaaaaagcaaatatttattatggggacttctgtctattaaaaccattacaatgtgctgataccacatgaaaaaggaatgtaattactgtgcctctggtgtggctgggttcagttaagaattaattattttaatatgtttctgcaacacctttagctttctcttttcacatgtcctgggcttcaactatcacccaatctgatgactctcaaatctgtaacgtcgtcctagtcctttttctttagttccaggctcatccctctcacgatctactatatctctcacttggatgtcctacaggcattttaactcatttttaaaaagctacacgattgaaatgttttgagttattttaaattcctctgtcatctcactaaattggaccaataattgtttctcaaacatgttctttcctcttcatttccactgcagatgctttcctaatttagttcctggatcaccacagtatcctcctaaatggatctcactgccttccatcctccttgatgctacctgagggcttttctgaagacactttttctttttccttttttttttttttttgagacagggtctggctctgttgcccaggctggagtgcagtggcgcaatcatggctccctgcagccttgacctccccagctcaaggaatcctcccacctcggcctcccgagtagctgggaccacatgtgcgcgccatgacgcccggctacttttttgtatttttggtagagacgggagtttcaccacacttgtaattgcaaaattgccctgaaatgatttttccattctcttcccgacaaaatccaaattccttagctagtcattatctgaccttggccttccctccaatttcatctccccagctaaatccaaagacagataatttgccacctagcctaatatttaaaagagtacactggcgttagcctgccttgacttgaaatcacagaacctacttcacagggattaaatgaactagtacacatataaagaacttatgtcttgcctggtacatcatgtggtaaatattagctattcttcttatccaccctctcaactcatgcatttgcacctggtggtccccttgcctggaatattacctctcaccatccatctaacccctgcttctctttaaagattcaatccaggagtcagattcctagcaagtttaccctgccccacccttccatctcgttagtctccaccgcttcctattcaaattattgtttgcgtcggtcactagaccgtgaacttcctaaaggagggatagtgtcttcatctttttggtcaaaacctaaagacaggtgcacgatactttctgaatgactgcacagaaagcgccccatatgtaattaagtctgttaataaatattcctaaacgttattttgtcttgtatgtagacctgccccgaatacagtacaggagcatcttcaaagtacttccagtgggtgccctggacagcagctaagaaccccggggtaaaacgagtttcctctctactgttacaaatcagaaacctcctccgtaaaagcctcagatctgggaaacgcggatgcatatgccaacttttgagtctcagtctgcgcctgcgcacgtgacctctacacgtctcctctgcgcctgcgccgctcaagttagcgcgaggctactcagtcgagggtgggactacgcttcgcgttttgggattgggcgctgaaggccaaaccggacgacgcggaaatgacgtcacgccgggggccctgccgcgcggtggctgctgggtgccgcacgccttcccatcctcctcctctcccctcccccatccctccccgccccctcggccgctccgctccctggcgtgactcggcactgagagtcccgggagaagactcggcggtcgccacctcttctgtccaggcctcggccttcctgagcatctctccttcctctcccagatcgtcttctccttcagtttcaaagccagtggcgtcgcggccaccctgccgggctctctg

SEQ ID NO: 19903 - DNA, 2300 bp, Homo sapien
acagagtagtacttaagttttaaaaatgccactaaagctgggtgtggtggctcacgcctgtaatcccaacactttgggaggccgagacaggccaatcttgaggccaggagttcgggaccagtctggccaatagagtgaaaccccatctctactaaaaataaaaaaaattagccaggtgtgatggtgtgcacctgcaatcccagctactcgggaggccgaggaaggaggattgcgtgaacccaggaggtggatgttgcagtgagctgagatggtgccattgtactccagcctgggtgacagggcaagactccatctcaaaaaatatatatatatatgcctctaaaatggtgaaattcccgattttatcctgtgggtctcatttatgattcttttgcagtgataaccatacatttttggttacaacaacaatgacgacatctcacttgtctccttgcttccctgtatttcccacctgatttacatggcacattgctgccaaattaatatttgtggctggcccatcttaagtgaccccgataagtcacactcttgtataatcctttctccttgagtacagataaaacccgtgacttactttaaccaataatatatggcaaaggtgatggctgtcactccctaatttaggttatcatctacatccatttccatatctatgtccatgtccatatccatggctgtatctatatctgtgtgactcctttcttgtgctcagtagagagattctccttgctagctttgaaggagtatgctgccatgttgcgagagagcctttagtaaggcccatgtggtaaggaactgtgggtggctgctaggacctgatggccacttccagttcagagccagtaagaagccagggcccctagtcagacagccacaaggaactgaatgagctgacaggagtttggaatcagattcttccctagttgagcctccagatgagaattgcagtttggctgacatccacttgtagccttgtgagagcatgagcacaggactcagctaacctgttcctgacctccttgcccatggaatgtgaggcaatacatatgtgttgctttaagccactaagacactaagactgtgataatttgttgtaaagcaattttaaaaacctgaataccatgtggttaggaaaagtgctacactatttattagtcaaaagtcttcaattacttttcattgtctttggaataaagaccaaaaagcttatatggccactaaaagcctcttgttatctacattattctatttttccatgttacttttttattacctggtctaggccgaatgtgatgaagtctctatcaacccacaagagagctccagggcatagactgcctgttaaaggagccgctcacggagcagaaacagctaagccctgataccacattttcccacttcacctacttcacgtcccttgtatttcttccaaatttaactttctatttattgcatatattcatgttttacatttcaatgctggtgacaaagttgttttcctttcccaattattattccaaatctgaccaatttttctagacttccatatgacctaatgtgattatccttccttaccccaacctagaaataattcatctcttttcttccttgctccttatttggcatttctcatcctgcactatactatagcttatctatcttgggggacatttgtcattctttttagctttccagcatccaacatactttccagtgtttagggaattccctacctcttgcatctcagtgggaagcagtgtgatggggtcagaagtgtaaacttgcgcaacatcctgctcccaagaaagacgtgcacttgctacttcatccttcgctccatcttggtcctcccaactggagagaggacagcctagacgagacttcccacaaccaagatggcggccgtgcactccttgcccacagctggccttttctccactttcggtctccatcgtaacgcggctggctctctcggcgccggcttaggccttgcaagtagggaaatggtgagtctttcccgccccctcatttttgcgacagttgcagcgaaagtcacggcagttggggctggtgtcagctgatttactgcagtggcggcggcggcggcaccggcaccttgcagtatcactggggagacggcggctgtatagcgcttgccgccccacggattatcccagcaggatctacgcaccccgcatcctccgtagttccgccctatccttgtcctccttggctggggcgcccaccggcggtctgataggctacatcgcggcatgaga

SEQ ID NO: 19904 - DNA, 2300 bp, Homo sapien
agccaggcatggtggcacagtctgtaatcccaagctagtcaggaggctgaggcaggagaatcgcttgagcccgggatggggaggttgcagtgagctgagatcacgccactgcactccagcctgggcaataagagcgaaactccatctaaaaaaaaaaaagaagaacgaaaaatgcaggcaggggagatgccttgaacagcccattgaattgagtaagattaactccatcctctgcacctgaggtccaaaatgaactttaaggactcatacatctaataaacatcacaccactaaagctaaatgtcatcctacccctctcacgaagaaaacacaaaacaagctcactactttgaagattttcgatgctaagtgtgttacatggagaaaccacccaacttcctttaacttcaaaacggaacatatatcaaagataaaaggaaactgtaagatacaagggtcactacccctaaaatttaagttaaattcttacagggatattcaaaccaagccaagcccagtccctttgattcacccagtcaccgagatcttttaaaatttagttacaggtggcaataagaaaaaataaagggcatactctcatttttctcttaaagtatttctctgaaacactcttaaaataaggattggcagtaaaataaatgaattttctaccataatccctaattgacattaataataaagcattaattatatttatagtggttcgttttcccaatttataataactaatatgtattgttctggatggaactagacagttttttattctttgtaataatgagggcatttcaacacattatgttcacttttaagctgaccttcatacagccacgagtttgtttataaagcaagaagcagagtcaaactaaaatttttgttttacaaaatgtcaaaaactcagttaatttctttcatacaacaggcaattcctgcaaccttgcccataaaatcctaagacataaacacctgaaagagtcagtttgcctttttttgtctcatggcaaatattacagtgagaggaagctatagctgccactgaccgaaccctaaattcagcagcatcaacaatatcaatgcagcctgtcatgcgacggtaggttccctagtttcagactatctaacccagcaaattctgcctcaaaaagtgacatactaagtgggtaaaaaacataaaacagcaatttttgaatcaaagttagggtagtgctgacttcaaacatagcttcagaacgctgggacccatcactaagtgaatgggagtgactggcatccgctcagacaagtactagggcaaagggataagaactggcagatggcatctcaaaaatgaaattctaacagtggtgtcagtaccttgggcatgggcaaaaatagtaccaacaggaaaggaaagactatatgaaccccaaaagcaagcacatcgcccaaaattgctgtcaataaccaccaacgatcatcaccaatcacctgatcccgtttagattgcacctgggaaccaggcagtcccacctcaagaccaaagcaactgtcacaagtagcaaatatcactcaccaggcaagggagccacaaagacccccggctggcccccacgctcttggtaacggcgcctacttttgggcccgacctgcaggcttgcagccgcagcgatctgacagctagcaccgcccccggctagagcgggtttgtgacctttgacccctgacccctgacctccacggtgcaggaacatcccgccctgtggtttcccatggagaagcttgaaagcccccttacctgtcacagcttcatctcatgccgcgatgtagcctatcagaccgccggtgggcgccccagccaaggaggacaaggatagggcggaactacggaggatgcggggtgcgtagatcctgctgggataatccgtggggcggcaagcgctatacagccgccgtctccccagtgatactgcaaggtgccggtgccgccgccgccgccactgcagtaaatcagctgacaccagccccaactgccgtgactttcgctgcaactgtcgcaaaaatgagggggcgggaaagactcaccatttccctacttgcaaggcctaagccggcgccgagagagccagccgcgttacgatggagaccgaaagtggagaaaaggccagctgtgggcaaggagtgcacggccgccatcttggttgtgggaagtctcgtctaggctgtcctctctccagttgggaggaccaagatggagcgaaggatgaagtagcaagtgcacgtctttcttgggagcaggatgt

SEQ ID NO: 19905 - DNA, 2300 bp, Homo sapien
tagagaaatggtgttctttccaggtctcaccacgttggattcagtgtttagtacttatttacttgagagaaatctttggtgatataaattattattttattttattttatttttgagatgaactcttgctctgttgccaggctggaatgcagtggcgcgatctcggctcactgcaacctctgcctcccgggttcaagtgattctcctgccttagcctcctaagtagctgggactacaggcacccaccacctcgcctggctaatgtttgtatttttagcagggacggggtttcaccatgttggccaggctggtcttgaactcttgacctcaagtgatctgccgaccttggcctcccaaagtgctgggattacagatgtgagccaccgcacctggccatcgcctcattttgtctttaatgattataccttttgattggccatctgtcaggctataggtgacttctagtgtctaatgagatctgagagtactctcttctatgcagctttctttgactattccagtcttctttttctaacttctctgaactcctgttatctaggtctttgaccacagtttttaacccctaaatattgttttgccaattagattttaattttgttatattaaggaatacttcctcatatgtgctctcctgcaagaggtgcactccaggatgctctggttaatctattactatctcaaatttaaatcccttcaccagaagctacatttttttctttaatggagaaatgagtttacaaagacattcttttcttccctcaatgttcagagtttacaacaaaagactttcatgaccttcaggcataacgggtttggagtaagtgtggttgaatgggtttcacactgagcaaagtgttttttttttttttttttgagacaaagtttcctgttgctcaggctggagtgcaatggtgcgatcttggctcactgcaacctctgcctcccaggttcaagcctctcaagtagctgggtttacaggcacctgccaccatgcctggctaatttttgtatttttagtagagatggagtttcaccttgttggccaggctggtcttgaactcctgactcaggtgatccacccaccttggcctcccaaagtgctgggattacaggcgtgagccactgcgcccggccctgaacagagttttgaaaatgtttagctcagtgtgaaacaggactgagtttttcttgggcgttggtatttattgctggtttggaaatctcatttgtcatcagtagcctagcagagtgagaaagaccacaggttctgaagtcaggctgcctgggttctgatctgggctccatcacttatcgctttgtgcctcagtgtctttgtctatgaaataggaatgataatagtgtttacctcctgatttgttgtaaggattaatggagtttatatatgtacttacatttatacacacacatacaatgttcagaagaatttctgggacttagaaaattcttcataattactgtctagtggtagtggtacagtacagtctgtgtgtaccagactttctgagaacggtttgacctgtcttttttaatggaggcatacaacttgggatctgaaggtcaagatttgtatttgagttttatgacttgctagttctgtgtcctagggcaggtcatgtttatgcctcagtttctagtcagccaatgtcaaaaggctgttttgagaatcaaaatgaaatagtatacataaaagcgctttataaactgtgaaatcctagataaatatgaggtactgaagtcattggccttttattagtaaattttaaaaactgtgaatgcctggggtaaagacctgtttattattatttcgttatttctttcttttcacaggtgttgattgtgtattattttgtaagcacctgaatctagagtagttataataaactagtcgtttttttttgaaaataataaatatttaagtagctgtaattcactcccaggaatatatgattattttcaaattgttggttttataacaaaaatatataacatgttttcgagagaaatattgtaatatctgacaatttttataacattttcaggtttgaaaacacaaacacaatggcaggaaacagccttgttctacccattgttctttggggtcgaaaagcgcccacacattgcatctcagccgtacttttaacagatgatggggccacgatcgtaacaggatgtcacgacggacaaatatgtctctgggatctttcagtagaactgcaagtgagtatgtgaaatgcctattatacattttagatataaaa

SEQ ID NO: 19906 - DNA, 2300 bp, Homo sapien
attattgcttttaagaaatgtttgtatctgttacaactcttcattagtcctatttctggaacattttattcctattttttagttgtcatttaacatgttttttatcgtagtgaacttttaagtatgtttagaaagtccattctcatctcaagatcagttagatattcacctatattgtgatttagtttttaagaattttgtattgtctatttttcttaataattcatgataatggaaattttttggtagagtgacatgattagatttttgcctcagaaggaagtctgtagttctgtggaggtcacatatgttggagtaagagaccagggacagtgaaacctgtcttgaggagcaaagataagtggtctgaatttctgtcgtgacagcgggataggaagaaaacagaatgatttccagctgatgaatcaggaggcccaggaggtttagtgaggggtggagatgagaacgtaaaaatgtgaggtaggtactgtgggatatcccaatacaagccattggagatacaggattgaaactcctttaggagactggtctggctgatgatggaaattagagagccatctacatataggtgatagttcccatgtagggggaagagtgagttatcagggcagctgcctgagagggagagattgacagaggtagaagacttaccaggaggtactctccagataaatctttattaccctccaggatgctggagaggtggcttcttattctttcttttagttctttctttgtctctttatttttctttctatctcgggaaaaaataacaatgtcatatactgcaaagacattaaggaagagagggactgaagaattttcattggagtagtctactactttcagtaaattttgctaaaagggacagaaatttggctagaagaggagagaaatagaaaagggagcatggtcaaaagatagcattttttaaaggatctaagtagactgtaatatgttctttattcagggaatggaatctttgaatagggagagattgaaggtaaaatggaaaaaggagggatatgatggttgtagcaacttaaaggatcaggagccacgataaacggattattccatcaggtggaacagtagtttattttcagagacaggatttgctcataaattattgaaacacattttaatcattactgtgagtaaagagactccctgcttcaataataaactattattttcttggtttttaaactaattggcaattttgtgattgtttcagcataaagttcttctaattgtgtaagctgatatcttttacatgctgctgattggcaaagttagtatgttacttttcatgatataggttcctagaaggacagcttaataagcatgttaattcctctgattatttattgtttattaatgaatgtatgaaattaagcacttttaattataactatcttttaaaaatatttattacagggaaatttacctaaatattctcataactccctgatggttcaagcaataaagacaaacctaacagacccggacatacatgtgctattctttgatgtggaagcgttgattattcaactcctgactgaagaagcctctaggccgaatactgctcttatttccccagagaatttgcaaaaagcatctggcagttcagacaaagggggctcttttttaactggaaaacgagcagcagttctcttccaacaagtgaaagaaacgatcaaagagaacatcaaggaacacctccttgatgatgaagaggaggatgaggagataatgaggcagagaagggaagaaagtgatcctgaatatcggtccagcaaatcaaagccattgaccctattagaatataatttaactatggacactgcaaagctgtttatgtcctgccttcacgcctggggtttgaatgaagtactggatgaagtttgcctggatcgccttggaatgctgaaaccccactgcaccgtatcgtttggcctcttgtcaagaggaggccatatgtcactgatgctgccgggttataatcagcctgcttgtaaactgtcacatgggaaaacagaagtaggaaggaagctgccagcgtctgagggagtaggaaagggaacttacggagtgtcccgtgccgtcaccacacagcatctcctgtctatcatttctttggcaaatactttaatgagtatgaccaatgcaacttttattggtgatcatatgaagaagggtcctaccaggtgtgaccatgatagtttgattttattcttaagtttcaaaaaaagaaacctgttttattttttcattgt

SEQ ID NO: 19907 - DNA, 2300 bp, Homo sapien
tcccggagtgggatgatagtaattaattgttcattgatccctgcaggtcagctagaggtcagggaagttactctagtggccttatagtttgccaggcaaccgggagcagtggtttgaagcctcggtgagaggtgagaactgtcctgtgccctaaaccctgatccaaggtgatgggataattatggtaacttaatgtttatgattacaaataatacacaagtcagctattcagaaaaaccatgccagcacactatttaagacttggggaggatgtggagaaaaggtgtttgacagtgaacatttttcagtacagaatggaacactgcaatatgattgttattatcatcactttcaaaagcttaggtaagtgtccctctgtgggtgaggctgtgattggagaaccccatagatctcatcttggatccacataggtgattgcattctaagagaactcctgtgcaatctgaagggctcatgcacagtgaggggataaatgaagactcagttcaggctccagcacttctgcaaagtcttcttccatctgccacgttctcccaggcttcagtgttctccaacacatgacagggacaccctcctttcatctatgcaatctttattctgcaaatattaatggtgcctctcttttgttccaggcaccatgctaggtgtgcatgttgcatctaagttcccatggagcttgtgtatgtcctcaatggttttctctgtcaacatctcccctctccaactagattgtaagcttttcaaaggctggccatgttgcctgtcttaaacaacagccacagcaaacatttattgagtgttagactgggccaggcacgtggagagctccataaagcttagcacagggccacatcgactagtccctcaataaatattgattaatttaaaaaaatacagaactgaattgtcgagctgatcatggggatggtgaggagcataggtagggggttgctgtggtgaagtcttggtaggttcactgtctcctgtgggatgagattcagaatacgtccatctgaggcatctgtacttgtatgtcagaagctatggggtgaggttattgacagagtctgttgtgtaaactttctttgtgaaatatactacctttaagctatgttacggcttatagaacaatgtggtgtctacatctcaggggcattttaattcagggaagtgagtgttggggtgaaatcagggatctgcttttcttttgaaatattgatagaaggttctttctgtgcacctgcacttctctattggatggcgctggatgtggttgccttttgtggctcttggttgcaatacagttctcttgttgaaatgacctccttctgactgacacatctgccctaggctcatcaatggctaccaaagccaatggacaccttgtggaacatagtgtggcatttcacccatggccttcatgaaatgtaccttttgcggtctatgatccaaggcttttgtagttttccctccatctttttagtgttgttctcagtccccctcatgggctctccaggtgttcctctatctcttctaagttctccattgtaattgccacctatagtctctaccttcagtgagttagatgtctctccccagcccctagtccttgtatctttggacttcataggcagatgtctgcatctgaataacccatacccatcttaaactagtaaataaaaatggaatgcacgatcatgtctctgtctcccatcctcacctctatacctgttctccatttagtaaatggcacctccatgcacctgcccaagtgagaagcctgggggtcatccttgaccctctcctttccctcgtccctcaccccgttgttctccaatccctgggatgagtctatctcctaaatatctcttgtatccctgttaccttcttcacctgccaggccacgaagatcattcactcctcgccatctccttcttagggcactgaaatggttgctgaaattgtctccctgtttcgcccttgcccactggcatttgtttcccacctccctcttagagatcttttaagaaatgcagattacggttcccgcctcacaatgcaaaggtcaacggtgacgccatctggagcgcgcttggaatccagcaggcggttgctgccgcgtcttccacaacctccgcggtctggagctggcctcccccaccgccgccccaaccaccggccccgccgccatcaccaccaccgtcacctccgccgctgcctccttggggccctcctccttcaccgcccccttagccacctctacacattctaggctttct

SEQ ID NO: 19908 - DNA, 2300 bp, Homo sapien
agtagctgggattacaggggcccaccactgcactaggctaatttttgtatttttagtagagacagggtttcatcacattggccaggctggtctcaaactcctgacctcaagtgatctgcccgcctctgcctcccaaaggaacaatgttgtttctaacaaaatacaccacctttcctggccttcccacctaaatgggttcctggaaattgttcttggccagtatgggttggtgaggggctagccagggagcagagtcatgttcgcaaaaggtgggcactcatgagagtggaagaagggaagtaagttcctatgtctagaataacactctcctagaaaacattacatctgggggatttttcatttctgtgcttcttattttcactcgcctatactcttgcacaggattgatttccaatgaaatttgataagtgatattttgttaaaatgtcctgattttttttaattattaaatagctataatcccaggcctgaaaaatcccttatccagtagctacagttgttttttgaagcaccgccaccaaaattattcccctggtaattattgagcaatccgttttcacccataagcctgtcacatgtaataaggatgcctgcctgcctgtttattttctggctaatttggtccctttacatcatgtgaccttcagtggcctgtatgcaatatgaaaatcgtcctcctaggactttctttagaaggttcacagaggtgtgctaagcataagtaatacatcagtttttaaatccaggcagagcgaacccatatcagatgtctcaggaaagcctgcaatgctgttttataaagggaacagaagagtttcttgatctttgctattctctgcaagaaaatatctcacctaagtacatcctttcgtatgcactctgtagcaggacatttacagggtcagagaaaaagacactaaaaacttacccaagctgttagctcatatttattaactgcttaatataggccagggtgcaaaggcctttatatgctttgtttaatcttcccccaaaccctgggagatttttatcccagttctgcagattagcagactgaaacacagagaagttgtaacttacccaaggtcacctggctgtggatgccagagtaagcatttattttaattgatacataataatcatacatatataggtacatagtgatattttgatacatacaatacatagtgatcccatcagggtaattagcatatttgtcatttcaaacttgtatcatttctttgttttggggcattcaatatcttctcttctaggtatatgaaaatatacaatacattattgtaactatagtcatcctatagtgctatagaacactagaacttattccttctatccagctgtaattttgtatcctttaataaatattttatcctctctcccccgtacacttcccagcctctagtattctctgttctactttttacttctttgagatcagcttttttagcttctgtgtatgagtgagaacatgcggtgtttaactttctgttcctggcttatttcacttaacataatgtcctccaggctcattcctgttgctgagaatgacagaatttcattcttacttatggatgaatgggattcctttatgtatatataccacattttctttatccattcatctgttgttgaatacttgggttgatccatatcttggctattgtgaacaatgtggcaataaacatggtggtagatatctctttgacatactgatttccgttcctttgcataaacgcccagtcatgggaatactggatcttataatagttcagtttgtagtttttttcaggtacctctgtactgttctccatagtggctgtactagaatgcattcccaccaacagtgtatacgagttcccttttctctgcatccttgccagcatttgttattttttgtgtttttgataatacccagagtatgcttttgaagtcaggtctttctggctccacagtctgaaggtgtaacactaccccaggctgcctctccatagcatgtttcctgatttctggttcaagaagactttttctaacaggtgtcattcctagatggctctcttaagatcttactccctttggcattttacaccttactcatacaatcatttttaaaaaatagcaatttaaaaaaatacagttcaagtgttcatcatatccaggcatgcaagccttttctaaatttttttaaataataaaaaagccccacagaggaaaggaggttatttgtgtcctcctgacacacacttttagattttggttaa

SEQ ID NO: 19909 - DNA, 2300 bp, Homo sapien
ctccacagtctgaaggtgtaacactaccccaggctgcctctccatagcatgtttcctgatttctggttcaagaagactttttctaacaggtgtcattcctagatggctctcttaagatcttactccctttggcattttacaccttactcatacaatcatttttaaaaaatagcaatttaaaaaaatacagttcaagtgttcatcatatccaggcatgcaagccttttctaaatttttttaaataataaaaaagccccacagaggaaaggaggttatttgtgtcctcctgacacacacttttagattttggttaaaaagtctctagtgggtgcaaagtgaccccctttgtcactggaaacaaataggagcattctttgtgccactgtccacaaccacacagatatgtttcccaagggagctcatcaggtcttcaaacatttagcaagcatgacatgtgtaagagacagtattggagaagtaagacaagccttgctctgccgaagcttacaatccaggagctcaccccttcaaggaatttacagcctccagacagataataacattaggtccatgaaagcctacaaggcaagaagttcaggagagaaagaagtcataaccatcttggaagaatctcaacttgttttatcagaactcaaacgccaatttctcacccctagcttccctcattagtgcttattaactagtattgggaggaccaagcgaagagtaaagctagggtagcagaggccataagctaattgcaaaggacagagctaaagaaacatgctagtttcccctgagcacccaactgcatgactgaaaatggattaatttgtatttctaatggatatacaagaaacacgtgaatatgctaaaataaatttaaggtcaagcaatgcaaagtgttagtgcgtttgccttccactctcagaggcagcctctattatttggttcttgggctgcttcataaaaagttctgtgttttttaatggcctcagcttttgggaggctcaggccacctagcccatcaggagaccaggcccgaaggatggatctgaagagtgggcaacggagagttaaaccagggctgacttcaacaggcccagtcaagtcaggggcaagcacattgtccatccactggaagacggaaaggggagaggaaggcaggccctcccgactcacaggtcacctcgcaactttgctaggcactacccaccctttagggataagtgaagtatgtggtgggcatacaaggcgcacaggggagtcattctggcaaattccaagaaggttttaagggctcccgaggcaggcaggcccagttgctgtttggagcttcctttggggtgggaggatggcgggggcagggggccggggcggtgccttaacgaggggagatgcttttaaatagctgccttccaaaaaccatcctccctgcttctttgagaagcacccagctgttgtttaccctccaggacagcaaatccggttatttgtctctctattccgtgatattataaagtaatgaatggtccattaaactaagtttgggatcccgtctccccacagccacctcctcgccggcaccctcagccggggaggccgtaggctcgggctgcagcctggcagcctcagtccccctccctccaccatttccctctactccctccctctcctgcaccccctccccccggttatttgggagattagagttcattaattaaatcctgtgcttagatcgaactgtaacattattccaatcacatttatcttgcaggcggcggaggagatggcagcctcgctggaaacgcgcgggggagcctgagccggcggccggggacgcacggcgctgcgcgctccttcgccacgccgccgcgcagcccctccatcttcctgctcggcaccgggccccgcgcgcccctgcctacggggtcccgctgctctccggggctcctgccagccccaacccccggccccggtggcctccccccacccccgcccgggtccccctcctccgccacacgcgcgcgcgctcacacacacacacacacacacacacacacacacacacatatatacacgccagcgagctgctggccgctcaatggaccgatttccccggtttccctgaacccagcccagcccgggatgagaaactgcaaaatggcccgggtcgccagtgtgctggggctggtcatgctcagcgtcgccctgctgattttatcgctcatcagctacgtgtccctgaaaaaggagaacatcttcaccactcccaagtacgccagcccgggggcgccccg

SEQ ID NO: 19910 - DNA, 2300 bp, Homo sapien
gataacacagagaagacgctatttgaaagaataattggcagcgtattggccagagctcaatgaagttgatctatgaataacgtcactgtacattcatgtgacagggtgggggtgggggtgttgctctgaagcaagaagagagaggagggcggcagaaaaggtcactgagactaagaactgttttccaaatgaatcaaacctttctctggcaccaagaagggacatacagtattccgagctctgcccttgttttcttatcaagttttctctaacagctggaagtggttgaagggggctgtcttaaggagaccccctgctcttcttttgacagctgatcaaaagaaaataggtcacgcttctcaaacttatgtccaccctgtccttaattactgtctctttaaacaaaggcaacatctgcgcaacctcagctagcttgaatcttcggaggcaaacagagcgcaacctgctttggaagaatcttgttacgtttaaggctttatgccgggtgttggcctctctgtcttcaactacccctccaccccgactcggactgcagaaatctccaactctctgtcccccagttccactcccacctccagacctggggttgccaaacaacggaaattctaggaagacgtaggtgcggtttttaaagccttggcttgtgagcgttctcaggctggccggggcgctggtcttttcagaaacaaggtttgaatatgcaggtgtcagccaggattccttgtcgtctgcccaccgccgtttctctcccgggatttgagagaagcgggagtgtgtgtgtgtgtgtgtgtgtgtgtgtgtgcgcgtgtgtgtgtctcgtgttaggagaaaggtccgtggttgccgtctcagctggtttgcttactctctgcccccaggagaagtttgctcacttgggacaccagcgaccctcctcacctccacctcaccggttctacactctccccacttctttccaagtcgctgatgcagaaagcacttggtcaccttgaaacggcagctcccggaattctagttttgttttgcaatctagcagggctcttcggaagcctcataactgagatttatgggctcaccgggtaattaaatgatgttattgtgttaactttgcatgcattactgctgcccgcgccgcccgtgggccgccggccggccgcagctcgctggcgacgagggcactacagttgctctgaccgcgtagattatgcatgtcccggcctcgggaatttaccatgcattagaatacattagcgcctgcattttaaaaggctaaactattggctcccagctagggactctcggtaagtggcttgttagtgacgagtgtttgtctatactggcacatagcggagtcttttgctcccggcttactcgcctccaggaaagctttggggtgaggcgaaggcgattgaagcaatgccccttcccccagatcgcagctgctcaggggggacacagcacggcatctttcaccgaatctctctcgctcgctcgcactccagcctccctctccccagcgacccccccaccttctcctccctccctctccttgacgtttgattccagtagcaaaggaggtaaaaaaggcaccgagccgtcagccaaacctgaaaagtgcggccccgccccctccacagccactggtagcttcccgtggaaggcccgcctcccggggcagctgcggcctcggagtggttgcgcttggcgcccgtcgggcgtggccccgccccaggtccgggagggtaggttggctgccccggcgagcggcagagcccttctggacagctcccgctcacccaaacagaagacgtcggcgccggagcgggctcggacatggcgaggctgcgagccggcccgagcggcggggcccggtgatccctccctccctccccgtcccctcccctctcccgcacgcacgccccgtccgcccccaccccgcccccaccccgggcgagcccgcccgcagcccggggcgcacacccgcacgcgcactcctctccactcactcccgcgcccgcccccactcccgcagccgagccccgccacgcgcgccttgcccgcccgccggccgcccccgccgcccccgccgcccccgggccctgatggactgaatgaaggctgcctacaccgcctatcgatgcctcaccaaagacctagaaggctgcgccatgaacccggagctgacaatggaaagtctgggcactttgcacgggccggccggcggcggcagtggcgggggcggcggcgggggcggcgggggcggcggcgggggcccgggc

SEQ ID NO: 19911 - DNA, 2300 bp, Homo sapien
ccatatggctctttttgagtgctagtattttgcatttcacataatgtagttattttgagcttttaaagagagcatttagacaaagaagcaaagagaggaagggaccaatcaactcatcagttccatgcatcaacaaagcatagctagtagaggaatataaatgacagattgacaaactgtaggaaacactgttactctctttctgaagttttcaagcaccatcctatgtgaaagttccctcctgtccaaacaagctcaaggcccatcttctccctatacaaggcaaacctgtaaggccttccttccaaagagtacattgctttggttttcttcctaaattcctattggaattagaactctcagaatccctgggagacagagcaaagatgacttaattcattgagcagcagagctccctataagtgaacatcaccttccccatctttcctactgccacacccatacgagagaggatctagaaagagcgatggcagcctgaacacagaaaacatccccacttggcagacctctcctcagcaatccccccagcctcatgcttcacttgcaaagtgtgacataaccacgggacgagtgccttgcttgaaccaaagcaacgatttagccagtctggacctctctgtgctttttttaattcttcctgtgaatacctcagcttcaactgggcctccatacagtcagttggtgggcttattgtactgtggtgctttgcaatgcaaccctgcaaagaacaagatttgtactaataccaaaggttctttctctatgtctcctcctctgcctccctcgttcttcccttttttctagttcttcacggttccaaagctttactatgaacctgggcatgttggcaatgcagaccgcgcaattccttaccgaattttctcagatatacctcatagacaatagtgtttagagtaatgttattatagcgtatgtaataaattattcactgtttcttttggtaactgtgatttaaaaaaagaaaaaagaaaaaaaagctttatacgttttaggttgtgcttttgtaatagatgaaaaaaggtgcgcttaaaaagaaaatgtatgtttttttccccctttggattttatttatgctggattggggaaagttgcagaatgagcccaaagtttacagtttcatattttgctgaagaaacaatctgtgttcatttgctctgttgaaaagaataattattttctacatttgtgccacttggtctgaacaattaattgttccgtgttaacagtgtagtattatgattagcaactgccaatcagtgctataattttatgcatgaggctaaaaatttagcagtgtgatgcattgtggtcttaatagcaacatttttcattttgaactagatcttcccctttggttcaatggactttatttatgcatgggcgcctattgtttgttagcagttgtggaacagttgtgtatacattaaactgtgaaaatgtacacagttcagcctcagacggtggtaatattggttttattgggagatgtgtcacctcgaaaataccctttacatctgttgggatctgaaaatgagtcacattgaattgggttccagctttataatgagaaacgttattcctaatttttgagttagccaatttgcattccacaaattgggatcctcataacccaaatatatcaccgtatgtgagagggatttgaaagcgagtattgaaaaactcacctttgcatatttaatttccaccaaaaggagttattttggctttatgctcatgaacttagacctaactggccatgtatatgtagatgcaaattcatctagctgtggccctctttgatctctgcttgggaatggctatttttgactatgcgtggtttcttctcgtattttgtgatcaggtcagctcccagtagaaactcaaatggcatcaatattactaactcttctctgcccacttctcttttgtccactctcctagacattcccaccaactgttccagtgatttgggcaaaaatacgcagccatttcccaaaacttcacatgtgcagctatcatggctgtccctccctagacttggaggtgactctcacttaatttttacctgcccaacaatgttccatctaccatctaaaaggtaatataagaagaagttttgaaacccactttaggaaaaccatcttctttaaatccttcaattatctgaggcctctatatgtcaaaactatttttcagttgcaggggattgggcaaacttgttctttcttatacttgggttcaaagacccattctccagt

SEQ ID NO: 19912 - DNA, 2300 bp, Homo sapien
gcaggagaatcacttgaacccagtaggcggaggttgcagtgagccgagatcgtgccattgcactccagcctgggcaacagggtgagactccctctaaaaaaaaaaaaaacaaaaaaaattaattaattaatgaaaaaataaaaaataaaaaaagaagtcagtaaaaatgaaagtgcaagatgcgaataaaagaaatgaaatgatgctgattcattaaaatatttaataaagtatgtcttgctagttccataatcatttctggacagaaatttaacccacgccagccattgattttgtactggtgagacttggcacctttatgccttgtcactaatcatcagcgtttgcctgggagggaccagaagcccccttatctctacccagcaggagggcccagcaccctggatggaggggatgactttctccagggcctcccagaggggacaagaagagccttcatagctcagacgtctaacccccccggccattttattctctggccttgtctacatgtctgccagcacagcattgcgaggtgtgcagcctttcaatttagtttctttagaagaaatgggctcaggccgcgcatggtgactcacgcctgtaatcccagcactttgggaggccgaggtgggtggaccacttgaggtcagaagttcgagaccagtctggccaacatggcaaaactctgtatctactggaaatacaaaacaaacaaataacaacaacaacaacaaaaatgggttcagactgtaggtagagaagtatgttatccatgaagatcacctctttacagggcaacttaagaagactataatttttttatgagggtagagaatagccacacatataaggaaggtgggttgatacctggagcaggttttactgtgcttttctcaggacatccgcttggatatgaagatcatgtaggtaatatgaaaggctatccatttaatttgacattttgcattgggcttataaccatcaggaggaccaactttaataagaaataaactaattccatcagtagcacatatttaagctacagaaaactgggtttcagctgaatctagactccatcttccctgaatgttccatatggcttgccccctttgctcaaatgtgtataaggcctttgctcgaatgtgtgagactctgacccacctgcttcaaattgcattagtcccttcccccaccctaccccatctcttttaccttgcttcattcttcttttgtcctgagagggaaaaagaagaggggaggccgtggaagggctccatcattcaaagtattacatgttgtgattattttctgtgtctcccctaaccccatgtaagcccccgtctactcttttcactactgttttcccagtgcacatagtaggtgctcaatatttgttcaatgaataccgatgcctgagacctttctgtaccaagggctggtttcctactccacaatgcactgaacatatataggcagggtgggctgacggaggtgtaggaatgaaatgggcgcctgttcctcccagtgatctcagtgtgcgaccttgggggcgggacgggcggctaaactgggaaggtgcgcggatatgatacagacaaacctcatcataccgtccctccaagaaatgcacttgccaggctggccttcacttttcctaatgctcttcagtgagtttcacctgtcaaattctgctacacagagagggtgcagagaaactgaataatccctttttctattctgaaaataaagcaaaacaaaacaggatctgcacacttgtgttgtgactaggcaggcaaactggagaactgaggcaaaagcatccttatatctaaataatagtaatggaaacgtcgaaaaaagttatttgctgagtcatggctgaggatcctgacttcgctagtttggcagatgcaaacagggcacgcaactaggagtccagcaggttttgcagtgacctgcgatggtggtggggagcgggcttctagctcagcccccgggcccattttcacgcagggagcggcgcccagctggggcgggctctccgcgaggggcgtgtctctgcctggcctcgcccgccccggcccggcagcgaatgagcgggcgcgccgggagggcgcgaggtcagggggctggggacgcgcgtggggatcgctacccggctcggccactgctgggcggacacctgggcgcgccgccgcgggaggagcccggactcgggccgaggctgcccaggcaatgcgttcactcggcgcaaacatggctgcggccctgcgcgccgcgggcgtcctgctccgcga

SEQ ID NO: 19913 - DNA, 2300 bp, Homo sapien
ttcataaaattgggtgaaatattccttaggaatagtatttggtacttttttttttttttttttttgagatggagtctcactctgttacccagactggagtgcagtggcacgatctcagctcactgcaacctccgcctcctgggttcaagtgattttcttgcctcagcctcctgagtaaccgggattactggcgcgtgccaccacgcccggctaatttttgtattttgagtagacacggggtttcaccatgttggccagactggtctccaactcctgacctcaagtgatccacccgcctcaacctcccaaggtgctgggattgataacaatcatgagccactgtgcccggacttggttcatattcttgatgggccctgaacctatatatagagttatttttttgaggacctctcataaaaaaaaggttttcttttgcttcagggacaaactctggtattccactaaattgagaatgggctgggcgtggtagctcacgcctgtaagaccagcactttgggaggctgaggcaggaggatcacttgatcccagaagttggagaccagcctgggcgacacagggagacccctcccccatctccacaaaaataaaaataaaataagccaggcgtggtggcgtgcacctatagtcccagctacttgggaggcttaagtgggaggctcacttgagcccaggagttcgaggctgccgtgagctatgatagcaccactgcactccagcctgagcaacagagaagacccagtctccaaaaaaaaaaaaagcccaccaaaaaagtaaaaaaaagttgaaaatgatgacagaccctttattagcacctcttacatgcccgggcagtgaatttatatcatctttcacaaatagaaaaactgaagctcattcagattaggtaatttatctgaagacacagataaacccctctcagcgcctgactctcggcgcaatcgggatgtttcgcagcggggcaggggcaggggccggagccaccgccatcgcagcccggggaacaacggactcggggaagcccggcctggcccttcaagtcccgggcccagcaagggccaggaccctccctccctccctgcaatcggtcccaactcgctgaatgaagctcattcagtttaggtaatttatctgaagacacacggttagtaaaaggcagaacccaggtttgtattccgaagccctcgttctttccaccacattattatggccttcctaacggtaatccttacaattttaaatgaacatataccatagctcctctcctgaacaccgagggacgctggctcacggagtttagaaagttaacgcatctggccgggcgcgatggctcacgcctgtaatcccagcactttgggaggccgaggtgggcggatcacaaggtcaggagttcgagaccagcttgactaagatggtgaaaccccgtctttactaaaaatacaaaaattagctgggcatggtggcacaggcctgtaatcccagctactcgggaggctgaggcagaagaatcgcttgaacccgggaggtggagggtgcggtgagccgagatcgcgccactgcactccagcctgggtgacagagcgagactccgtctcaaaaaaaaaaaaaaaaaaaaggaagtttacgcaacccgctgcgtcccctccaccgccgcgcaccccgtctcgcagctggcgcggtgtttgctggtgacatgaactcaaccagcctccaccatctggggatcggggcgacatccttggtctggtttgcaagaggacccgcacgcctccagctggggcggaattggaagattcagaaaggaaagttggggaggcggggaaggaagggtgcaaaagtgacactgtgccagggtctccagggccgcggagctccgggacaggcagcgccttccgagctgcacaaacgcgtggggcggggcgtctctggatccggaagttgcctctgccctcaccaaagatggcggccccggcgccgctcgcccacctctcgtaaccaatggaaccgcggcgctcggccgattctcgcaggcgccctcagatctacgctctctgatgcaacgccggaatcgcggaaaccgccggtgcacgttggagtcataagacggcgtcggtgttgcagtctgtgtccttggaggtgaccagggccactgcaggcatggtgctaggtgggtgagactcagtgtatggcgcggtgttccctgcctggggcaggaactctgctccagtcgggtttcggcgctttccttagtgcctaccagagtgggcgccccgcgaatgttt

SEQ ID NO: 19914 - DNA, 2300 bp, Homo sapien
aaaatattttgggggtccaagatattttcctttcacactcccttctcccatacagaaggaatatacttccctgcttcatttctgctgggcttagccatgtgcatttactttggccataggatattggcaggtgtgatgcaagcaaaggtttacaatgtgtttgtgcagttggacttgtgttcttgcttctgccattgttagagaagccgaggcctaggagggccagagtgacaccattttaagttgagctccatcttgagactccttgccagtcacaacccatggtcataagatgtttacagttgagaaaacagcctaaagatacctgcaaggacacaatcctgtaacaacagaaagaccagatgtcccaatacccgtaatatatgctttcaagataattatagttatgctttaatgtacttatacactaaaatgtcaaggagagttttctttaaatcaataaaataataaattttgtcatgctgtcagaccacatgcacaaagacacagcttagtttagcctttacatagacaaaacccctatatatcaaatttttttttttttcagacagagtctcgctctgtctcccaggctggagtgcagtggcgcaatctcggctcactgcaagctccacctcccgggttcacccattctcctgcctcagcctcccaagtagctgggactacaggcgcccaccaccacagccggctaattttttgtatttttagtaaagatgggggtttcaccgtgttagctaggatggtctcgatctcctgaccttgtgatctgcccacctcggcttcccaaagtgctgggattaggcgtgagccaccgcgcccggcctatatatgaaaaatttaaaatggccaggcgcagtggcccagcactttgggaggcgaggcgggtggatcatcctgaggtcaggagtttgagaccagcctggccaacatgcgaagccctgtctctactaaaactacaaaaattcaccaggcgtggtggcgggcgcctgtaatcccagctactcaggaggctgaggcaggagaattgcttgaacccaggaggcagaggttgcagtgaaccgagattgtgccattgcactccagcctgggcaatagagcaagagtccatctcaaaaaaaaaaaaaaaagaaaaagctaaaacaaagacggggcattcctttgcttgcttcctaaggacgccctactctgtaatggaggcgctttcaataaactctcaccgtaccctgcaacttgtcttgaattccttcctgcgtgtaattcaggaggcctctcttggggtctggatcaagaccgctttttctgtgaacaaccaccatgagaagaacacgccctgactgacccactggtccagggaagctgagacatggagaagacagggacccaatcttcagcttggagacacgtccagctgaactcagcccacatcagtgacctgcagatgcataagtgagaataaacgattgttgggttacgcctctgagtttgggaggcattttgttacacctctttagtgtggcaatagtagactaataatacatgctctattatgcagaagtgtgtggcttaaaataatagttgaatgaccaggtgcggtggctcaggcctgtaatctcaacattttgggaggccatggtgggaggatcacatgaggccaggagttcaagaccagcccgggcaacatagtgggacccccgtctccataaaatttttaaaaaattagcctggcgtggtgggcgcacgcctgtagtcccagctactcgggacggccagaatgaacggcattatcgtctgtctcttcattctgattctggccagcaaggggtggcctccccctgcggtccttgctgttaggtccctgcgccccctcagctttgcgctgaaggtcgctttaccggaccccacttcgccctaccaggcgcaggatgagcgtctctgttcttttaatgtggcgtcccccacaggccaccgtaccaggccgccggtccggggttagggcacttgacgccggcgccgccatgttgtctccgggccacttccgcgtttctggcgcgtggtcttgcatttcctacttggtcctgttcgtggcgccgcgcctccgggtgttggggagtccgggatgatggggaatccggggctcgccctagtcgcggggacaccgccttccaggagctgtccccaggcaaactcacagacatcttcaaagagccttcttggacattctgctttttgctcctcataacaggcttcggtaagagaacaggcaaacatcactgcgggcg

SEQ ID NO: 19915 - DNA, 2300 bp, Homo sapien
tggccaacacggtaaaaccccatctctactgaaaatacgaaaattagctgggcatggtggcgcatgcctgtaatcctagctactcaggaggctgaggcaggagaatctcttgaacctgggaggcagaggttgcagtgagccaagattgtgcccctgcactccagcctgggcaacagagaccgcatctcaaaaggaaaaaaatatatatgacaaagtgtacacatttaaaatgtgcaatttgatatgttttaacatatgtgtatacctgtgaaaccatcaccacaattggggttagggaaaaaatccatcaccccaaaaagttttcttttttttttttgagacagagtcttgctctgttgcccaggctggagtgcagtggcctgatcttggctcactgcaagctccgcttcccaggttcatgccattctcctgcctcagcctcccgattagctaggactacaggcacccaccaccatgctcggctaattttttgtatttttagtagagacggggtttcatcgtgttagccagatggtctcgatctcctgacctcgtgatccaccggcctcagcctcccaaagtgctaggattacaggcgtgagccaccgcgcctggcctaccaaaaagttttctcatgtatttccctagtgactaatgatgttgagcatcttctcatgtgcatttttgctttacctgtatcttctctgttgaagtatctgttcagatcttttgtgaggacaaggtacggggttccaggtagggatccaagttcattttttcgcatgtggatatcaaatgtcccggcaccatttattgagatggccatcctttctctacctcatcgcttttgtaaccttgttcaatatcagttgtccattgatgtatggatttatttatggactctattaggttccattgatctatctgccctctttaagccaatactatgctgttttgattgctatagctttataacaattttctcttttttggccctaatttcacatttattttatttttaaaattttgacttttattatagactaaagggtatatgtgcagctttgttgcatgggtaaatcgcatgactctgaggcttgaggtcccagcgatcctgtcccccaggcagtcagcatagtacttaactagtcgttcttcagcccatgctggtaacaactttcaaaatcaagtagtgttcttcctccaactttgtttttcttctgcagagttattttggctattttaggtcctttgcatttccagatgaattttagaatcagcttatcaatttttaccaaaaaaagaatctcatgggatttcaattggaattgcattgactctacacatcaatttaattgcctcctcttgtttcttttttatatgaaaggttgtccccatacacacagttctgcacctggctcttcacactccacaatgaatggagatctttcattcttctcccttagctcccattatagtttcattgtatccttttgttgggatggaacttatttcatttaactgtagtgaaactgatggattgctagcttactgctgatattttgctattacaaacagtgctgcagtataatcactgtacgtgtcatttcccttgtgggcaaatatatctgcaggatgaatttgagaagtgtgattgccaggtcaaagggaatatacatttaacattttactggcaagggccaggtgcggtggctcacgcctgtaatcccagcattttgggaggctgaggcgagcggatcacaaggtcaggagattgagaccatcctggctaacacggtgaaaccccatctctactaaaaaaatatacaaaaaattagccgagtgtggtggcacccgcctgtagtcccagctactcgggaggctgaggcaggagaatagcttgaacctggggggcagaggttgcagtgagctgagactgcgccactgcactccagcctaggtgacagagctaaactccatctcaaaaaaaaaaaattaatggttatggctaaatcctttcctagagtttcataatttatatacttttcattaatacattagaaggcttgttttgccatagccttaacagtgcattaccaaactttcttgtttttgccaaattaataggtgaagatggcctatcaaaatcattttgattttcacttctttatttcaggtaagtttaaacattgtttcatgtgttgaagagccatttgtatttctttcttttttttttttttttttttgagatggagtctcgctctgttgcctgggctggagtgtagtggcgcaatctcagc

SEQ ID NO: 19916 - DNA, 2300 bp, Homo sapien
agctgtgagtcattacaacaaaaggacacagagcaagatcaccaaagactcatggagcaaagtgcaaaggaaaccaggcacaagcttccaaaagtcggccgtcctgcccccactccccaccaaaccacacacacaataggcacttaattctcccagcagcaattaatgacaccacatgtgaaatgttgtctataccagggaagctcatgagagactcagtgtcaaaggtttttaacaaaaaaactctagactccccaaaagaatgcagatggtcagcataaaccatgctgtttgcacagttaggcatcatgagtttttttattattattattatttgtttttttttgagattgagtttcactcttgttgcccaggctggagtacaatggcatgatcttggctcactgcaatctccgtctcccaggttcaagtgattctcctgcctcagcctcccaagtagctgggattacaggcacctgccaccacacctggctaatttttgtatttttagtagagacggggtttcaccatgttggccaggctggtctcgaacccctgacctcaagtgatctgcctgcctcggcctcccaaagtgcttggattacaagcatgagccactgcacccggcccatgagctattcttatcagagaataaaaaataactgggaaatcctccaaacatctaagttaccagataccagcccagggcgaaccttgcaagccggccttcggaggaagcagtctcagacctgctatgtttgctcttttctgcccacgtggtgaccccaaatattaagcactccttctatttcccaatgaaaaattttttcaagtatttaattcaatttgaatgcatacttctaaaacttattctttgattgcatatacatgtttaaaatcacataaaaataataatttaagaaacattttcccctgctttctcatttcatgaaaattgtatttgaacttttcacattcatctttggtgtcatggttgtggttatccactctcaaagagcctgtttggcactctgctctttccacgacaaagttgtgagatatagcacttttggactccatgtccagaaatttaaatttgtctctggaaattttattcccacttgcgaatctccaagtaccactaggatggttgactttttattccttccataaatatatgctcataacttctacaacataatacttatcatattgcttcttaagtgatcttattttacaatgtcatgcaatacttatgacattacaccttaaggaataatcgcccaaatataggtgaaattttcttgccctgaaaaaaaaattctggctgggtgagggccacctgtaatcccagcagtttgggagactgaggcatgcagatcacttgaggacaagagttcgagaccagcctggccaacatggtgaaactcgtctctactaaaaagacaaaaattagccggccttggtggcgcgtgcctgtaatcccagctactcaggaggctgaagcataagaattgtttgaaccagggaggtggaggttgtagtgagccacaatggcaccactgcactccagcctgggtgatacagtgagacgctgtctaaaaaaaaaaaaaaaaaaaaaaaaaaaaatctgttgaatatcttctataagcattccagttttccagttcagccttgttggaagttgtttcatgctaagtaagatatcttccccaaacagtatgttattgttcaaagtaaacgtaattgagagaatgccctgtaatataagattcttcaaggatttgaatataagacaccaccttctctttggagagataattttgggaacaaaaccttaccttctatgggagatgtaggatacatcagtcaattgcagcaatcaaatagactttcaaagcgttatgatagtgctgtttttatttgacatatattatttttcagactactaaattctcaatcatatgaagtattgagtaaggttaattagcatctaggaaatgcaagaggttggaaatccatcttcagaatgcatttaaatgttttctgtcttctagatctttgttgttcttattctgctttctgctggtcttgccatcggccatgcttattgggaagcacaggtgggcaattcctcttggtacctctatgatggagaagacgatacaccctcctaccgtggattcctcattttctggggctatatcattgttctcaacaccatggtacccatctctctctatgtcaggtaaggctgtcctctctggcattttgctttaatggaagaatgttgtaccttc

SEQ ID NO: 19917 - DNA, 2300 bp, Homo sapien
gtatatggtctgcccagggtcaggccagcatcagaggcagggtctagaccaaggccagcaaactttttctgtaaagggccagcaagtaaacattttaggctttgtggaccacgtggtctctgccaatgttgagtgtaagtgaccgcagacagtacatcactgaaggcagtagaacatggcttgcttttaccatgatgccttttcttttgtggcttttctatttcatctcctgctggttctcccaccctggcaaacagatgtgggcttctcttgtagctcttctccatgagcaagctgagacttttctctctggaccccagatttgatatcaggctgaaaatatttcctccatggtgttccctaaaattctagccgaacaaccttagcatcacattcacagaaatcattatcatagtgttctggtttcagcgctccagacacgcctccctgcagccttagtcagagaagcctcggattttagctggttttcccgaggtctctgttactgccattctgcccttgaaggctttctagaagcctctttttcccccatgccaaaccccccctctagtttctctttcttgggttctgctatctggatgagctatttttttctaataattttaacctgtagaagatgtgatatgcatgaaatcccatttctgcaatgattcttcctgttctggtcacagaatctgcctgtggggagattctcagtgtggggagtgcatgcaccccgcgagccccatctcacccaaatgtggggaggccattgactcctgtatgttgtgtgtccgctacctttccatagcaaacatttagatggattacctcttagagtgggtttctggttttgatttcaagctgttgaggattgagcttaagtgccttctgccttgaatcagaaggtactaaactcatgatacttgaccaaaattaaagtgaaattccctgccgggcacagtggctcacgcctgcaatcccagcactttgggagactgaggtgagtggatcacctgaggtcaggagttcaagaccagccagaccaacatggtgaaaccccgtctctactaaaaatacaaaaattagccaggcgtggtggcaagtgcctgtagtcccagctatttgggaggctgaggcaggagaatcactagaacccggcaggcagaggtggcagtgagctgagatggtgccattgcactccagcctgggcaacaagagtgaaactccaactcaaaaaaaaaaaaaaaaaagaaagaaagaaaatggaattcccaccaatctgaacaggaaggtggcctctgtcataacaggtccagactggatattggtgaactagctaaagctgaagcagccagacaagttacaaggaagttctagttgattgcccaaacagtgaataaaacatgcttcttcctcattcctttccccgctaattgcactgcttagtctcctatcacaattttggaatctctaccaaatgtagatatctgatggggtggcaggagaattggctccatggggtccagggtcaactttgctcttggtgcttggtggcacgccatcagacgtgtagtccgagacacagcaaagggaccgggattgggtgcctgcagaaatgtcagagacgcatgtagtgggtggaaactctcatcccctgtttttttacaactctgcctgcccattctggtggttaggatcctttcctgatcattcagtttgcaggtcatatgttttgtagatttctaccctcggtatatgggcattaaaagagctcagtcttggccgggtgcggcgactcatgcctgtaatcccagcactttgggaggccaaggaagttgaatcgcctgaggtcaggagttcgagaccagcctggccaacatagtgaaaccccatctctattaaaaatacaaaaattagcccggcatggtggtgcacacctataatcccagctactcgggaggctgaggcaggagaatcgcttgaacctgggaaatggaggttgcagtgaaccaagatcccaccactacacgccatcctgggtgacaaagtgagactccatctcaaaaaaaaaaaaaaaatgctcagtcttgaatcttagtcatgttttccaagggtgatttatattcctaggggatttgggtggttctcgcttctcaaaacccatatcaaatgactttgcctgtgactttttacaaaaattcttattctaatacctctctgcgcccttcccaagcacacagatgatgttcagtaaatgccagacctctttcctcccatttcccatgtgccctgcctcc

SEQ ID NO: 19918 - DNA, 2300 bp, Homo sapien
ttcctaagtgtccatttgtgaatgtaaaaattattttagagatctaagatttggtgcaaaacttgcaatcagctacatagttctacttgaggcaattttcactcaaaatatatcataaaccatagtacaaaaatagagcatagacctctccttgtgaagcagttgtttttgccttacattttttttttttttttttttttttgagatggagtctcgctctgtcgcccgggctggagtgcagtggcgcaatctcagctcactgcaagctccgcctcccgggttcacgccattctcctgcctcagcctcccgagcagctgggactacaggtgcccgctaccacgtctggctaattttttatatttttagtagaaacggggtttcactgtgttagccaggatggtctcgatctcctgacctcgtgatccgcccacctcggcctcccaaagtgctgggattacaggtgtgagccaccgtgcgtggctgccttaaatttttaataatcattgtgcaaattatttagcactccagtgttttgatttttctcctctgctgggtaggaataacaataatactgttattcaccatggtggtgtgggaagtttcaaagagcacatgtctataaagtgcttagtgcaaggcttggcatgcagttaacacaaaataaatgcgagctgctgtcattaacaatactgactacacggcactgtgatgcttatgtaaatgccaggctgtgtgtctgtaacctgaggtatttgtgtaaatattttcctaaaataaatctaactaaggttgttcttctcacttgtatggggtcatcttatgcggtagatgctcaaacacaaattccagatacagagtgggcagtggtagttaggaagatagaaaggctagggagtgttcctgggaagtcagtaaacttggaagatctaaggttatattaaaaatgttgtatcagaacaaaggctcaggacgttagtgttagcagaaaccagatatcttagagcagtggtttgtcaactttgccagcaatccacagtaagaaattcaactccggccgggcgcgggcctgtaatcccagcactttgggaagccgaggcgggtggatgacttgaggtcaggagttcgagaccatcctggctaacacagtgaaaccccgtctctactaaaaatacaaaaattagccgggcgtggtggtgtgtgcctgtaatcccagctacttgggaggttgaggcaggagaatcacttgaacacaggaggcggaggtgacagtgagccgagatcgtgccattgcactccagcctgggtgacagagggagactctatctcaaaaaaagaaaaaaaagaaattcaactccactaacacccacaatgcaaataaatgtgtgaatgtgtacaactattttatcaagcagtacttattatatgtgctgtaatctgatattttatagcctgtttcattttattttaatgttgattgttacccactaaatttatttcattgagaccccctaatttgaaatattgccttgaatatatatatacatatatatacacatatatacatatatatacacacatatatacacatatatacacacatatatacacatatatatacatatatacacatatatacatatatacacatatatacatatatacatatatatacacatatatacatatatacacatatatacatatatacacatatatacatatatacacatatatacatatatacatatatatacatatatacacatatatacatatacacatatatatacatatatacatatatatatacacatacatatatatatatacccttgtttaaaaataaaaggtttgcagctccatattttttaaaaaaatcttacccaagcatttaatcagtactgaatggttttgttcttgtcttcatgtcaagttgaatttgggggtactattccagaatatttacatgttagacaatgttctgtaaaaggggcattgtagcagcatgcaggcagtattcaaccaaaaactgggcaagagtcataattcactctggtttctctttccttttaagcaggtagttccaatttgccagcagaatgagtacagaaagagactcagaaacgacatttgacgaggattctcagcctaatgacgaagtggttccctacagtgatgatgaaacagaagatgaacttgatgaccaggggtctgctgttgaaccagaacaaaaccgagtcaacagggaagcagaggagaaccgggagccattcagaaaaggtaaccacatgaagtcccg

SEQ ID NO: 19919 - DNA, 2300 bp, Homo sapien
acctaccgtgtgccgggtgatctccaaacatcccactagttttttctttttttagtttcccatgggtagtggcaaaattttgaaggcaatgcaaccaggaagatgggagcgaatattttctcacgccaacagggaggccagtttccgggagaggaactcggcggcgtctggagctacccaggaagagcttgcagcccccaagggcagcgcgtgcaggccaagggggtcgggtagggttgagcgggtactcaccgggcagaagcgcggcccaagtcctccttacttctgcgtgtcaatcccccttccccaatttgcatccttactgcaatccagtctcccccgtacaaccgtcacggatctgcgctccgagcaccgcccccccccgcaaccagccaccaacccccggcagggaccacaggcacacgcctccgtcggaaaagttgggcagacacttcagaacttttctttcactttggggagaaggagggagttggagaagtgggggcgaggggtgttaaagcactgggccattctctgcaacatctccccgcgccccccaacaagttgcccctcctcgtgcacacagcgaggtgacagcgcagggcaccaaactgctgagggaaggagatgcctgcagccatctcagcggggctggcggacgcgacccgacagtcaccggaaaaacagtggtgtcggtcttccccatcacctcccctccccatcccacaataaagcgcacggaagatgtctgggagtacctggccctgccacaggagctggggaggagagcgatctcaccccctccatccctcccggcaggtgggccgcggtcagatacgtttggcccgcaagtccttttcggacacgttggcatctgctcccaaagagcgccccagcaggacccggtcaccggggtcttccagaggggcggtagccaccgcacaggagccagcggcatcccccaaggagccgcaagccctacctggcttaacccccggacatgtgtgtcgctaccgatcgaagaacccaaacaccccgagatttccctcctctaggcaggtgaaaaccccacggaactctccgcagcgctgcctgcccagccggccgtgtctcgccgtccccgaggcctcgggggctcccagcacctccacccaaatcccacctgtgcgggctcgggagtccgagggcgctgacagctgctgccgccgcatcccggatctccaaagtgcggcgggagcggccagggaacctgcaggacaccgccgggccaaggggcttgggaaggtctgggggcccccggcgccgcacccctgcttacctggcgttcgctgggccccggctggggcatccgcctggtgcgcgccgctcggagcgctcgctgcgcacctggccgctgccgccgcccgcccggccccagccctggccgccgcgctagcgctgcatggcgcacgggggctggccgggggcccggggaagcgtgtctagttggcggcggcacctccggctctcgcggctcgctagtggctcccccgcctttccccgccccgcgtccgtgcacccttcctctgcagccgcccttttgcctccgctccgccggaccggccaaactggtttctccgctcggggaggtgcctctggtttccctccagcagccgcggccgccgagcctcgctggggctggggctggggctggaggcgggctcggccttctcccctccctttttccctccctagggcggagaggggctggactgcaagccccggggcggcccgaggcggcccaggtccagctcctgccccacgccctccgtgcgtcctggagtcaggtgggcacccctttcagtcttccgagcccagcctacgagcccttgcctcgcccagcctgagacccagttgctgcggctgctcttagctccccgggggccgcactcgccaccacacctctccagcccagcgtcactttcccgctgcccttggctggcttggccgtcaccccgggtcgaggactgagccagcctggaaagctggcggggccgcggcgcgcccgggacctgagctccctcggtaaggggagctgtgtcctcttgatgccaagtcatgtttggggaccggtcaccgaatgcgcgtcaaagttcgccgcgtggagggtgaagaaagaggctgcgcctcaagacttccagaaacgtatcctgtgattgcagccagcaggctttctgccgagtccaaacgctatcgagtttttttgggtttggagtcaaaaggagttaaggtgcggcccgtgaaccacgcggtgtaggtgg

SEQ ID NO: 19920 - DNA, 2300 bp, Homo sapien
cattattattcaattacttttcttcctttataatataaactgtacaaattttacaaaggtttggctagtgagggtaggtagagaagcactgactcccatccatgagggtcacaggctagggcaagggcatctgagaatgcgtgtgtgtgtgtgtgtgtgtgtgtgagagagagagagagaaagacagagtgtgcacgtgtaccttttgtttatcaaaagactttagggttgtttttttttgtttttgttttttttgagacggagtctcgctctgtggtccaggctggagtgcagtggcgcagtctcggctcactgcaacctccgcctcccaggttcaagggatcctcatgcctcagcctccccgagtagctgggattacaggcgcccgccaccacgcctgggtaatttttgtatttttagtagagatggagtttcaccacattggccagctggtcttgaactaccgatcttatgatccgcccgcctcagcctcccaaagtgctgggattacaggtttgagccaccgtgcccggtctaaagactcgaggtttgaaagggttgaaaaacctcagtattgaaagaatggacagaaatctgacttttaaatagtcctccataaatagttctcattgggggttttgtggcctgtaagtactgtggacttgacggctcaagacttctagagaaggcttctgagtaggatgttgactccatggggctaagtcgtcaaaggaaacccattctacggcacaggttttaagccagtcatgctgcaggaaggcaaaggagagcttaaggtagcatgggtgggctcttttgaaaacgaactagcagggcgaacagcagatatttagttatgtagctggcaacgaggaatatgattccttcgggtcacgcgagttctctctgaacttccttgaatgaaaatcctaaatgcatcctggtaatacccaagtaggcactttgacgtttccttttcaaaggcaaatggaatgttctgcgtctgttttctttttgaactcccaactgcacttaacatctaaatttaaggaaaggcttccgaaaaagtcgactgacgaatttctttcacttatttaaagtagtctcttgcagtcctataaatcggaaggattaaatgaactgcttgctagagaaacggtagctgggtggtgggaagaatcctacggtggctaataagacgtctcgatcatttgcatatgcaaaggataaccttaagcttgagtttgatatttcacgttgcggctcacaaatgaactgctttttattcaaagaaccatgctgtctgttttcgcgtgggtgggtgtgtaaccggggcgggcgctatgttggttttgttccctgcaaggttgacacaggcaatggcgacttgcggccacactggggcagcctctcctcggctggcagccgggccgggcggctcgctcccgggagctgacaatgtagccaagtcctgctcgtcggggccgcaaagaatttaaaggggtctagaaacatccatcttttccccttttcacagttaacagcgagctcagggctctcggtaaaaagaccaccgggaggaagaaacgctcagggcgtttttgttattgttcgcaaaatcctctatcgcccccaaacgtccagcccgccccctccctaaagcggagggaaaccgggagaggagggagggtcggcggcgccggccaagcgcgccagtacacgcccctgcggatccgccccgcggccgggtgacccccgccgcgccgcgctggaggccccgggccggggtgggcgtggggctgaactccgccacccccgcagcccgcggcccgctcgccagcccggcctgtgattggcttggggggcgcgtgtgcccgccccggcgaacggggagggtaccctcgcggcgccggtgggaggaggcggaggagggggcggagagagcgggggcccggacggcgctagcgaggaggcgggcgagccgggtccccgggagcgcagaggaggctcggaggggggcggagagcggcggggcgggagggaggcgcgggtcgcggggagggaaagcccggccgggtctgcgccgccgccgcgcgcagtgagaggcgccggggctgccgcccggtgctcggcgcgctctcgggagccgcccgcccgctggtcccgcagccttccgggaggaagcggtgccggcagcgtccagggcgcgctctcgggcaccctcacctgccggcgcccggccgcttacccggcagggcgtgcgcagggtagggtgcgggaccggggggacctggaggcag

SEQ ID NO: 19921 - DNA, 2300 bp, Homo sapien
cgcgtgggtgggtgtgtaaccggggcgggcgctatgttggttttgttccctgcaaggttgacacaggcaatggcgacttgcggccacactggggcagcctctcctcggctggcagccgggccgggcggctcgctcccgggagctgacaatgtagccaagtcctgctcgtcggggccgcaaagaatttaaaggggtctagaaacatccatcttttccccttttcacagttaacagcgagctcagggctctcggtaaaaagaccaccgggaggaagaaacgctcagggcgtttttgttattgttcgcaaaatcctctatcgcccccaaacgtccagcccgccccctccctaaagcggagggaaaccgggagaggagggagggtcggcggcgccggccaagcgcgccagtacacgcccctgcggatccgccccgcggccgggtgacccccgccgcgccgcgctggaggccccgggccggggtgggcgtggggctgaactccgccacccccgcagcccgcggcccgctcgccagcccggcctgtgattggcttggggggcgcgtgtgcccgccccggcgaacggggagggtaccctcgcggcgccggtgggaggaggcggaggagggggcggagagagcgggggcccggacggcgctagcgaggaggcgggcgagccgggtccccgggagcgcagaggaggctcggaggggggcggagagcggcggggcgggagggaggcgcgggtcgcggggagggaaagcccggccgggtctgcgccgccgccgcgcgcagtgagaggcgccggggctgccgcccggtgctcggcgcgctctcgggagccgcccgcccgctggtcccgcagccttccgggaggaagcggtgccggcagcgtccagggcgcgctctcgggcaccctcacctgccggcgcccggccgcttacccggcagggcgtgcgcagggtagggtgcgggaccggggggacctggaggcagaggggagaaccggccgtccgcgccgcagcacagccgctgggagcgcctcagaccccgcgcggggcgccggctccatggcgaccgggctcggggagccggtctatggactttccgaagacgaggtgagtggcacccccttcctgctcgggactccccggggagttcctatcccgcgccggcagggggaggggaaaggggccgtccccggggtgctcgtgcccagcgtctgcaggggagccccaaagcgggagcgccccggagcgggatccaggggagcttgggtccttccgcaccccccaccctccgcaagccgagctcattgtttgtaaataaagcggcgcgacgcccttggagctgggggttcactccgcagctcctcgctttcgggaggagagggagggggcatgcgtgcctctcttccctcttcctctccaagcagcgtctcccggggctgttgggcaactttccgcctctcgcccctgcagcccgggagtccatgatgcatgtcacgtctgggtcgcgcggctggagacccgggactgcggagaagccggatcgtttccccctggaactttctctctcatgattgtgtggatcagcaggcgctcagaagcctgtgcgtgcttatcccggcgggaatgggggacacgctgcgtgtgtccctcccctcgttttgcaaagtctacggccaggattgtggatttcggagcctcggtgggggaggtgttcaaggctggtggcaggtgctcctggaaacttggggaggaagcttgcagccctgccattttttcctcccgaggattcaaagcccggcacctccagggtgggtggggagaggaaagcttaattgatctcttttattaataaagcgactgaataagccacgcctcccaggcggtcggtttcactggaaagggctttgtttttaccttcattctctcttccgtgtctcccactccccccttttgaaacaatcctgctaaatcactgcctagtcctctctcgaccagccacgctcggctcttattggtatgttgctctgccaaaaaggggggtgggacgcttgtcgcgggcgcggcgtgacaggcaggctggatggagcaggtaggagtggtttgccatctggcggggtgcgcgctcaggtctggctcccctttcgagaggtgaattttacaacccaagaagcattactcagcagggaggtatttcctatcctggttgtgcatttcatgaaaagttgatgcctggaaattcaggcgttctcgatttctctttcttcccctccctcctttcttttcagaggttccctc

SEQ ID NO: 19922 - DNA, 2300 bp, Homo sapien
ctgcggagaagccggatcgtttccccctggaactttctctctcatgattgtgtggatcagcaggcgctcagaagcctgtgcgtgcttatcccggcgggaatgggggacacgctgcgtgtgtccctcccctcgttttgcaaagtctacggccaggattgtggatttcggagcctcggtgggggaggtgttcaaggctggtggcaggtgctcctggaaacttggggaggaagcttgcagccctgccattttttcctcccgaggattcaaagcccggcacctccagggtgggtggggagaggaaagcttaattgatctcttttattaataaagcgactgaataagccacgcctcccaggcggtcggtttcactggaaagggctttgtttttaccttcattctctcttccgtgtctcccactccccccttttgaaacaatcctgctaaatcactgcctagtcctctctcgaccagccacgctcggctcttattggtatgttgctctgccaaaaaggggggtgggacgcttgtcgcgggcgcggcgtgacaggcaggctggatggagcaggtaggagtggtttgccatctggcggggtgcgcgctcaggtctggctcccctttcgagaggtgaattttacaacccaagaagcattactcagcagggaggtatttcctatcctggttgtgcatttcatgaaaagttgatgcctggaaattcaggcgttctcgatttctctttcttcccctccctcctttcttttcagaggttccctctttctctcgtgttgggggtggggttggaagaaaggctattatctgagacaggctcgcgttatggctccgctttctgcggctctcctaccctggcatggtgtgtgtgtgtgcctgtgtgctacgtaagtgtggaatgaaaggtattttggggtgggaagggtgtttagggtatgaatttttttcttagcggtgctaggcaaagcttgatgtatttatttgatcaaagaatgatcacagtgcaaataatgtgtgatttgtgtgtttattttgcctcgctgtgcttttgtaaaataatttcccgttttgtgtaactacctggggataggtgacagtagcattgtttcattgacccggggggcttctcctctccctcctggcttctctctttgaggagctttcccttgcatcctctacttctccatttaattagtggcagtagagggcaggccctgagttgcagagacgcagacattcctaaacaaaggggctgcttgggttgacgtattgtggggggtgggggtgaggacagctgcatttcatcctaggttcttttaaaaaatgttttaataacatgattatttgtaaaaactcccccgaaaaaacgattttaagagtgttttgggaagtgcagctggataaatgaaacacgttaatgtcactgttgtttgtgctttatttacattggcagtgagtgtcagaatctacctagagcacatcttgccacttttgtccacaggagtcactactaatcatcataactgatgtctagtgtgaaagtgaagcttggaatgtaaacagagtccgagtgtgtgttggcatgtgactggattcactcctgcatgttgctagaagggaatttggggctgtataggaaatagcaagaggtgatgaagacaccttttattatctatttattgccatgtcgctggtagtatttagttccacacacattgtatttcacaagatgagtctcagccgtcttcctttttcaactttctcctaccagtgaaaaaataagccagggcagttctgatgacttcacatttcattggtatttgtttttcatgggcagtttcatgctgtcacgttgcccttcagagaatcagggaatgccttcgtagaatattaacgacaaattgttgaatttgcacagcttgttttgtctccctgaattagtatgtgtaagaaaaaccaatggaagattttagcaggctctgaaagtagaatgcccgctgaagcaaacggcagggttgttcttccaaggcgtattaaatatgggtacacttagtttgcagacttggtgtgctgcagaatatcacatatgaagatattttgaccgctatttagaagagtgacctcataaatcttttagcaaagtagacacacatacctaccacatttcttaaaagtagattcgtattttgatttgagattgttgaaaagcatggtatgtttggagtgcacttagttatgtcccatctcataaagactgttgagctctctgcactgctgatgatgaagcattgcat

SEQ ID NO: 19923 - DNA, 2300 bp, Homo sapien
ttcaccaaaagaaaagggccattcaaaagtgagtttttctttttttttttttttaagtttaaaaagctatgatgtggccacccatggtggctcatgcctataatcctagcactttgggaggccagggcaggcagatcacttcaggccaggagttcaagaccagcctgaccaacatggcaaaaccccgtttctactaaaaatacaaaaattagctgggcgtcgtggcgtgcccctgtaatcccagctacttgggaggctgaagcaggagaatcgcttgaacctgggagatggaggttgtggtgagctgagattgcaactctgcactccaccctgggtgacagagtgagactttgtctcaaaaaaaagctgtgatgtgaaacctgttctgtgaaggtggaacttggaaaggcttgtaaggatggtggtcccatgaagaggatgaacaaaccaagggaactgtcctcttgctggtttgggtgatgtcccatcacctgtcactttgtttgtttgggctgcagtggaccaatggtttcccaggcacactgaagtgacatgtagatggattgcttgagtggctccggcatgtttccatctcctgtctaccaggcagagaccgtgttccctgttttgaggggatccagaagtgcagtgacaagggcctgatttgcatctccagctcctggtcttgcctgtgttaacaattttttttttttctttccagatggagtctcactctgtcgcccaggctggagtgcagtggtgcaatctcggctcactgcaagctctgcctcccgggttcacgccattcgcctgcctcagcctcccaagtagctgggactacaggtgcccaccaccacgcccggctaatttttttgtatttttagtagagacggggtttcaccatgttaggcaggatggtctcgaactcctgaccttgtgatccacctgcctcggcctcccaaagtgctgggattacaggcatgagccaccgtgcccggccaacaatttttacattctaattaatttccagtttccaacctgactcaaggtttagctcttcgtctcttgggtgcagttttggatcatgtcttataatgtatatttaaaagtgtgttgtaaagctggaattcccattgtgggtaaatgctgagattgttgtaatactgagaagtgcacttgggaaccatggccaacactgccctagctgaccggaggttgcactgagttgtcccctttgaacatctgttatgaatgaatgttggaaaatgcaaagccaatcatttcttttacctgacctatgtgatgttaagttttagttttatgttttggcaagtgagtgttggatgtcactaatgtgaggaggccggtgagggcagactttgggtcagaggtaatgtaggagatgaagaccctttctattaatttttcttgtttaattgaagatgttcgtgttgaatgggttttatttacatgtataagttctttttttcttaatgctggaagttactttggtttttcagaaaatgcaagtaaccctaatctatttagagaattactttgcttagtaagcactcagtactatttagtaatggggaaaaaatgtgtttgtgtcccacagcgtgacaggctccacaaacttacttacgaatctcctaactaccctgagaacctgaagaatgggactttgtggagaatcttctgctttctttgctagtctctatttttccttctcagttattaagtgagttgtctttgggtgtcctcatcatgctgacttcatcttgcccagtttgttttgggtagaggaaggagtgcaaggtttaaaggaaaagcaaagcctgtacaacatggtgagaccccatgcctgtggtcccagctacttgagaggcccaggtggaaagataatttgagcaccggggttcaggaatgcgctgagtaatgattgcaccaccgcactcgagtctgggcaacagaatgagacctcatttcaaaagaaaaagaaaaagcaagactgaatcatttcactttgtattctcctccttgctctcattccttttgtgcttcatgcattgtgtgtgacaattggatgcagccgtaattattgtcagtaacttggtttttaagcttcagactgtatttcctcctcacttgttaacaccagaagataaatgaatgtggctcttggattgaactacatctacagggagctgaacttcccatgttgacgttgaattctagagtatgcttatgctgattcttgagaaattggtatgtgccgtgcctttggaattgatacctta

SEQ ID NO: 19924 - DNA, 2300 bp, Homo sapien
gtttgggtagattttgcttatagatattgaagtttgagttgttgaatttcatacatattttattttgacttttaatcctttaaaacatttgactctgactccattgagctctgtagaacatctgtcatccagatcttttgccagaatatagagccttgattggacaccttgccagctaatttaaagcttcccaagatgcagaatactgtgtaaaatgtcctacctgttgtgtcagaagggagaaaataagacgagattttcatatttgcttgtagatccataagaaacttgggaagaattcctaagaaactagcagtagtggttccctgcagggtgggggctctggatgtgggtgtggcaggggatgggagagactggcaggttgaggagcagggtgagagggatgtttttatgatgtacattctcatatatttattttgaactatttgaatgtattactcatgtaggaagacaaacctttactttccaaaaatattagggaaaaactttcaagtctctcatttttagcctttttgttgttctgatatttccacacaggacagacggtaacatgcccgatacattttaagtacaaacaaggctgtaagttgccttacttgactttcttcactattttctattcaaaaaagtatttttgaatccaagggaattagaggaataatcttgaaatgattatgttttgggggaaaagtatattattaatatgatagttatctaatgttgtgtaacaaattgcctccaaatttagcatatgaaaacaataagcattcattgtgtcacacattcattctttcttttcagtgaaagttaacctgtttccatctgaatagatttctcactctgtatcctgccagtaatcattttgtactgtttctgtgcctttcaatccaagagtccaacctgatgaggttctgctggtgtaattcttttaaaagcattgtggatgtcctgtgaatctcactggagttcactttttaaacattagacttctgtggagactgctgaaggacaacacccttacttcttagggcctttggtttgccagaattgttctctgagccattgccttggattttttcctgacttcttaacaaaggattttataggtgggaccttcaacactctggaaattgccttagctacattcagccatctccttaggtacattttccatctcccacattgtagcaggcaatggcgttgctaaactttccatcaggaaataacaaagatctccttttccagtttccagtaacattttcctctctacaccatcatccacagtctcctgaaaggccctccaggttctagcttttccagggctcttcaggggttttcgaactctctttttacagtctttccagttcctgcccattgccacgttccaaagtcactcacacattttaggaatttttctttttttctttttagcaagcataccaattccagttaccagaatctgttagtttttgttatgtgttgccgcagtacagattgcctcaaagcttagtggctgaaaacaaggaacattactggccaggcacagtggctcatgcctgtaatcccagcactttgagaggccgaggcgggcggatcacctgaggttgggagtttgagaccatcctgaccaacatggagaaaccccatctctactaaaaatacaaaattagctgggtgtggtggtgcatgcctgtaatcccagctactcgggaggctgaggcaggagaatctcttgaacctgggaggcggaggttacggtgagctgagatcgcaccattgcactccagcctggacagcaagagtgaaactccatctcaaaacaaacaaaccaaacaaaaatgaacatttactgccatacacacttcctgggggtcagggatcccagagtgtctccgctgtgtcagtatgtctcagggtttcctgaggctgcagtcattatgcccgctagggcttgggtgggactgaagcacctgcttccaagttgcctcactcacatacctggcaagttggtgccgttgctggcaggaagcctgcttttcttgccaggtggacttctctgaggggtgcgtgaatgccttcactacagggcagctgacttccctcaggacacatgattcaggagaccaggggaaagctgcagtgtcattttatcacataatcccagaagtaacactctgtcatttctgcaatatcctgtgggttacacgtcagcattattcattgtgagaggtgactacatgagggtgagtccaggaggcaagaattattgggggctatca

SEQ ID NO: 19925 - DNA, 2300 bp, Homo sapien
ttttttttttttttttttttttttgagatggagtcttgctctgtcacccaggctggagtacagtggcacaatctcagttcagtgcaacctttgcctcctgggttcaagcgattctcctgcctcagcctcccgagtaggtgggattacaggtgcatgccaccatgcctgactaatcttttgtatttttagtagagatgggctttcaccatattggccagcctggtcttgaactcctgacctcaggtgatccacctgcctcagacttccaaagagctgggattacaggcgtgaaccacgatgcctggccgtatttcataattctatctttccatagaaagaattggctggggcacgtataactaatgtgagttactgatttcagaggaagcttttggaagtggttgataggcactgaatgggatggggtggtgagtggtttaaaataacacttgaacctttggattcaaatggttttaaatgcatctcagaaaagtgaaaggtgaatgggagagctacatccattgagagcaagggttcatcagctagggctgtggcttaaactaagcagatattctttcctggcagttctacaggccagaagcctaagatcaaggcgtcatgagggttggtttctctgaggctcccagacagtcatcttctccctgtgtcttcacggggtctttattctgtgtctgtgtccaaacttccttttccttttttttttttttttgagacagagtcttactctgtttcccaggctggagtgcagtggcactatctcagctcactgcaacctccatctcccaagctcaagtgactctcctgcctcagcctcctgagtagctgggattacaggtatgtgccaccacgcccggctaatttttgtaattttagtagagacggggtttcaccatgttggtcaggctggtctcgaactcctgacctcgtgatctgctcacctcgtcctcccaaagtgctgggattaccggcataagccaccatgcccagcccaaacttccttttcttagagggtgggctttatctgtggttcttagttagcctcaccttcattcttccttttggtgttacggtcttgcttactgctttgggaatggatttgttgaaactacatgtgactagtttagggacccagtaggaggttttactataagtgtaaattaacatgtgcctttgggggaccttaaaagtttttgtcattgggccatgagatctgagtgcagctggtagaacctccttgttttctttggtatgagaactcctgggcttttgttggttccttccgttttctccggtgtattaccatttcacatcacagtgatattatccagataacacccatgatttgtttttaacggagtttcactctgttgcccaggctggaatgcagcggtgcgatcttggctcactgcaaccttcacctcctggttcaagcgattctcctgcctcagcctcccaaatagctgggactgcaggtgtgcaccaccacgcctggctaatttttgtatttttagtagaggcggggattcgccatgttggccagactggacttgaattcctgacctcaattgatccacccaccttggcctcccaaagtgctgggattacaggcacgagccaatgcacctggccacacctgtgatttattttatttcatttgagatttcagactttgtcgcttgttctttctgtagaagttttttcatagaagtatgttgtttcaaaagcaaccttcaaatagtagacttagcttggatgagaatctaaaagtctttgagtccaacaaccaagcaggtcccctgtccaggaagtaccttatagctgatgtttgagtatccctgcagatgggaactcactacctcctgaagcaccttacttctacccttggaatagtaacagagattaaaatgtccttccttaatttgaggtgaaatctgccttcttgtccattttacacacactaaccttccttccaccatgcaagctgagagagagccaggttgagcctgtgtttccacaacaactcttctcagacctcctgctgccacctaccatgcacttgctcttcactggctaggttccagttgctctgtacctttcctaaagtgtggtgaccagaatttggcacagtgagggaaggttccagagccctttagtgttatcgggggcacagagcttgggctttggagtcgctcagatcttgagttgatatgcacttctttgtccttgagcaaatgattgaaccttcttggactctcagttcctcattaataaaatgaaga

SEQ ID NO: 19926 - DNA, 2300 bp, Homo sapien
ccaatgcaggcggcactggtaactatgtgccttgggtcattctttgttgtgggggctgtcctgtgccccatgggatgttccctgcacccctggcctctgccttctagatgctggggggcactttccctggtgtaatattaaaaaaaactctccacgttgccacatttggggggcagaatcaccccctccccgaattgagaagctatgttattggaacacagtgtcctgtattttgtctagcctctgctgcttagagctgcctgagcttggagaagatacttgttctctttccaaagcttcactgtccctttctgtacattgtcaggacggctgttaataccactgctctaaatgtgctcagttttgcataaacatcagctaatgttaaaattttaatctctgctaatataagaggcatcgaagtacacgcgagttcagtttgcatatggtgaggagggagacggcctcatatcgtatgtgtgtatttgccgattctatattttgaggttgattcctgttgtcttttgttcagttgtctcattctgttttcttttggggctttgaatgcccttttcatgcctgtgacctctctttactatgccttttcttctctgccagcaaatctcatccattcttccagggcaccttactgtcccccaaagccccagtgactgctctgtccacagggcttggtttctgtgctctggctctgcaatgcaatgcagaaggggctgggctcggaatggggttgctggtcaggccatgtgcccaggggaaggacacaggactcaaggagtccacccctctctcccccccttttttttttggtcactgaaatattttctttccaattctactagtcctgctagagctgccataacaaaatacccaattggtgacttcaacaacagaaattgattccacactgttcttttttttttttttctttttgagatggagtcttgctctgtctcccaggcaggaatgcagtggtgtgatcttggctcactgcaacctctgtttcccaggtttgagcagttctcctgcctcagcctcccgagtagctgggactacaggcacatgcactgtgtctggctactttttatattttttagtagagatggggtttcaccatgttggtcaggccggtctcgaactcctgacctcaagttatctgcctgcctcagcctcccaaagtgctgggattacagacgtgagccacttcgcctggccatgatcccgcacagttctgaaggccagaagccaagatcaggagaccagtggattgtttctcccgaggcctctgttcttggcttgcaggtggccccttgctgtgccctcacatggcctttgccctgcatacatccgaagccccagtgtctctctgtgtgtccaaatttcctcttcttagaaggatgccggtcatattggattagggcccacccgtgtgacctcattttaccttaataacctctttcaagtttctgtctccaaatacagtcacattccaggggctagagcctcaacatggaagttttggagggagacacacttctacccataacaccaatgtcatattaagctttatggaagaatagaccaatatgtggtgggttcaagaatcttttcttagaagaaaagtgaatctgtatatttgatactttatgatttccttatttgctctaagcagttggtaagaatctcagtgtcacttggctgaatgatacactactggtgcctccagacctatgaggagcctaatatttttgtcttggttgaaacaatgcaaatcctgggttttggagatgctcacagccagctgtctgattacgtaaactgaaagtggcagagaggaagcttttgcgtggggaaaacatgaaatatacaagggttcctttaaaacagagtgtacttctgaacatttactgaaggtggagggccctggacacctgatgttatcttatgtggcgttatctgggtcagatttcattgcatttcctgaagaggtaacttggcagtcctgggagaggctggaccttggtgtccaggtggcaggttcataagacacctgtgatttgatgtgagccagtcacagaggaagccatttccagagaggaacaaccgtgtagactgctttcctgggagtcaagttaaaacttctctcctgtgaccttgtcacccggcagtggaaagttacccttggctgcagccacgacttccgcatactcttcagaacttgctctgcccttgagttttccagctttcctttaatgcactaaacctttaatattgtattctcc

SEQ ID NO: 19927 - DNA, 2300 bp, Homo sapien
ttcctttgtacctaaaagaggcaccctctcctgtcatactgcaaacagatgccactactacgtgtagacacatttgccagctgtggcacagctggtcacccagccctcatcacagctgcctgtaaaacccagatttattctcttccccctgatcttttttagaaattactggtatcgttttagagagtatccaacttacacacaccacttaaataatgaattttccaatttcttctttttccacggccttcacgtcatctggtaaatattcccctcaggttggcatctgcttctgagaccctgctggacctagatatattcaccagagatgggtgaaggctttggaagagtgaagtggttaggaacatttcttccgatatctcctgctcattgtttttgacctctctgatttccagtatattctctgctccagccacacagctttcctgaacagctaagtcttgctcaccggtcagggaccagctcaaaggctgtccctttttaaatttatttcctgggtcttctcctggcctcttccctgcactcggtggagatgcctgccccatggttttcagtagcgttggctcttagctgttccgttctggggaaggattggttgttttccttttctccatgtgtgttgtgaatttcattctgtgtcaccgcatcacgcgaggtgggtagggaagagaacttttacgctccccgctgtcgttagtggcctgattacgagtctgtgggaaagaatgaaggttggaaagaagatctggtgggaaagaacaagggttgtccttgagcagccaaactaagctgtgagaatgttaatgtaataaagcaggaattctaatgggctgcctgctacagaggagatgggagatggtgtagggctcatgactgtaaaagcaggagccaccagcagatggtgatgcggcctcttggcccaggtgggactctgcatctccccctcccatggacattcacttgataagtgttgggccggtcacccatgccctggtcgttcttatcttatcgaagagtgctaatataagtaagctgtaaattcccattgtaagaaataattgccttttaaaagggagcattcaagaaaaagaccttttggctcaataaagcctttattttcctcaacactcttggctcttaaaaggggcctgttcttggccttgaagtgggaatttacacagaactttaaacagaagaaaccccctctgccttgggctgcaacttgttgtccctggcagggtttgggctgtggggtcatgggatctgtttgtttgaccgttgtatgcaaaaatgattttaaaattggcctccctaatctgttggagacattagttaaaaaaaaaatgagagtaaagaggaaaatattttgctattgggtatgcactggatccatttttaaactgagagaaggtgaaaggggtgactggttgatttcggataatacttttagagccacggggaactgtgaaagacaagaaaatgtaaaaaaagcacattgattgcaggaccggtggtccaaaagcagcacgtgaaagaggtttcaaggctgtttctacaaacaagaatgccaaaggtggcataggacaagaagcttgctggatgtcacgaagctagtggagatgggatccaaagctagttttggctgatgaaaatacaggctcatgccctgtatgtgaggacagtgggacagtaatttaaacagaagtatctagaggagtttccttattgccttgaatgtatttctttttaacattgctatggacatttaggaaaagatgccactgatattccaaaaggggcattccatacacctgagagggatccctgaggctccagggtcacctgggccaagccaggtatacacacgtctcatggcaagttggctgttatcataacttccctggtgttgttttgttgcaagggcagcattgtggggctgtggtttgaattgcttttttgtgtctcttgaatacacgaagttcctcctatagtcattggctctgctgcctctgatgaggcacttccgtgttccccacatttgaatttgctcccgattcgagagaggcaggcatccgcggcagcagcttccaacccagacaggcttaagccgcgcgagggtgcccgggtgggtggctgcgcagggccctacctgggcgggagcggctgcagagccctgtccacgcggtgcctccccagcacggcacctcccactccaggctgttggttacctggccgggagctggcggagaccaggatttctcctcgccgccgttgctgtt

SEQ ID NO: 19928 - DNA, 2300 bp, Homo sapien
gtaattagtgttgtgattgtttgccagggcggtcgtaacaaagtagcacagactgggtggctcaactaccacaaatttgttttctcagggctctggatgtccggagcctgcgatgaagcaggattggcttcttctgcggcctctcttcttgacttgcagatgctcctctgggtcttcccaggtcatttgtgtacctgtgtccgtgtcctaatctcctgttcgtataagggcacagtcatattggattgggacccacctactaacctcattttaacttaattacctctttaaataccctctctctaaatacagtcaccatctgaagtattaaagacttcaacttaggaattttgggcaaatacaattaagcccatcacaatcaggtaacatttggtaggacgtgtagatgctttttatctttaagggaataggcaaatcgttaaaaataaataaataaaaacttgttcaacttgtttaggtacattttcttatagtgtattgtggttcttatttttttaaccttccagctagtgtgtaaattggaaacattgtagcttaatttgatagttttagacataatcaaagatgatggaaatcttgttcttaaatttagtctattcagcaacttgtgtatcctcaactgctgaagactgaaaacttgagatgttcctcttgttttaagaatttgactgaaaacgggctgggcacgatggctcatgcctgtaatcccagcactttgggaggccgagatgggtggatcacttgaggccaggagttccagaccagccttggcaacatggcaaaaccccaaaaatacaaaaattagtggagcgtggtggctcacacctgtggtcccagctattcaggaggctgaggcacaagaattgcttaaaccccagaggcagagactgtagtgagatcgtgccactgcactccagcctgggtgacagagtgagaccctatctcaaaaaaaaaaagactgagaatggttggcactgtccccctgtctccaggagggtgaatgtttctagctgaaccctggtgcccacttgctcctctaagccttcagcagtcctcccagcctcaaggggtgatccgttcatcttccccccacctctggaaatcccagcgtttgaacgctggggggaactgcaagtctagtttacagggtttctcagctgagatgccaggaacacttcgcgagtgagcatgccaccacatttgagtgcatatagaaagttagctgtttgctacaactggggacacttcctattagagccgcatctgctggggtggagggctgcatgggttggagagtagggtgtgacttcttccagcaagaggaaagagaagtagcatagtgcccatcgcaggcagagagcacatgtttgacttgctcttggaatttctgtagagtaagggtggtcaggttgccagactacccctcaaacgaggacatggtgctgctgggtcccagggtagagctctgctggcaccttcaaggccctgatttacacctaagggcacacaactgggatctgaaaactgggatgcacagtacagactgcagatttacagggcggggctgtctctcatctgactattgattcttttgggggctgtagtttgtatcatagttatttttgttcctgtttttttcccctcttcaagacaataagcttttggagggccaggaagttgtgttcccatctgccgagtgtggggcctcgagggccagaacctcagaatgtagaagctgagttagtttgtggcagggtgaagggctgacctctactgttggaaatgccaaaatctctgatctggctttaaataagcaaaacagccccgccagacatagagtcatccacaaaacctcatgacctctgttattgcccatcctgtgtggaagcccactgagaacttcacttgaagatgctgcaggaacaactgcagggaacctggagataaggccccgggtgatgatgtaagctaattgctgagctgggtggagctacttaaccttatggtaggaggtggagcttgacgcaacccccttttccaccaacaagcatttctttctacctgtcattgaagtgaatcatcagtataagtagcgagctgggcgcattccttctcagttgtgttaaaacttgctggtattcccccggtatcagcagaggtgtgtacgggcactgctttaaaactgggaaggaggaagacgaggccagggagccggagggtcaccaaggtagatttccagcagcgctagtccagctgaacactttccagccttgtttttc

SEQ ID NO: 19929 - DNA, 2300 bp, Homo sapien
aatgattcatgggcagcctttcaaagctatcaggctgtgaaacagctttgaataagattgtcttgtccttctgctgattgtcttttccttcccacattagcagccatagcaggaggaggagaggtggcaagtggccacactactctgctcacattaagcagacaatttatggtcaatattcagtgaatttcttttttttatagtacagttaactgatatttatattagctttaaaattatagcaaaatcaggccaggcatggtgactcacacctgtaatcctagcactttgggaggtcgaggagggcagatcgttggaggtcagatgttcgagaccagcctggccaacgtggtgaaaccccatctctgctaaaaatacaaaaattagctgggcgtggtggtgtgtgcctgtagtcccaattactcagtaggctgaggcaggagaatcgctttaacccaggaggcggaggttgcagtgagctgagattgcaccactgtactccagcctgggcgacagagcaagagactctgtctcaaaaaaaaaaaaaaatagtgaaatcagccaaatagagaactaacaggcacactgcctaattccttgtgtaactgtcattggtgtgagtcactggggcagcgtgattaggtctgtgagctggatagcaaggctgtcattattctcaaggccttctgctgactgctgctcttggtaagacatacagaatctgtgggcacctcctcttaccgctctatgctagatgaggcgtctccacgttgagttgtagtagatacagctaagaaagtaaaagaaatgaaaatctcatcaaaaggattggggctagtctcattcttcatgcatacccaaaccgtggtaactttgatttttttattatccagaatggattgtttagaggagacagatggctttccagttcatcaaattttttcaattatctaaaaggaattcctacgcttggagcaagtcatttcaataaatctcattcatatttacctgctgcttccttttaaatggaagaagagaatgtttttcaagtacacttgaaaaatagcatatgtgaattagaaacttcctctgtaaactagcagagtagaaataagaggccaggattcagcaccaggtaggctggattccttcttaggtggctcaagctggctatggggctggtctcatcatatctaaagaactgcccagcttttacgcattttgaatgtggtggaaccagctgcatctttttatatgagagcggcaaatagtcattgtgttccagtttgcttctcgggtcatctaaacatcagaggccatgccacaagcaccgtaactgagggatatagtgtgactgtggtccaggccagtgacctctggagctgaatcatgacttcccagatgactcccagagcctgagaggggactggtgcgtggctccaaatgattttcacctgggcctctttgaagtcgggagagatacgtgcagtatggtagatgtggagagggagaggcatggtgtgtccaaaaattagcaggacctgatccatatacgtggactctgaagcagtgcacttactagattaaaaaaaaaacaatgtacttactggatttaaaaagtgtgtatttttttgtgagatgcagtttgtaagatgcattggtaactaggccatatactttttccattggctctcagctctcaagaagctctttagtttttagcattggatcagtaaacacttattaaaatgttcccagcatttgtttgccatcttctctttcagctgggcccagctgtgccctcaaaccctgcctgtctcttccctgactgatcatgttctcccagcttctacagaggcttccatagcattgtgcttggtagcagacaccagacagaatctcagccagctcagtccaggcgcacgggctcctggtctcccggggtgtggttactcgtgtctcctcggggccttccgccctccacattccagtgccaggccctggacctttgtctctattcatgataaaacatttttaggaaatgctgacgctcagtgaagaaatggaaacactaactctttgttctcttcctaacagacacgagacgacttcctgggccaggtggacgtgccccttagtcaccttccggtaaggacagtctcatgtttgatgcttcgtgctgggggcgggggtttctaattgtttgtagtcagtgtattttcagagtggcatttcttcaccacggtgaagaaggctgaaatgaagcacgtgtgctgtggccttagtcctttctggaaagt

SEQ ID NO: 19930 - DNA, 2300 bp, Homo sapien
ctgccatgtgcctctggtcccgggtcgatgggggatcgcgcttctcctttagctagtgtggtggagctgatcagagacagaggcgaggctggggaccctgcaggaagaccgggatcgcacagctcacaccgctggccagtctccagcacaagagtgttcagccaccgtgccgccacctccttttccttttcacgggttctcctgcttgacttctcttatttttacatttgtcctgtttttaaagaggacgttttacagacttgatctagaaccattgtcttggagtttcaggcggtacccaagagaaggctgccttttgctgcagtgacaggttccaagaagcccgagggctcagagctgaatgatgaagcgcagtccccaaagtgcctggccacccctccctccctggatcactgctgcctgggcttgattgattgattgattgattgattgattgattttgagagagattctcactgtcacccaggctggagtacagtggtgcgatctcggctcactgcagcctctgcctcccgggttcaagcaattctcctgcctcagcctcccaagtagctgggactacaggcacgcgccaccacacccagctaatttttgtatttttagtagagacggggtttcaccatgttggccaggatggtcttgatctcctgacctcatgatccacccgccccggcctcccaaagtgctgggattacaggcatgagccgccgcgcccagccatggacatttttttttaatcccctgccctttttctttgtggcataattcattgcaggttctcttctatacagatacatggaaaacacattttcttaagctgagtttttatttattttatacccagccacctcatgacagcttttaccctgttacagagcaaagtgggcactgcccagatcgaacttttaatatcagggatgctcccaggcccctagcagtgggtgagggattcatcattttaaacagtattccacttggaccaaaagcaaaattctttcttaaatatgatatagtattagttacctcaaagatcacacaggaaacagcctcgtgtccacgtgactgattttctctgcactgaggcagagctctcgtggggtgatgctttcccttcactcaggtacctacacaggatgcgtgaaagcccgggcagcacactcagaaacagctcggggccttagggacttaaaatgggaggacagaatggcaggtttcactctttatttagataagaaatcccaggaagcagattcctgggccccaccgcaggcggtccacaccttcagaaacgcggcgttcgcagcgcgcagggcccagcagagctgagctcatcctagatcacgccacagttagtggtacctgggaactggagcatggttttctgtacgcacagtgtctgcacccatcacctgcctccctctgtgtttcttctccctgcctccagcacgttatttttaagcgtgtctcttacacatctgtagcctgtgcatcttaggacgcactgactcacagcagtgttataaatggcttttggaatccaccctgcctacagtatcccatattttcatcaggtttcagaaattactccactacttgaatcttctagattctatgctttttcgaaactgttatattgtgactgtgctgtttttactggaactatagttacttgatactgtcactgacataggaatcatcaggagagattatatttttttctggctaaccagaaaagtttgtttttcctgtgaaattttttttttttgaaggcaataggtgtttaagatgttttttttttttctttcagggattcacagaactacttcctattgatttgattaaaatttttgatgaaaatgagctggaggtttgtattataaacattattttatgtaaagtggattttttaaagtatctctcattactttacaagtaatattttaatattcttggatccataatgtcctagagagtaactttagatgaattatattacatgtctcttatagggcttatttgccaatgtggttctattacatgtctcttatggggcttgtttgccaatgtaggagtaaggaacagcaaaaataatcagctgtagttgccttgtccatcagagggcagttctggaacatgcctagtaagtagaggccactgagcagagctgggatcatggccctatgcaccaggcgaggcaaattgccacaacaagtagaaacaaggtttgcagtagccctctggacagcagaaacctgcttacactaccagactggccaagt

SEQ ID NO: 19931 - DNA, 2300 bp, Homo sapien
ggccacaaggtggccgtaagcatctacttgggcctgtagaacgacgtctcattgaacttgaagtggtttatgttgagtgaggaaaaatgtcagaaggcaacagggttgtagcaaaaggtagtttagtgattgtctagttcagcttcttggtgttgacatagttgagtaacagccattttaaaaacaaaggaatatctcgccctttgttgtgtcgagagaaacaggggaaagactgtctgttgagaagccgttggtgggactcggccatttgccccgtccatagccagtgagtgtttcccatacactggccttctatacttttatctcaaaacagaaagttcaagatcgatgatgtctatagaaatcatatacctcaagcctttcctctgataggtgggaaactgaggcagagagcagctgggtttacccagcaaggttttggcacggtcaggcctaggaactttatttccaggcttctggcttagttctgtttccatttcattctggtacctttgcataaatatcttccatttgtccacaggaaacctcccctgatggagagttgcataataggaacggcaaaccttagactaaatgctaagtcgaagacccagttgtgccttagcgtatgtctgccattcttaggcctctgggcagatgaggtgatttgtcatcactggaattgatcaacctggaggagagtcataagcactaattcttttgtgggtagggagatgcttttagatattcagaggaataacctctcaggaggagaagcagccagggtaatgcacagatgctgctggagcgtgagagaatccacaggtcccatgcgtaagactagaggggtagggaggacgactgtggcatttttatatccgatacgacatgccgtggcttgcgcaaggttcgaattgagctgccctcgtgactgctgcctctgtgatctgctatggcaggtggagcctggaacaggtgtctgccttcctctgttgttatgatttgctagcttaccttcgcggcacagtgaccacatgctggcactgagggtggtcatttctcagtgtgtgatctcgcacctttcacatcctgcttttacatctggtaaattttcttcctagttgctcatgtgcggcctcggtgatgtggatgtgaatgactggagacagcattctatttacaagaacggctactgcccaaaccaccccgtcattcagtggttctggaaggtaactccggggcccagccccagccggtgtcctccacctgaggcaggattgagggctgtgtggcgccctccattgtggtctgacttcaggactgatgctggctttggggtctgttagagcttggactgctgggggagggaagaggcaaactgagccagcagccccgtggtggctcctctgtaactgtagcagacagctagacttgaatgaagttggtccctacaaaagcacactggccttccttgaccacctcgtgaaagtgacttttatttgagggactggtcctccaatgcgtaaatagaaatggggggcttctcagggcagaaacaggcttcagggatggctttgcaagatgccactttctgttaagaagtcgttttctcaatttttaaaatatattccaacaaatattttgatctgtgtatctttcaaccaaagataacacaacatttgatttattatcttagggccactgtttgtatcctgttcagcttaggagggaagtaaaataggaatgggttagtccaaaggagatatagtaaacaaacttaaaaaaaaaaaaacagttatcccccaaaaaggctgattatttacttcaccccaaaaaggaatcatttaactttttcaaatttatttttatttatttatttatttattttaaagatggggtctcactgtgttgcccaggctggattcaaattcttgggcttaagcaatcctcctacctcggcccctcaaagtgctgggattacaggcatgagccaccatgcccggcctttttcacatttctaaatgccttttattactatttcaaatgccagcaggaatacagagataaaaaagcaaaatcttcaaagcctagtccaggtctcacttggcttgttttagatgtttgcctacagcagtccaagtggcattaccagtaaagccacctggattcccataataatgcagatatgtaagatacacagattattttagaaccccatctttgcctttgttgttttgtttttgttttgttttgttttgtttcattttataaaatgatgtcttctagggaacgtgtctaca

SEQ ID NO: 19932 - DNA, 2300 bp, Homo sapien
ttgtctacctttacctgcaaaggaacccctatccccaaacaagggggttgaggctggtccccagaggcaatctattcagcctctgggctgaaaccaattttgagagcttttgaaacattgcttcattctatttaatttttttttttttttttgagacagggtcttgctctgttgcccaggctggagtgcagctggagtgtggtggtgtgatcacagctcactgtagcctcgactttctggggtcaggtgattctccttagccgcagagtagctgggactacagacgtgcgccaccatacccagctaattttttgtatttttcgtagagatggggtttcgccatgttgctcaggctggtctcaaactcctgggcttaagcaatcctcctacctcggcctcccaaattgctgggattacaggtgtgagccacaatgccgagccattctctttaaatatgctttaaaatatagatactaataacctgattggatacttccaaactcttcagaaggcagttttgtctttaaacctttctgcaacaggggttaggacccatttgatgggatgggaataacaaacgccagcctcaaaatctaaggactcaggttaagagaggagaaaattcttcccttctgatcagccatccgtagcttttcgctccagagcacacaggccactgtagcttgctgcaatattttctcttctgacttctaccagggtgtgtggggagagaaagaagagctctgaaataaaacaggctaaaatttggtctataaatggaatttgggactgaaatgattcctcagacaaagtagaattaactgcaatttcaggactttttttttttttttaacagcatcataggtagaggttgatcaaggacttttgaggcttgagtggtctgaaacctagaacagagacctcagaggattttagatttagataaatgggaagggtgagttgaaaagaaatgttacactcaaatttggaagaaaaaaccaaggttcaaggaagttatttttaatgaaaaatcagtgattaaagaggagaatcccaatttgtaccaaaatattcatttccacaaatcctgcttagtgcatggtctatttcattatactaattagctacactgattaatgcttctgtttatatttttaaatagattttgtaaaagaggataatgaaacggaaaagcaccttcatcacattcccctccaacagacatgcctacaggcggcctttatcagtggttctcaatcgtggttctcccgatagatcacctgggaacttgttagaagtgcaaatttcacacactgggggaggggagcaatctgggttttaacaagtcctccaggtgattctgatgccacatgctgaagccacttggccacaaccatagcatcaatgcccacctgggggacactggccttaattgcaaaggaccctcgaggacacaggaactggatacctggtctacaagcccaaactttaacaatgatggacagcaacagaacctcacctcttccttctcttttgcaagatggcttttttgggtcttgtttctcttctgtgtgtgataatgatgtttcgagtttgggcatctttttaagaaaggctgagttctttctgatattttccttttcttccagtttcagcctcagtgctgccaccctggacaaaattttcttctttactccctcagctaaatgtccactgcctggggcttctggcttcctcttgacctcctctgaccccgtcactgctgtgagggtccctggcgatttgcctgctcgggcttccagggacttctctctctccctggactttttcgcacagcccagggtgcccttttgacatggatcctgcagtaatttaggggctttctctaactcacgttctcctgaaataaatgccaaggtcttcgctgaggagctagatgagcttgggggtttggtttccccaatttgaagcacctctattttaggttcctccattttgtggcttatcaaaaagtctgtgacatttccttcaggagatgaagtacaagggaacctggtaagatcaggagaagagggcaaaggtttcccacgctcattctcaatagttccccttttctgtgaaacaggaaacacatactgacgctttctgggctcaactatgtcattttcagggacgtcatgaatttggcctgtggagttgtgcgtgtcaaccccaagagaagcgtgagtcattattggaagacaactagaaagaggtgaagtgggggaaatcaattctgctttgtcctttttgctttgctc

SEQ ID NO: 19933 - DNA, 2300 bp, Homo sapien
tctaggaaagaaatgattggcagtgctggtggccaatcataagtccatttattcattagaggtgggttcaaaggcagccttctctctgttttttagtaacattgttatcttagtgcacttcatgttgctataacagaatacctgagattgggtagtttatcaagaaatgaggcctatttggttcatgattctggtggctagaaagttcaacattaggcatctgcatctggtgagggcctcagtctgcttccaactcacgatgggaggcagaggggagctggcattttcagagatagtatggacagagaggaagcagggtgggggtggggatggtgccagactctttttaacaacgaggaagtaatagattgagaactcactcattccccccacccctgagggatggcataaatctattcgtaagagatccacccccataacccaaacacttcccattaggccccaccttcaaccctgaggatcaaatttcaacatgaggtttggagggggcaaatatccaaaccatagcaattattaaccagcaagctgttatattttggggacaaagattgcttattgctgttttgcaagtactgtttatttcatttattatgatcatgtgagattcatctttctggaaagatgcgcacagctcttgttgtgacttacttgatcaaaacagttaacattcgatttatttccatctatttcctaagagagaaagaaatcattaaataaatgatggttgtcaggaggctttttgcttataatgatgaatttgacaaagggccccctggaacacagagttgcttaaatttgcagttttctaggaaatctctaatagctagagggagttgggggattaatgtttagatttcaatcattcttgtccattattacggtcattgaggattaacactcttgggattgcagttatgccctattgtgggctctcccatgaacaattctactaatatcacttttcatcttcctaggtacaagttcaggaaacagtcagagagacaatctcttgcagccagatgccagctttctcagagcctgctggggaggagtccccattcactgggaccacaacaatttccttctcaaacttaggaggggtccacaaggaaaatgcatcattagctcaacactcggaggtcaaaccctgtacctgtggtccacagcatgaagaaaaacaagacagagatggcaacatacctgacaatttcagggaagacctaaaatatgagcagagcatctcagaagccaatgatgagactatgtccccaggtgtgttctcaaggcatctccccaaggatgctcgtgctgacttcagggagcctgtggctgtctctgttgcttcccctgaacccacagatactgccctcaccctggaaaatgtgtgtgatgagccaagggacagagaagcagtgtgtgcaatggagtgttttgaggctggtgaccaaggaacgtgttttgataccatagattctcttgttgggagaccagttgataaatattcgcctcaagaaatttgctctgtagatacggaactggcagaaggtcaaaacaaagtatctgatttatgttcttctaatgacaagacactggaagtcttttttcagacacaagtgtctgagacttcagtgtctacgtgcaaaagcagcaaggacggcaactcagtcatgtcccctctttttaccagtactttcaccttgaacatttcacacacagctagtgaaggtgccacaggagaaaatctagccaaggtggagaattccacctacccactggcctccacagtacatgctggccaggagcagccaagccccagcaactcaggagggcttgatgaaacacagctcctttcttctgagaacaatcctttagtgcaatttaaagaaggaggtgacaagagccccagtcctagtgccgcagacaccacagccacaccagccagttatagttcaattgtgagttttccttgggagaagccaacaacattaactgctaataatgagtgctttcaagcgaccagggagactgaggacacatcaactgttaccattgccaccgaagtccacccagccaaataccttgctgtgtcaattcctgaggacaagcatgcaggtggcactgaggagaggttccctcgtgcatcccatgaaaaggtttcccaatttccttcccaagtgcagttggatcatattttaagtggtgctaccatcaaatctacaaaagagctactttgcagggcacccagtgtgccaggagtcccacaccatgtcctgcagctc

SEQ ID NO: 19934 - DNA, 2300 bp, Homo sapien
tattttacttatttgtgtacaatgtctcactctagaaaaatgctttttcaaattcccgtaacataaaaatgatgtaaaaggcaagaagaaaaaattagaatataaaacattttccccattcatctaagtaattctcagcattttattctttttttttttttaaagtgaaaacaagtttattaagaaagtgaaggaataaaagaatggctgctccataggcagagcagccttgagggctgctggttgctcatttttatgattgtttcttgatgatatgctaaataaggggtggaattattcatgagttttccaagaaaggggtgggcaattcttggaactgagggtttctccccctcttagaccatataaggtaatgtcctgaccctgccatggcatttgtaaactgtcatggtgcaatcctcagcattttccatttgaggcagcgttgaggaaagtttcaagggaggatgctgattgcctaggattctcagcactaggggcaccggagcccagaggtcagttgcctttggccacaaactcttttccagggagatcacagatctccttgaacatgcagtaaaatgatggtcattttctctgtgtgccatggtgtgaaaatgttggcatgcatgtccaaatgtggcaaacttatctatatattctcttcatcctagctgtaccaaaaatgatgctgctgtctatcaaatctcggctaaaaactcttttggaatgatctgttgttctgcttccgttgaggttgagtgctcatcagagaacccacaattgtctcctaacctggaagatgacagggacaggggttggaaacatgaaacagggacacatgaagaagaaagggcaaatcagattgatgagaaggaacatccttataaggaagaagaaagcatctccccgggcactcccaggtcagctgactcctccccctccaaatccaaccattcactctccctccagtcattgggcaatcttgacattagtgtgtccagttctgaaaatcctttgggtgttaaaggaacaaggcacactggagaggcttatgatccaagtaacacagaagaaattgcaaatgggttgctttttcttaattcaagtcatatttatgaaaaacaagacagatgttgccacaagacagtgcattccatggcatcaaagttcacggatggtgacctgaacaatgatggtcctcatgatgaaggcttacgctctagtcagcaaaatcccaaagtacagaaatacattagcttcagcctcccgctatctgaggcaactgcacacatttacccaggtgacagtgccgtggccaacaaacaacccagcccacagctttccagtgaagactctgacagtgactatgaactttgcccagagataaccctaacctacaccgaggagttttcagatgatgacctggagtatctggaatgttctgatgttatgacggattactctaatgcagtttggcaaaggaacctgctggggactgagcatgtttttttattagaaagcgatgacgaagagatggaattcggtgagcattgcctgggtgggtgtgagcatttcctcagtggaatgggttgtgggtctcgggtgtcgggtgacgctgggcctatggttgccactgctggcttctgtggtcatcactcacaaccccaagaagttggggtgaggagcagcagagtctccaagcacggtccctcatccccacaaacagggatgactctcattttgggacctcaccaggatggaacgtcttcagtgacagaacaggggagatataaactccccactgctcccgaggctgctgaaaatgattatccaggaattcaaggagaaaccagagacagccaccaagcaagagaggaatttgccagtgacaatctgctcaacatggatgaatcagtaagagagacagagatgaagctcttgtctggtgagtcagaaaactcagggatgagccagtgttgggagacggcagctgacaagagagtggggggaaaggacttatggagcaagaggggttcaaggaaatctgccagggtgaggcagccgggaatgaagggaaatcccaagaagccgaatgccaacctgagagaaagtacaacagaaggtacccttcatctctgctctgccaaagaatctgctgagcccccactaacccagagtgataaaagagagacttctcacaccacagcagcagcgactggtcggagttcccatgctgatgcaagagaatgtgctatttcaacccaggcagagcaagaagcaaaaacccttcaaacttc

SEQ ID NO: 19935 - DNA, 2300 bp, Homo sapien
aagaattcgtctggtataacatttcttctttgcaaagtcagaataacttagtgaaatagacaggagcgcaggtattgttttctccagaaagttgccttaaattttattctatgtgtgctcttggccaaggcaaagcccagtatcagccatgggtcaagcttggccaatctcagccgctcctgaatggcttctacccaagagccagattgccaactcaacaagacattattgaaattgggattagatgtctttgccttctgaaaatgagacatatgtgagctgggactcaacacttgagggtttatgaggacatataggattgtggaggcaaggggtcccttcagtggggaagagaaaggatgaccatattatatctgtgtctcacactgacccttcctgggttagatatttgtgtgtatttcacacaaagaacagtgaataaagacctaagcattgcctctcagaccaagccagacccacagctcctgccttctaaaaatgattgttgacttctgggctggctgatacttatagtgaggtcagcaatattacaattacaatgcggtcaaatgagattaataagggtgcaacatacaaaacacaggtaacaagtttttactgggattgcagtgtctggagaagagttccagtgggaaaggacccagtaaagtatgtcaggctgcaggctccttgtgatgctgaacaatgatgggaggagccacaggagcagcgtccatcctgaactgagagagcaggcttcgttccatccagcattctgttcctcccctgctgggccaaagctgaaaacctggcttgatctatgtgagtcagaatggcctgtggacatgggtttccagccagtggagctcacgggctgtggtttagacttttagtcacattcaattaaaaaggaaacagcactgtccttcatatacgtagtcctatcatggtattatctttacggcctctagcaagaatgacaccctcttagcaaggtcttcaaaagatttgagggttctctatgccattccagtacatgaagaattgtattttacttatttgtgtacaatgtctcactctagaaaaatgctttttcaaattcccgtaacataaaaatgatgtaaaaggcaagaagaaaaaattagaatataaaacattttccccattcatctaagtaattctcagcattttattctttttttttttttaaagtgaaaacaagtttattaagaaagtgaaggaataaaagaatggctgctccataggcagagcagccttgagggctgctggttgctcatttttatgattgtttcttgatgatatgctaaataaggggtggaattattcatgagttttccaagaaaggggtgggcaattcttggaactgagggtttctccccctcttagaccatataaggtaatgtcctgaccctgccatggcatttgtaaactgtcatggtgcaatcctcagcattttccatttgaggcagcgttgaggaaagtttcaagggaggatgctgattgcctaggattctcagcactaggggcaccggagcccagaggtcagttgcctttggccacaaactcttttccagggagatcacagatctccttgaacatgcagtaaaatgatggtcattttctctgtgtgccatggtgtgaaaatgttggcatgcatgtccaaatgtggcaaacttatctatatattctcttcatcctagctgtaccaaaaatgatgctgctgtctatcaaatctcggctaaaaactcttttggaatgatctgttgttctgcttccgttgaggttgagtgctcatcagagaacccacaattgtctcctaacctggaagatgacagggacaggggttggaaacatgaaacagggacacatgaagaagaaagggcaaatcagattgatgagaaggaacatccttataaggaagaagaaagcatctccccgggcactcccaggtcagctgactcctccccctccaaatccaaccattcactctccctccagtcattgggcaatcttgacattagtgtgtccagttctgaaaatcctttgggtgttaaaggaacaaggcacactggagaggcttatgatccaagtaacacagaagaaattgcaaatgggttgctttttcttaattcaagtcatatttatgaaaaacaagacagatgttgccacaagacagtgcattccatggcatcaaagttcacggatggtgacctgaacaatgatggtcctcatgatgaaggcttacgctctagtcagcaaaatcccaaagtacagaaata

SEQ ID NO: 19936 - DNA, 2300 bp, Homo sapien
ggctggagtacagtggagtgatattggctcactgcaacctccacctcctgggttcacacaattctcctgcctcaacctcctgagtagctgggattacaggcgtgagccatgacacccagctattttttatattttagtagagacggggggtttcaccatgttggccaggctgatcttgaactccggacctcaagtgatccacctgcctcggcctcccaaagtgcagggattacaggcctaatttgagtttaattccaagatttctgtttctgattttctttcatgcttcctccccgacacctaagattaaaacataaattctgtggctgtaaattcatgagatgaataaaacaaatacagttaaatccattatatgtatgtatgtacgtgtgtgtatatatatgcatgtatgtgtgtatgcatgcatgtatatgtgtgtatgtgtgtgtgtgtgtgtgtgtgtgtatctatatatgcacatatataaaccttctgctctttacatttattttgctaggagatgaatgttgggagttgagggaattggtttttcaaattatttcagaggaacaaaattaagtttcatagtgaatttcaacttttccatttaataactcccaggcaacacttctttcacaaccatatcacatttatctattgctttgggacattccttcacttttgactttattctctctgtggtgtgcgacagcatttgtttattctttatcatcacactttcctcctctcttcattcccaacttgaagttatctcctctttcttatctggaaaagaccttacattgtgaagacctcagctttccataaagccgaccatttgcaaagagttggtaatttctgtgttctgtggcatttcacagatgtgttccccaggagatagtcattattttacagtgcctcagctttaatatcttttttctcacatgaagataaaactgaaaaacagaacatatcacccctacatttcttaatattttatcgttttagatgagttttcatcttgtgaaaagttgcattccatcaagggataatgatgtacattctgtgctgtgtaaaaacaatttgcttttgaggattgcagtgccctacacagagtgaatatttacagctatgtccctttcaaagtcacccctggagctgctaatttgagctgtctccacgagtctcaaaagaggtttctgtctaagctgtcaatttccaggtgtcatacattaaaatatttttggggagaggctaagtagttacagaatgatgctaaaggattctctatgtttttggacttggataaacttcaataaaagaattgcccatattacaaaatctactttcccaacaagaaccattccaggcaatctgaaggaataggacctgtggtatttcttctgtggatttcttctgatctttgtctgttctcttctatcgtagtcaaaataggaaggggtgtgtgtgtgtgtgtgtgtgtgtgtgtgtgtgagagagagagagagagagacagacagacagacaaggggtaagggggggtaagcagggtgaggagggtggatcctgccttccttctgtggcttctgcctttctcagagaacttcagaggatggctataatgcctgttctaaatgaacaacatatgacacatattttcacctccccaacaccccctccacgggtttcctatgtgtacttcaaatgcctgataaccttggtatgagaactggttgtgttactccggccttaatccctttatcaggcagcaagtttttcctttcctaaggagcgagcaactaagcccagggtccagcatgggctttgtaaagagctgctcggtctcctgagcagcagccagtgacagctcgtctgggtttcatcagctccctggggctgcatttcaccaggcccccttgccagggcctccccagcgtgtcgtgtcaacaagtgtcgcacctactgcagaaacagccctcaagtttcatcacagggatgctaaaatatattctccagcttcagcaatgacctagttcactgaagggcggggaaaaaatgctcttcttccagaacttccccgggcatggaatttcccctcttaggaagagatgaactttctggaagcagacccatctatgctttgacctgatcatggaagaccctgagccctataaactcctttgaatccctgtcccgggaacagggacacccaatcaatgcctcacacacagcctggggaatccacagctgagccagccctcctacaacatttcttggacaaagagtactgaaaagtaagt

SEQ ID NO: 19937 - DNA, 2300 bp, Homo sapien
gccagatctttacccccaatttttctcctatctttatataaacataacggttaatatagaaaagaaagctgaattactatttacattgttcccaaaattgatgtagcagttttaagagtactaatatacaatgcacatacttctccctgacgctatataacactattaggtactattattttccactttttacaggtgtggaaactgaagctcagagaggttaagtagatcacctaagttccaccactagactagtaagtggcagcaacatcaagtttccaattcaggactaactttaaaggtcacattctactataccattatgcccataagagaaccacaggagtgaaattatgtcatagaaatattaacatttgattgaggagagaaaaagaccagtcaaaaaaggtaatgtcagtttgggtagaggatggagggtggcgggtagtgactggatagggtataaaattgctaggtggaaaaaaaggttgggagtagggtaaaacgagggaggcagtcacttgggaagccagggtgggggcgtacaactcgaggtcaaaacagtgcccagctgagctatattggctaagagtaaataacactggcacccatttaactcgtatgcacacgagaggttgcataagcaacgctttgtacatggcagacttttctaagaagtctaaatttagaagacctctgttgaatttaaattaaaaggcaggattccagtaaagactagaagattttatttccataattggcacatgcaggtaacagatcctcagaaaatatttgtacagtaattgaggacaaaacaggaaggcacctgaagcggttgggaaaggcttgccaagtcaaactgagtatgaaacggcacttgtatgtgtaagggtaatagcatttactgagtcatctacgatgtgccagttaccgagttaagtgcttcacatacatcaactcctttaattctggcaacaactctatataaactgtattgtcagtcctgtgttaatagatgaggcagagaaattaagaaacttattcaagctcctaacacttgaatcgagcagatctttcatgctcttagccatctcactgcagtctgaattcttaacttatgctagagtgaagtttaatgactgcttgtgctagaatgtggtggagactgtatggcgcacctacctcgccaacatgtataagaatataggtatccaaattactggtcagaaaatcctgcggccttgggtgatgaaaagctaatggcaacagaaattgggccaggaagcctcgtgtagggaactacctgactggtcacatttcgtaagttacttcctttttgtcccaaacgaagccatagttttcaaagggataatggccttggatgttgctaagattggcagagagagctcaggtgtcgtccattccggatcattccagggaaaggcatcctctacagggttgcctgctttgatgacggagattgcgggcggcagtctgacgcggtgtaaaccagatgattcctgctaaaaacaatcatttccaagatctgattagccctaaatatgccacagctcagtttgcaaagtagtaattgtttaaaagtctaggcaaagattttggccaattccaactcaagtatccggatctccagcactacttccctctagcaatgccatacacatctaaccctaaaacgaggaagcgtccgctgaggttgcccactgcaggatgctggtgtgtcgccgggcacatgaaagtccctgagtcaggggagagcgctcgccggggactgcgggcgggagccggcgactgagaaccgcttgccccgctctctggcgtgagtacgcaggcctcctcccacggtctcaggaagcccagacgccgcaggcttccccgccgtagaggagctgccggggcgtaattcctccaccgcttcctcctccagctgcacccacccgtcctttcctgctcgggagggctgggtttgaagcgcgcgccacggccagcccgggaccgcgggggagggcgagggaggcgcgcagccgcacgcacgcagtaggcagccccgccccgcccctcgaggcccaaggtcccgcccctcgaggctccgtgccccgccccccgggtgccccgcccctttgcgcggctggcgcggccagcaggccaggctcccctcggcaaacctgtctaattggggcggggagcggagcttcctcctctgagggccgtgccgcgctgccagatttgttcttccgcccctgcctccgcggctcggaggcgagcggaaggtgccccggggc

SEQ ID NO: 19938 - DNA, 2300 bp, Homo sapien
ggtcattatttttaaaaccctatctgtgcactcctttttaaaattccctgtgtgtgcagtcttattttcattcacaacagtaatttagttttttgctaggctagtctcttttctgttagctttcattccaggtccaatccgtgtttatttctgttctcctgcccataatctacctcgctctctctctgcctttgcaaatttctagccattccctctcttaagaccatcccctgttgtttcacttcatactgatattcctctctactttactcatttcatacgtacatggtggttgtcccactaacatgatttatggcatttaattatgtgatgactttcattgttgcttgataacataaacgtgtgaatcgtgtgaattcatgtatggagatacatgaatctcctgatctcctgcttagaggtcaggaactttgtccttcttttttgtttctctcagtgcctacatgataacttccagtgcacacatgagctgtaatataaacccacacttgaaaatgggtatatccattttctcattttagctgaaacgtatttgaaagaaccatttttctcattttaatcgaaattcagaaaaagcagacgacctggattttgtcctgtaggaccacatgaagcaaattgtctttaattctcaaagccgcattctctgctaggagtcggggccataattacaatggattagctacttttggttccctgtctaaatggcttttactatttgctttaaaataccctgtaaagaaatcattaaatccagaatattgagagagcaaaatcagtgggctccagatattgcaagcagaggggaggatatcttcaaaagtgttttgtccagtacttttatgaagaagttcagactgatatttttgttgttttttacagccaaaacaaatttcaagaaaacattgagttgtttgggttagtttttatagtatcacttctcagtaaggaaatatgattcatctgttgagtcctaaaactatcccaaattttagattattgagtcaaaagactctagatggaagattgatatttatatctcatagcaaaaagaaaaaatagcaatctgcgaagtcagatttcccatctctgattataaaactatatattttaataacccttaactgtttatggtaatacctgcagtttcttgacttcatattgcagttgctattcatctgaattgtgtttgttcatccgttaaatacttactaagctcctgctctctatgccaggaacacacaaataaataaatgtaagactatctctgccctaacagaactcctagcttcatggaggagacaaatgagtcaggagagaaatcctagctgcattcttttttatatatcataacataaaattgtattttatattatactattggttacaaatatattttataaattaggatatacttcagacagcattttgatattgtcttgaaatgcaaattttaagtgcagactgttggtaatttatttatttatttatttattttgagacagagttttgctctgtcgcccagggtggagtacagtggcatgatctcagcttacagcaatctccacctccaaggttcaagtgattctcctgcctcagtctcccaagtagctgggattacaggtgcccaccaccacgcccagccaatttttgtatttttaggagagatggggtttcaccacgttggccaggctggtttcgaacccctgacctcaagtgatctgcctgcctcggcctcccaaagtgctgggattataggtgtgagccgtcatgcctggcctgttgccaataattttaaatgcaaaataacattgtctatatttataattgggtatttcttacatatgctcacatcaacctgaagaaaattaaagtcaaggtttttctacaaaaagttatgcagtctgtatgttcagagtgcatttagaattgacatctatctctctcttatttttcctcttttcagggttattatattatgcaggacatggttatgaaaattttgggaacagcttcatggtccccgttgatgctccaaatccatataggtctgaaaattgtctgtgtgtacaaaatatactgaaattgatgcaagaaaaagaaactggacttaatgtgttcttattggatatgtgtaggaaaaggtaagttttctaatctttattaaagaattgttggagttaaatatcgaccatgacaaactagagaaacctgtgaaatgctaaaagccatttgcgtttgtgaattttagtttatacattgaaactggaagaacaaaa

SEQ ID NO: 19939 - DNA, 2300 bp, Homo sapien
ctgggattataggtgtgagccgtcatgcctggcctgttgccaataattttaaatgcaaaataacattgtctatatttataattgggtatttcttacatatgctcacatcaacctgaagaaaattaaagtcaaggtttttctacaaaaagttatgcagtctgtatgttcagagtgcatttagaattgacatctatctctctcttatttttcctcttttcagggttattatattatgcaggacatggttatgaaaattttgggaacagcttcatggtccccgttgatgctccaaatccatataggtctgaaaattgtctgtgtgtacaaaatatactgaaattgatgcaagaaaaagaaactggacttaatgtgttcttattggatatgtgtaggaaaaggtaagttttctaatctttattaaagaattgttggagttaaatatcgaccatgacaaactagagaaacctgtgaaatgctaaaagccatttgcgtttgtgaattttagtttatacattgaaactggaagaacaaaactagaggaaaatacatttactccatgtatatctaattattttaactcttcatatttgctatagaacacaaatgaagaactaaagggcatgggcatttactcacactacaggggattcaactctccagaatgcctttagatgactttaataatcactatagttattccctcaggaattaacaaaaccaacacccatggagttgggatctctgctcactagtcagtcctggtcttccagacatggaatgagtagccgaagcagatgtttggaggtttggatcccatttgtctgccattgcctttctaaggagtagaaccaatgactgttcctctagatttactatttttttgcttgctcagcatttaccaatcaaaatccaatgccagagttcaaatgcaactctagttttaaagctaacaaggagttagtgggttattttgggtagatatgtagctacctagatgaaaaattttgaatctataattttaaattatgtattctaaaaaactgttgtattttctcattatttatacccttttaagaatgctctttaacttttcatatttctatctgccctcctccgcctcccttaaatagaaatgactacgatgataccattccaatcttggatgcactaaaagtcaccgccaatattgtgtttggatatgccacgtaagaacatttgatgtttacgttgaagtttcctttattgtttgatgtctttttgtttttgctttttaggagcaggggtcttaactctgtcacccaggctggagtgcagaggcgccatcatagctcactgctcctgggctcaagcgatcctcctgcctcagccttctgagtcgctgggattacaggcatgtgccactgtgcctggcccctgagggttttttgattatagattagaggcctagaaaatacctatagacatgtaggcataaatttacctccttgatattctgcgtagaaaattttaaatgatcgactttagcattccatatcatggtatcttaattattaagcccaaattgggcatgtaattcctgcttaaagattaactctttaattatcaatgtcatgtgagaggcagaagagaaaatgaagcttattggtgtatacagaagtcccatgtggcaagtgtttgcttttctaacattttctttttaaaaaattatttttattggatattgacaagttataattgtatgtatttatgggatacaaagatatgctatgatgtacgtattcaatgtggaatgattgaatcaagataattcacatatcacctcaaatacttatcttttttcctaactgaaacattgtaccctgtgactaacagtccccacgctgtccccacccccccccagcctctggtaaccaccattctgctgggtgcttctctgagttcatttttattagcatccacatataagtgagaacatacagtatttgcctttctgtgcctggcttaacttctttttctatttttaaggtgtcaaggagcagaagcttttgaaatccagcattctggattggcaaatggaatctttatgaaatttttaaaagacagattattagaagataagaaaatcactgtgttactggatgaagttgcagaaggtaaaataaaaaataaagagaaaagtactcagaaaaaggagagcaggggagacacacctattcagggttccctctctggtgattgttttattcttattatgtgggtttggaattagtacctactttataaaacaatttttatattaa

SEQ ID NO: 19940 - DNA, 2300 bp, Homo sapien
aagtgaaactatatgtattcacagttgatacatagttgtatatagaaaatgctaaagaatccataaaaagtaataaatgagttcaacaggttgcaggatacaagatcagttttatttctctactaacagcaaacattctgaaaatgagaataaagaaatcctatatacagtagcatcaagaataaaactccaacacgtttaaagaaattaagatccagataaatggaaagacatccatgttcatggattggaagactgaatattggtaagatggcaatgctgcccaaattagtctacatattcaacaattcctatcaaaatcctagctgtattttttgcagaaattgacaaactggtaaaattggtagggaaacgcaggggacccagaatagccaaaaaaccttggaaaagaacaaagttggaagacgtaccaatttcaaaaagtgctaccaagctacaataagacagtgtaggcatatggatagacatatcgatcagaggaatggaactgaacatccagaaataaacccatacatttctggtcaacttgttttcaacaaggatgccaataccatcaatagagaaggagtggtcttttcaacaaacggtgctgggacaactaactggtagctacgtgcacagcaaaaggatccctaccttcctaccacattacaaattctaactcaaaatggatcatagacctcaatataagagtttaaactcttagaagaaaacagaagtaaatctttgtgatgttgggcttaggaatggtttcttagacataataccaaaagcacaagcaacaaaggcaaacagtagataaatgggacttcatcaaaattaactttagcgccttaaaggacaccattaagaaagtgaagttaaccctcagaatgggagaaaaatttttgaaaaatcatgtatctgataaaaaaacaaacaaacatgcaggtgctcagctgtggttaccaccgagcagcactgtccagtgaacttgctgtgatgatgggatgcttggtatccgcactcccagtgtgatagcctttagcctcatggggttgttgagcagttgaaataatagctagtgtgaggaactgaacataaaattttagttttaggatgggtgtggtggctcacgcctataatctcagcactttgggaggccaatgaaggcggatcacttgagcccaggagttcaagaccagcttgaccaagatggcaaaaccctgtctctattaaaaatacaaaaaaattagctgggcatggtggcacacacctgtaatcccagctactagggaggctgaggcaggagaatcgtacttcccctttatactcttctgtatatttgatttttttttttttaagacagagtcctggctctgtcgcccaggctggagtgcagcgacatagtctcagctcactgcagcatccgtggaggctgaaacaggagaatcgcatgaattttttaaaaaatctaaacatgtaattttaaaacgggcttaagaagaatgataacagttttggtcttcttttttatcaaccatgcttttattttacttgaatctcgtgccaattgctttgtaatattaaagtaggatttacacaagtggaatttagaaaagatgataatctatcaaatctgtcaataccaattagaatgtaataaagaaattaggatagtggaggtttgagcaagtaaaggctcacccaaattcaaagccaatacttgatgctgagaggggatattttctggaaggtaatttttaaaaattaaagtcacaattataaattgtatatttcctaataaaagaaatctcaactcatgggacaatttgaatttaaaacactattgttcctcattcagtgatgaacaagtcaaaacgtttcagaaaagaaagcctttaaagaagaatcctggcacagaaaaggtccatttagacattgccttcttcccccatctctaatgcctcttttcaaatctctgacttgcacatgaagtaacagtgaggtgtcctgtgcagcagtcgcaattttttgacttgtcaaattgaagaaattcaattatgtagccagagcttagatcactgacatgtatactggcataagcttttttttgtttgtttttaattttattagaagtgggatctcattttgttgcccatgctggtctcaaacacctgtcttcaagtgatcctcctgcctcagcagcatcagtttaatatctagataaaatctgatgtatgtaattttacttttaagggtttttttccaaacagacgtcctgacaatgttgtttccta

SEQ ID NO: 19941 - DNA, 2300 bp, Homo sapien
aatctttaaattatggtgctaggattgaaaggtgtaataatttctttaaaaagaagctaacacatttaatatattaatctctctataaacccctaggcttagcttggtttcaagctaaaaatgtgtagttcaaggcatgagactgctcggtttagtagttagttccacagggcctctggatggtgagataaagaaaaggtgtttccttttttccttccactgtccctccaggaacacaccttttgtgcgctctacctaacacacgaatttcctaatttcataagggcatttggagggaaagtatgatgatatttacaggcttctgcaaagccggcttccagccacaaaagattaaagaaaaaagctaggattttgcaatacactgattggaggaaaagccaagacattgagagttagcaataaaaacagcaacaacaaaatcgcaaagggtttggaattcctttagtttctatttggcataagaatcatatgatttctttgttctgcccttccttatcgactgcactcaaatgatagttttatttcattcttgcagtcgagtgactgattctattgttgctcaaagcagagaggtgcacaagagagccttacatatgtagaataatagaatgaacctttttgtattgtgtttttggaagaggggtagtgtccgcttaaaaaaaaaacaacccagaataaatgctgtcttttcagctgtgaaatttagtgattttgcaaaatggactaagacgggtgctttgcttttaactactggtctacctggcaaaggggtttctctgaaatcctctttacaaaaatagaactgagataacttgcaataaaatatcttttactttttgtttatgatatttaaaagcagatgcaatgttatttgttgccatttgtgcaaatgatcaattgtgcttctagaccaaatttcttccagccgaggctccggctaaatcactgggctttgtacaaagccctgctcaaaaaagtgtttggcatgatgaagccacgaggcagttgtatagctgaaggctctttatgataagcatttcagactttagttttggtagtacaactcttgtaaccattcaagtgctgctttgctgtcatttcaactcttaaaagaagggaatgggggaggggcaagagagtcttctaagtaaacaaagatcccaaatccatgaaacctaggatttatcatggtatgtacattatgaaattccatatattgtaaactgtgtagcatgtcaagatttcacattagcaggtcctagtgtactcttcaatgcacatacggtttttatatgcatattaataaaggcccatctttgggagaagaaaaaaggctccctttcaaatgaaatcaagcccaggtaaagctgaaacccaacccacagagtactggcaccgttttcaggccaaaagaagacaagggtttcaatttcatcatcttgtaatgctgataaatgcgatgctgtgactggcaaaatttgcagattacataggtctttctaaacgtgtgtaaatatgcaaatatgtattccaatttatgtgcaattccaaacaatttgctgtttgaaattaaagaccaacaactcttctgtgagacaataattcgggtcatttacatgaaaagtcttaaacagcaaaaatgctacttgcaatttacatcatacagtgctcccatcacagagaacaatggcttcctcaatggaagttaacgcagtagagaggtatactgagattttttttttaacttttcagcacagtttgcaaatactaaccaatgaatcaaatttaaaataaaatagaaatgtttcttatgcttggtcatcactgctacttgagtgttatttttgtgtcttcagattcctatcaaacaggagtgaacctttttaacaggttatggtgacattttttcagctccttccattttgtcctatttccagtgtcagcacaattagcttgacttgggggtttctgtctggttttaaaaacctttcaatggagtgcacgtctgtgaacaataaaggaacgaggacacggggctgggaaaacagcatacctcatctggaatggaaatctatcgtctctcgcccttgcacgggtcacgattatacaccttcgtgacctttagcgggcttacatatgtatctttttgtgttccgcaggctatgaccacctgctgtatgtacaatatgtgcttgttacatttgtacaccatctcccttctagaatttaaagacctagctattacatcttgtttactcaatatcattcccccattaagg

SEQ ID NO: 19942 - DNA, 2300 bp, Homo sapien
gcagatgcaatgttatttgttgccatttgtgcaaatgatcaattgtgcttctagaccaaatttcttccagccgaggctccggctaaatcactgggctttgtacaaagccctgctcaaaaaagtgtttggcatgatgaagccacgaggcagttgtatagctgaaggctctttatgataagcatttcagactttagttttggtagtacaactcttgtaaccattcaagtgctgctttgctgtcatttcaactcttaaaagaagggaatgggggaggggcaagagagtcttctaagtaaacaaagatcccaaatccatgaaacctaggatttatcatggtatgtacattatgaaattccatatattgtaaactgtgtagcatgtcaagatttcacattagcaggtcctagtgtactcttcaatgcacatacggtttttatatgcatattaataaaggcccatctttgggagaagaaaaaaggctccctttcaaatgaaatcaagcccaggtaaagctgaaacccaacccacagagtactggcaccgttttcaggccaaaagaagacaagggtttcaatttcatcatcttgtaatgctgataaatgcgatgctgtgactggcaaaatttgcagattacataggtctttctaaacgtgtgtaaatatgcaaatatgtattccaatttatgtgcaattccaaacaatttgctgtttgaaattaaagaccaacaactcttctgtgagacaataattcgggtcatttacatgaaaagtcttaaacagcaaaaatgctacttgcaatttacatcatacagtgctcccatcacagagaacaatggcttcctcaatggaagttaacgcagtagagaggtatactgagattttttttttaacttttcagcacagtttgcaaatactaaccaatgaatcaaatttaaaataaaatagaaatgtttcttatgcttggtcatcactgctacttgagtgttatttttgtgtcttcagattcctatcaaacaggagtgaacctttttaacaggttatggtgacattttttcagctccttccattttgtcctatttccagtgtcagcacaattagcttgacttgggggtttctgtctggttttaaaaacctttcaatggagtgcacgtctgtgaacaataaaggaacgaggacacggggctgggaaaacagcatacctcatctggaatggaaatctatcgtctctcgcccttgcacgggtcacgattatacaccttcgtgacctttagcgggcttacatatgtatctttttgtgttccgcaggctatgaccacctgctgtatgtacaatatgtgcttgttacatttgtacaccatctcccttctagaatttaaagacctagctattacatcttgtttactcaatatcattcccccattaaggaaaaaaaaaaacctacatgaactgaacatgccatgtttcaatctggccccagtggctttttctctgaaagcaaacgtgtgtcttttacaccagggctttctccccaccccagggggtgtcttccatccttttgtggctcagttgaaggcgaaaagggctccaaaccactaactaaccagaggagagccccttcttccacctccagggagaatttcagatttaatttgtccgaagatagcgtgctctcttcttactcatttgccatcattacgaggaaaacaaaccaccaccttggcttcaagatcctgggtagaggctcacggtcttttcaaccatctttggcgaggccttgcttccttccactcgagtaagtcgcggcttggggccacggaaaggactgggtgagagcccgcaatgtcgttggaaaaaagcagccctccctgcgccccctcaccagccccaccaccccgctccactcccggggcgaagccgcgagccagcggccccgtatgggcgagacttggcaggtccgcggggcgccttctcgccgccgccggactcggggctccgcagcggccgggcgtcggcgcccgccggccgcggggcttcgcgctgccgccgcccggtcccggagctcccttcccccaccggccgccccctccccctcgcccgcgctcccttttgttcgctcgccgcccgggccgagccgccgccgccgccgccgcccggcccggcggcgaggccgctccaccgcacacgcacacacagaccccggcagcgggaacgcagatgacacgcccgtaacatggaagccgccgccgccgccgctccgacgacagcagcagcagccacagcagcagccgccggcggcgccgc

SEQ ID NO: 19943 - DNA, 2300 bp, Homo sapien
gaaattaaagaccaacaactcttctgtgagacaataattcgggtcatttacatgaaaagtcttaaacagcaaaaatgctacttgcaatttacatcatacagtgctcccatcacagagaacaatggcttcctcaatggaagttaacgcagtagagaggtatactgagattttttttttaacttttcagcacagtttgcaaatactaaccaatgaatcaaatttaaaataaaatagaaatgtttcttatgcttggtcatcactgctacttgagtgttatttttgtgtcttcagattcctatcaaacaggagtgaacctttttaacaggttatggtgacattttttcagctccttccattttgtcctatttccagtgtcagcacaattagcttgacttgggggtttctgtctggttttaaaaacctttcaatggagtgcacgtctgtgaacaataaaggaacgaggacacggggctgggaaaacagcatacctcatctggaatggaaatctatcgtctctcgcccttgcacgggtcacgattatacaccttcgtgacctttagcgggcttacatatgtatctttttgtgttccgcaggctatgaccacctgctgtatgtacaatatgtgcttgttacatttgtacaccatctcccttctagaatttaaagacctagctattacatcttgtttactcaatatcattcccccattaaggaaaaaaaaaaacctacatgaactgaacatgccatgtttcaatctggccccagtggctttttctctgaaagcaaacgtgtgtcttttacaccagggctttctccccaccccagggggtgtcttccatccttttgtggctcagttgaaggcgaaaagggctccaaaccactaactaaccagaggagagccccttcttccacctccagggagaatttcagatttaatttgtccgaagatagcgtgctctcttcttactcatttgccatcattacgaggaaaacaaaccaccaccttggcttcaagatcctgggtagaggctcacggtcttttcaaccatctttggcgaggccttgcttccttccactcgagtaagtcgcggcttggggccacggaaaggactgggtgagagcccgcaatgtcgttggaaaaaagcagccctccctgcgccccctcaccagccccaccaccccgctccactcccggggcgaagccgcgagccagcggccccgtatgggcgagacttggcaggtccgcggggcgccttctcgccgccgccggactcggggctccgcagcggccgggcgtcggcgcccgccggccgcggggcttcgcgctgccgccgcccggtcccggagctcccttcccccaccggccgccccctccccctcgcccgcgctcccttttgttcgctcgccgcccgggccgagccgccgccgccgccgccgcccggcccggcggcgaggccgctccaccgcacacgcacacacagaccccggcagcgggaacgcagatgacacgcccgtaacatggaagccgccgccgccgccgctccgacgacagcagcagcagccacagcagcagccgccggcggcgccgcgctgaacaaaggtcatccgagctgcggcccagacgcccgggcttgaccgccgcgaaggccaaccccgggaagggggtgggtgtgcgcctctgggggtgcggggcggcgggaggcggccggggcgaacgaggggcgcagggcagccggacccaggggcgcgggtgggcgccgggcagaggcggggtgcggcccctcgtgcccactcctgcgggccggggtgagcgcgtgaggctcaggcccctgggcctgcccgcagtggcctgtcccaccctggccttggggacagccggccttcgcgccccgccagctggcttggggggccgaggaggaaccgcccgggctaggccccgcaggttacgagacgggggccacgtgagcgcggctctcctactccccccgccggcgccggccgggcacagatgcgtttccagaggcctccgtgccccctctcccactggccctgccttcgccccccgccccctccccagacagccccagttttcttcccccgaggtgaagggatttggacttctccccccaggtgcttgaaagaagagaaggttggaggaggaggaggagactggggggctgctggtggtggtgacagggctgggagagagaggagagggacggaagggaggagggggctgggtggggtgggggtgacagcagagaggagcctggtcaacaagccagcaccactgtgctag

SEQ ID NO: 19944 - DNA, 2300 bp, Homo sapien
gga[450 bp omitted]cgatctccagtgctgaagagtttgatgacgacgagaagattgaggtggatgacccccctgacaaggaggacatgcgatcaagcttcaggtcgaatgtgttgacggggtcggctccccagcaggactacgataagctgaaggcactcggaggggaaaactccagcaaaactggactctctacgtcaggcaatgtggagaaaaacaaagctgttaagagagaaacagaagccagttctataaacctgagtgtttatgaaccttttaaagtcagaaaagcagaggataaattgaaggaaagctctgacaaggtgctggaaaacagagtcctagatgggaagctgagctccgagaagaatgacaccagcctccccagcgttgcgccatcaaagacaaagtcgtcctccaagctctcgtcctgcatcgctgccatcgcggctctcagcgctaaaaaggcggcttcagactcctgcaaagaaccagtggccaattcgagggaatcctccccgttaccaaaagaagtaaatgacagtccgagagccgctgacaagtctcctgaatcccagaatctcatcgacgggaccaaaaaaccatccctgaagcaaccggatagtcccagaagcatctcaagtgagaacagcagcaaaggatccccgtcctctcccgcagggtccacaccagcaatccccaaagtccgcataaaaaccattaagacatcttctggggaaatcaagagaacagtgaccagggtattgccagaagtggatcttgactctggaaagaaaccttccgagcagacagcgtccgtgatggcctctgtgacatcccttctgtcgtctccagcatcagccgccgtcctttcctctccccccagggcgcctctccagtctgcggtcgtgaccaatgcagtttcccctgcagagctcacccccaaacaggtcacaatcaagcctgtggctactgctttcctcccagtgtctgctgtgaagacggcaggatcccaagtcattaatttgaagctcgctaacaacaccacggtgaaagccacggtcatatctgctgcctctgtccagagtgccagcagcgccatcattaaagctgccaacgccatccagcagcaaactgtcgtggtgccggcatccagcctggccaatgccaaactcgtgccaaagactgtgcaccttgccaaccttaaccttttgcctcagggtgcccaggccacctctgaactccgccaagtgctaaccaaacctcagcaacaaataaagcaggcaataatcaatgcagcagcctcgcaaccccccaaaaaggtgtctcgagtccaggtggtgtcgtccttgcagagttctgtggtggaagctttcaacaaggtgctgagcagtgtcaatccagtccctgtttacatcccaaacctcagtcctcccgccaatgcagggatcacgttaccgacgcgtgggtacaagtgcttggagtgtggggactcctttgcacttgaaaagagtctgacccagcactacgacagacggagcgtgcgcatcgaagtaacgtgcaaccattgtacaaagaacctcgttttttacaacaaatgcagcctcctttcccatgcccgtgggcataaggagaaaggggtggtaatgcaatgctcccacttaattttaaagccagtcccagcagatcaaatgatagtttctccgtcaagcaatacttccacttcaacttccactcttcagagccctgtgggagctggcacacacactgtcacaaaaattcagtctggcataactgggacagtcatatcggctccttcaagcactcccatcaccccagccatgcccctagatgaagacccc

SEQ ID NO: 19945 - DNA, 2300 bp, Homo sapien
tgccggccagactcagccactccgatttgcctgccggtttgaacaaggacatgtttgtcaagcggttatgggaaaatgatttttaaaaatgtaatcagtctgggcatggtggctcacgcctataattccagcactttgggaggctgactgaggccagcggatcacttaaggccaggagttcgagaccagcctggccaacatggtgagaccttgtctctactaaaaatacaaaaattagccgggcgtggtggtgggtgcttttagccccagctactcgggaggctgaggcacgagagttctttgaacccaggaggcggaggttgcagagccgagatgacaccgctgcactccagcctaggcaacagaatgagactcagtcccaaaaaaatgtaatcaatcatttctttatcacatagcttgcaatcacttcttagtattatctcacatgaaaacttcgtcccacttcagtctttaatgagtttagagccagattttgttccattcatgaggcttgacagctctttaatttccttgtgatatgacactgtttagttccagactgctatgcatgtcataaccaaagaatttgttttacgccactaatttacttcaaaggttctgcatggaaatatattcagttaacataatatctcagcctgagtgggaaacttttaaatataaggaaattcggcttacctacttgacagtgtttgctgtctctctctctctcatcccctaagtataccagcaggcagcctccttaaagttgtttcaaagttctgtgttcttgagattatcaaatgatattatttaaaacaaaaatccttctagaaaacttcccttatataatgaataattacttagtcattaaagggtagccagagatttcatttaacatggcatactgaataaaacagcatattctatctaccacaaattaggtagtggctttacttagtatttactgatgtatggtttcatatattatcttttcagtaaaagatttatataatgttatttcaaatacctggatgtttgtgttgaatcaaaaacctgtgtttttgagagagaattttttttacccttatgatagtttaacccatcctcctaaaattagccccatcatggttacctcagccctgtcctcatttttattatatatttttaaaaagttttttggttttgttactgtattcctaaatacaggttgagtatccctgagctgaaagtttgggaacagaagtgtttcaaattttagatgtttttggatcttggaatattcaaatatacataatatcttgggactctctaattgtgatatttattcttgtttcatacataccttatatggatagcttgaagggacttttataaaataattttaattttgtgcatgacacagttctgactgtgacccgtcacatgaggtcagatatgacattttccatgtgtagtgtcatgtcaaccctcagttttggatttggggacctgtaataatgatttaacttaaactattacaaaagagttcttaattgtttgagtgcatctattttcattcccttaagtgaactttctctccttcctccagcaaatgaagaaacacccctgccgccagtgtgacaagtctttcagctcgtcccacagcctgtgccggcacaaccggatcaagcacaaaggcatcaggaaagtgtacgcctgctcgtaagtcctggtttctaacggaacgcagtgagaggactcaggaggaacctctggaaggtttttagtgtagtaccattaacttgctgtgtgctccacagttcctacattacatttctcaattgtattattgttttggcatagagtttttggattgggttgtcacacttaaatatgaaaataaaaaaaaaaggagcattttcttgcatatcccacatacattgtgtgttttttttttcccgagacggagtctcactctgttgcccaggctggagtgcagtgatgcaattttggctcactgcaacctctgcctcccaggttcaagtgattctcctacctcaacctcctgagtaactgggattacaggcacatgccaccacacccagctaatttttgtatttttagtagagacggggtttcaccgtgttagccaggctggtctcaaactcctgaccttgggtgacccacctgctacctcccaatgtgctgggattacaggcatgagccctggcacccagcctgatccctgagtgtcttgggggagcgattgattggcagtacagggtctctctgcacatgtcgagttggccacattggcgagg

SEQ ID NO: 19946 - DNA, 2300 bp, Homo sapien
aaagtggctgtaacaaatacggtttttatttggtggatgagcaaagggttcatggaggtgaataaattagtctaagactggacaatatgcagggacttctacccaatgtcttcctgtgttgcttctcacccaatgctcaacctaagcaggagcctggaggctgggccaaaggttctgatgtgaagatatcacactgggttctaggtttattggtcacattttggacccttactctattcccacaaacctgttccacccacagctttcctcattgaagttgaggggaactctacccttctagttccataggttaaaaaccctggagtcagcctcaatctcttttcttctttcacgccctatatttattctttcaaaaaatcctgaagactctttcttcaaaatgtatccagattctgaacctttagtgctgccaccttagttccagcaattattagtggcagggttaactatcaccatatcttcctatgtactaagcactgtgtcttgcacttataattttatacatctgatatttggaagaattttacacagactagcttctggatctgtacatttcaaaccttgtttttcctctccatccacttatttccaaggtcaagtgctgcagaacactttcatatcagatgccacttccagtgggacttcctgccacggtgccaggtgagttggcccagtggatggcagtattcccagaagccattttttacacgaggatggcaggaaagaccatgaaccacataaataaattcactaaactcaaaccaaatgtatctccaactcgtttcctccttagctggatccccaaaattctccttgtccctccaacaggaggggaaatgtaatggaggtgaagttggaatgcaaagaaacagaactcttaaccaatagcaattgcaatatcttgcttttgaaagttttacacattctatggttaagtttctcccacaccttggaaaaacacctttgcaattgaagggtcccagaacttacctttcattagcttcatggtaagtcagcttctggtatattttaaattgcaacctgatcctttcccccagacctccccattcaacttatctgcttttcctgttgtcatagcacctccatcctttaggtaccgtataaattatccattatgtctgccttcggtagaatataagcttcatgagggcaagaatctttgcttgttttgttaactgatgtttctcaagtgcctagaacaaggccaggtgcatggtaggtgctccataaagatttgtggataaataaatacaataaagaatgcataatgcatacacgagtgagtgaatgaaccaaaggtaatctaggatcagaactgtgatgatctaggacttctaaatttaaaactttgagttatattccactcatttccacttaaccttggccatgtcaatgaacctttctgggcctttgctttctcgtgtatgaaattaggtggttatgtattcatttaattaatatctattgcaacccaattatggtcaaggcattcaaagatacttccttgcatacaagtggtaccactcaaaatgcagaattcagcggcctcaaaagtcccgcctcttccaagccccgcccaccgcagtccatctttaggccccgccccaattcggctcagcccgccccagcgtagaggcaccacctttcctcgctgcagtcatccaatagccaagatacacggctaggtgatttgcgagcgggagttaggtgtcctcttggcgcctgaccagagtcgggaaattcagctcctcttgagtagtcccttccccgagttgccccccgaggtatgcggggtcactcgctgctcgatgttccctccgaagggtcggacaaggctccggagccctgtagctgccctccctaggagccccgggtcttcactggccgaggtgcccaccccgcagcattctgggagtggtagttttcttccttcaggttcattcctggctggccagtgcccaagactggcgagactacgattcccagacgcccaagcgagtcgccggtcacgtggccgcaaggacgctgggccggtgggcgggggccggcaggtgctccgcagccgtctgtgccacccagagccggcgggccgctaggtccccggagaccctgctatggtgcgtgcgggcgccgtgggggctcatctccccgcgtccggcttggatatcttcggggacctgaagaagatgaacaagcgccaggtgacggaggagggtggtgagcgcgccgtggccgggaccgcctgtgctagcggggag

SEQ ID NO: 19947 - DNA, 2300 bp, Homo sapien
cctgggcatttcttaggtttgttgttcattcgccaaatacttatcaagcaccactatgatccaggtgctctgcagacacacagaggaacaataccaagtccctgtgttgaagcaagctcactgtgtgggaggcagcacgcctagggatgatcagttgcctgccaatggaacacttgcctactgacagagcctgggaacggaatgcagagaggctgggaacccgggagggatggagcccaggccagtctgtggacctttttcttttgattttcacttagctcactcactgaggatagtattattgtatttggttggctaccaaactattaatgatcttaaaattgactttttttctcttagacccagacacatgcatgaaaatactcttcagatccaagagtactcagtcatgcaatgtgagtgtgtaatcacttaagaatatattgaacaccaagcacagtggctcatgcctgtaatcccagcactttgggaggccacggctcacttgaggtcagaagttcaagaccagcctggccaacatggtgaaaactcatctctactaaaaatacaaaattagccagacgtggtggtgcatgcctgtgatgtcagctactccacaggcggagacaggagaatcacttgagccgggaaggcagaggttgcagtgagcccagattacgccattgcactccagtctgggtgacagagcaagactctgtctcaaaaaaaaaaaaaaaaaaaaaagaagaagaagaatgtattgaatcagcagatactcagacacaagtgtatgttttcaactttatcaatatcaatatatcaatatcaacaccatgttgacatggaacactaaagacccaacagggaggcaattaacaagcatttgaggaggaatagacctcacctattccaaccacacggccaactctggcagccaaaacgtgggcaacagcatcctaccagcttctatttattgttgcattgctatggtgctgatcccctttgtatccatggtatttagaacctcggggattgggctggtgaccattctttagatctgagaacagaaggagcagaggaacgttgagcaactctagaggggtgtgtatgtggcagtttagggacagtttgagctttcaggtagaggcagcctagggaaactggcataaagcagtttctttctctattccatggaagttgcatgcttgtgaaaagggccagctatcttctgtcttgccatacaagtgggcagagctgcctgggaataccaggtgggttaaggatactgcccttaaccttaaggtggagggcagcagagggggagagagagacagagagagagagagattggggaggaggggagagagagagggatgggaaggggaggagaagagagaaggggagtggaggggaggggagggtatgggagtggagaggaggggaagggaggggagaggaggggagaggaggggaagggaggggagaggaggggagaggaggggagaggaggggaggagatctgcaagaaagaggcaaggtccagaaaaagagagagagatctgcaaggaggcaaggttccaaaatctatgggctgggacagcaaagatgtggcctacgaagagaaaggtctggagaatcagaaggccttcaaatggtggttccaaatccctccagcaaagcccatccatctttagagctcacccgtctccagctacaccccccacccctcccggcccagatcaggcagcggggtcgccctctccaggactctcaaggcagctaaggctggaggcgccggcgagcctggagagggaggagttcactaaattgtgttggatggaaggcgtcgaggaccggaggaattaatccgatgtggggaaggcggacggggctacgaggaaaaaagagggggcaatgtacactcagccttttcatcactcggcggggagatggatggttttccggaccgggcgtcccagcgccccggttagctatagggagacgtcagagcgctctggtccgcgatagaagagccccccagcccccccgcccgggcttccatataaagtaggggccctagtggaggccgcagcagtagcaccagcggctgcggcggcggagctcctccgaggtccgggtcaccagtctctgctcttcccagcctctccggcgcgctccaagggcttcccgtcgggaccatgcgcggccgtgagctcccgctggtcctgctggcgctggtcctctgcctggcgccccgggggcgagcggtcccgctgcctgcgggcggagggaccgtgctg

SEQ ID NO: 19948 - DNA, 2300 bp, Homo sapien
gcaggcagaaaacactggacaaggagtcagtggcctgagttctagtcctgacccttccacttaatagctgtatcactttgagcctcagtttcctcttctgtaaaatggggaccaatatgtctgtcctgctcacctcacaaggttgtgaagatcagatgacatgaagaatgtgagaagattctgaaacctacaaagtgacatgtcgagagaattgcttgagcccaggagttccaggctgcagtgagccaccatcatgccactgcactccagcctgggcaacagagagggaccctgtctctaaaataaacagacaaataaataataagtaaataaagtaatatgtgaacactgtaaagtgctattaactttcattaattttagcttttttcttaaaagataatttctgacttgaattagttcaatttctatctcctgcagtcacatgcttgcccttattttagtttgccattatatagttttattaaaagtagatatgcccatcatggggaattaaccattgaatgatccttaagaaattgacttgtcctccgcaaacatccttctaacaccaatttaaaggttggggatctgaggatgtgtgttttccctcttcctttgtcttgtcttccagactggacgttaaactccaccaggccaacggccctggcctttcccaatttgtttgatgcccacgacgtggccctcgacggttgccttgccctctaaagggacgcagcaaacgcttgtctgaacgcaagcgggataaagaagacacccctgctgtggagatcagagcgcctactgaaaaggagattttagggatattgtcctctaggtccttgagcttttataggaaagcattttaattcacggttcaggccaccagttcagggaaggccaagcgctcgcctcgggtctcgcctcagatttgaggggtgagacgttcacagcgccattgtccatccgcgctgctggaggtgaaacacactcaccctatccaatcatctttccaagtggccgatcagtcactgtgggccacggaagcctcgagggggtccaaaggagaaagaactgcaagccaattactcctgaaccctcggggaggcgagaggcctcttccccgggagaaggtccttccccagccagctctgggccatctccttggcccggagtgttggagggaggcgggagtgcgacaccgctgctcatcagtaaaggagcccgccctccccgcaggacaaggggcgggagcgaggaactccaggtgggtctcctgcgggacctgagcccggcagcacatccgactcggggctcccagtctcctgctgggcgatcgggcgctagaggtcaccggacttgcggacataaatggccctggggtgggcgctgcggggaaggagggaggctgccggcgctcaagtccgaggggactgggaggagttacaacagatatagacggacaaactaaacgcgaggtccgggacttcgtacaacccagccaagaaaggagtgggtcccgaaaagggagccagcgaggggaaattcaaactgcgacgagtgcggggctgggaagccttcggctgggtctcggcgcttccagggggcacaggccagggtggcggccccgcggaggtgagccagagggggctagaggggcgagtctgaagctggggaggggtgcgtccaaggagggaggtgacccccagggggtagtctgaagtgagagggtaagcccgaagtagagggagacaaacgcaaggggagagatgagcccaagggcgtcggccccactgaggcaggactaggggtgcgccgcgaccaggttcccgagcccatcaggcatcccgccgcggatccccggagtgtgtttgtaaagcttaaaacggatcaagaggtggaaggggaatattcctagtgccggcccaggggtggccactagaggaccctgtggctgggccgggtgaggacacgcccctctgtggagggaggggccgagagaaggggctgggtccagggcgagaggggaggagccgagggccagttggctccccgcctttagcgccgagagccccagctaccccgagcccgaacttccgacttctgggactaaggcggcagcgggctgagcgctcggccacccccagcgtgcgcagcccgggcgggcttcgcccgcggagcttgacctagggtcgggacccgtcgggttgcaccgccgcactcgggaagacccggcttcgagcctctcctctccgtctccaaagcgccctcccgcctcccggcgctccccatgcacctgccgg

SEQ ID NO: 19949 - DNA, 2300 bp, Homo sapien
agggagccatgggatggggacacctagaggtcccattcatgaatccagggcattcatttcccctttctgaaggaacggaagattctaccaccatttctacaagattctacagccaggcttggtggctcacacttataatcccaccactttgagaaactgaggcaggcagatcacttgaggtcaggagttcaagaccagcctggccaatatggcaaaaccctgtctctaccaaaaatacaaaagcttagccgggcatggtggcgcatgcctgtaatcctaggtactcgggagactaaggcaggagactcgcttgaacccaggaggcggaggttgcagagagctgagatcctgccactgcactacagcctgggcaacacagtgaggctgtctccaaaaaaaaagatcctacacaccagctagtagttcctggatgtccaagggcaaaggtcattgtaataaatcaaggagtaaaaagttttttaagtcgtgacctcattctcaatggaattacctgttgaggaaataataagatatttgatttcataaagcactctcaggagaccttccacggcgaccctgctgaagctaccaccgaagagtccccataatgcatgacaccccctcttcctaaccccctccacacaaacatacattcagaaaaggacgggacagggagaaactcctttacacatgggtgctggagtttagaattgacaccctcaccattaatatttcctaattcctcatacaatggaatttttagaatagattttataataaatctaaataattacttataataaaatgtagaccgaacagacagaaacacaaggctgtggcttttattttatggtttgaaaagttctatgagacaacattaattagtaacattcctcagtggactgcaatgtagtttattataaatggtaatttagagataatggtatgaacgtgttaagttccaagcaacccatctaaaagagaaagtggaactcaatattgatgggcattctcctcgaagccctgagtacagcttatatttcaccctaaattatcttttttagcctttcatattgagaccatttaagcagcattttaaaatagattactaaaagggaaagcagacgataaaatatataaagcaagcattttaggcaagaatccagattatgtaattctatatgatcagagagataatcacctggtttctgagaggactcatgccttcagataaaataacaatggattacatctcttccttcccaccccaccctctttggcaggctttaattagaaagatactagtgtagattgaagtcttagccatactcaactcttcccttgacctgaagaaaaccacagccatagagaatctggtgggatacaaaacattgtcagtttcatccaagtacaccagtgagcttaaatagagcacccaggaggtgcactctttatgcaagagaaaaaaggtgaccccttacatattgatgatttgactcacataatggtcttaccttctggatcagagccttgaagtgtcaagcacatcatttccatatagacaagtaatatttccatgcaggagaaggctaagataatcttccagatgtaaaccaaggacctgctgtctgggtctttgcatttgtcagttgtgtatttatgtgcgggacacagtaactattgaagcaaaccgaattcaagcaaactaaaaagcaaatccttgcatagtacttaaagtccaatgagataaaatgatggatcgaaaggattatttttgcttaatgaagcattctgggttttgagtctcattggactcagtttttcaacaggatgttttgctcaagggctggaatttggaaattccacaacagctatataatcagtcagctctgattaatttaattgaaacaggactcttgatgaagccctgctgtgcttataattaaaaatttagaaaggggtagatgatgtggggatttctttttcctgtgaaattagctgagtgtattaattcagaaggtaggcagttgcctctgattgtatgcttcggtaatctgaaccatctgcctctatatactaaggagttcaccactttaatccagcttacggccgacaaaccactcttctctatcagtatgcccttgaatagatgaggttgtgcaaagtcctttgctcttaaatgtattgctgtcattgagaatatttggaggttttctcttgggtttgtttggattttttttttcagcttttgtctgaattttggttttatttttctggggcagagaaaatggctttcctta

SEQ ID NO: 19950 - DNA, 2300 bp, Homo sapien
cagtgtaaattagcacaaccactctgaaaatttggcaggatctactatgacccagcaactctactcctagttacatacccagtagaaatttttttttattatactttaagttctagggtacatgtgcacaacgtgcaggtttgttacatatgtatacatgtgccatgttggtgtgctgcacccattaactctagaaatgtgtgttttttaaaaaaaaaatctggatgctggttgcatgggaggtattcattttgggaaaaattcattgagttacattcttaaggctggcataattttctctatataatatgcttcaataaaacagttttttttttaagaaacagcttcacagaacataaagatttacatttatggttcagcaaaattacaaatatttacttgtattatgcttgaaattcaggtccctcatgagttcaaatcatgcgtaatgaattgaaaatacttaatatacataatgtttaacataaaacggttcttaagattgaaggcttcaatgatagaatggctggaattgaaacctacctctgccacttactgtgtgacattgggcaaattatttaatctatgcttctgtttcctcatctgtaaatggaaatattaatggcatctaccttagagggctgctgtcagcattcaataagttaacatatgttgaaggcttagtgcagttacacacagaaagcactcagtaagtgtttgccatttttataacattaatgtttgtttaacaaatatttatggaatcttcactctgtgcaaggcatagagctggttgccagagcaatgagagaaccaaagaaaataaaatgattaaatcctatgggttgaaaaccatggagagtccagggcaatgacgcacatacaccatacagtggataaatgtttgttactgctgctgctgagatagcagtaagtatggtactttcatttaaattacatctcgagactagcaggcggaaagccttaaatccatattcaacttgaaggttttatttgagcactagaaagagatttaacagtaatggcccatgaatccgaagatgggattcaacttccaaaactgggaagttaatgaaaaataagtttaagtaatgcgggtattgagtccctagggctagtgtggcgttcatgtagcccacacgaacagagctaataaaaagccatgtgtaaaaacaatataaatcatactgctgtttcttggacttgaaaaactcatcatgacacatttttgaaaaaacaaaactttggattaccatgaatattttgacgatattttttcctaagcaagggaaagaggagtcccctttaaaatatagaacgtattcattgagtggaagaccgatcctatatcaaatgtccaggttctacagacgcctgggtccatagcacattatccctctcaccaaaaccaaaccaaaccaaagtcagtttcatttgaatgcactcttgccatggtttcaaaatttggaaagctcttggaattaaattttgagatgtaaaggctggctgacaaattcacagaaaccctctttccgacaccaacttataaatcctaaggcatcctacaaccccgtgggtgctggtttctagtttgcaacgctctaacatagcttggtagagctcagtgggctgggaccataagcattcgggattgtgccactgaaaaactgatgtcacatcaaaaggaacacctttcttctaatatactaaaaaggttttgtacaggctgggtccagaggtcttagggctagccaattcctgctcccaggtattctaagaagccggagaaagctccctgcaggtaaggacccatcggcgcttcccgcactctgccgcgcgggaagcgaaggttggagtcctttccccacccccggagggtgggcggggccgaaggaccgcaccgccccagacccgccccctgcgcgtggccccgcccacagctgctcctggccgtgcggccgcgcggaaagcggaggccgggggcggggctcaccccttgcccttgggggtcccccgggctctgccaatcagcgagcgccctgttggccatccgcagccatccgcgcccctccctctcccgccctcctccgcgttccagaatccaagatggcgggatccaggcaaaggggtctccgggccagagttcggccgctgttctgcgccttgctgctgtcactcggtcgcttcgtccggggcgacggcgtgggaggagaccccgcggtcgcgttgccacatcgccgtttcgagtacaaatacagcttcaaggggccgcacctggt

SEQ ID NO: 19951 - DNA, 2300 bp, Homo sapien
agcccttccctattcccccttactgctcagctcgttatcacacagctgcagtgagtcaaaaccatccctccagtgcaccaattgaagggagtacaggtgaggaagctacgggaattcgcctagaaagcaggcattaacaagatggccctgttatgttggttacacataaagtggatttttaaaaactgccacttttgcagaggttcaagtgtttttctccgatgacacattcaaaacctgcctaaagagctatgttgaccctgtatattcaacaattacactgtcacttgtggaaacgcaactacacagcatggcatcatttgtgtcaacctgctggcttgagaaatgtgtacctagctcgggtgctgccaaccccaggtctcccatggtgcagggatggtggtgcagcaggtaagctctgaaacttcctgctgctgtgctgaaggtgcacagtctgagagctcagctaccaggctgcctctgggcctgctcacctcccaaagggcagaagccctggtcactgcatatgtcaccaggaagaggactgggcagtcgggctgtgtaaggaagttttgcctgcatgtgggctgccctcatgcccatctctccctccatccattcaagtgtctgtttcctagggttgccatagcaaaatgccacaaattaagtggctgaaacagaaatttgtttctggtctgaggttagaagtctgagatgtcagcagggttggtttcttctaacagctatgcaggacaatccattccgtgcctttccccagcatctggtcatcagcgggcaatttttggtgttccttggcttccactgcctctcacctctgccttcatcttcacatagcattcttcctgtgcgcaagtttcccctttgtataaagacacccatcatattggactaggatcccatcttactccagtataacttcatcttaactgattttatttgaagtgatcctgtttccaaataaagtcacattctaaagcactgggaatcaggacacaattcaacctgtaacgatccatttcccaaagatttttcgagcatccattacgtgagataccaagaagtgagcctggttcttaggcagcttacctggtggcatgcgccctaagagatgctctccagggaggcctagaagaccagcctgtgagtgggagggacacacggtaaatgctgcctgattttcagacttccgtgggtagagagcaggcttcatggaacatttgatgtgcatcttggtgggattcaacaagtggagatggaacagagggctttgcagaagagaggaacagtaagaagcaaagtatacgggccaggaagaacaagagatggtcacgcattacccgacttccccagtctgcgttctagatagtcgtggttattatgtcacacaaagagcaaacctggcccaacgccaaagggctgctaagcgaagagagtttatgcttccctgggtgtcaaactgtcctgcctgcctgaacaaaacaccctcaacctagcactttcagcccacactgctgccacctttggcacagaccttggcagtctgtgcaaggtcctcagcagcaaggtgacccaggtggctggtctccccagcatgcaggcttaagtaggccattccagtgccaggaagaagagagctgtctgtattcttggccagatcaccatttacttcacccagttttcctttagcaaagaatgtttttacaaaaagcccatggagcacctagtgttctacagcagggctttgggaccctttgcagtggttgggcccgactgcgtttccagtgctgtcctgaatggccccagatggagtggcgaagtgtctggggcatttcccatcctggcctcacgcgtcggtgaggtcagctcccggcccactgctgtgctccctttgaagaactggattagcagaggtgataaaggcagctttgaggcccagtgcctgcacttggggaatatttacagtgtgtgaacattagccctttaaggggagtataaatcatgtcagatttatagagcctgccttctggaaaagcactgataaaaggccatggtacgcattttcacacatgaaaggaagatcagggtcttcctggcatgtctaaataggaacagctgagcccagcttctagcagggcccctctccctctgtcctcccctcttccctgaccctggggcatgctggcaggacctgagagctgtaaaatcacccacagttgagccctcgcatgtcccgctgtcagctactctgtccctgggaccgcccttcccgatgctgtctc

SEQ ID NO: 19952 - DNA, 2300 bp, Homo sapien
acaagtaataatgtttacagggcactcaacatatgccaggcatgataaacaaaatgctatagaagcattgcttcatttaatactcataaaaattgatgagagatatttccccattttacagatgagaaaacagagtgtcagaagtaaattgcttcagatcactcctccaggaaaccaaacagcctgagtttgaatccagttttttctgacctcatggttttttttttctgacctcatgatgatcactctccagttttgcaacatcctgaaatgtcttctgaattatcaaataaaaattaactcatttgtgttaagtagcagtgtcatattttaatatcaagtgggtggtcttccgaatatgtaagttttgtaaaataagccaacaaaaaacacacctcacagaactaagaaatcagatgctcagattgaagggatattgtgggaaccaaataaaatcttgaatatgaaaaatcttaggaaaagacatagcattctacggaagaatgacaatgtcattgctatcaaaaatatcagtgtgggctggctgctatggctcacgcctgtaatcccagcactttgggaggccgagttgggcagatcacttgaggccaggagtttaagagcagcctggccaacatggtgaaactctgtctctactaaaaatacaaaaattagccgggtgtggaagcatgcatctgtaatccctgctacttggggtgctgaggcagaagaatctcttgaacccggcaggcggaggttgcagtgagccaagatcgagacactgcactccagcctgggcgacagagtgagactccgtctcaaaaaaaaaaaaaagtcaatgtgtatgtgatatgtgtggtaattctcagttgaccagcatattctgtatatcaaaatatgtgcttacctaaccaatttacacaccggtcacttgtgaacaagccacctttttacctcgttgtcctgtgagatgcagaaccacgcatattttagagcttaggcattagaacttttcctttttcaacttatttctgggccacatccacgtccccagtttctctggaaaaggctgagaaaactcctaaagcgcaacaaagtgttaagttgctgacacacgaattacaattagggtcaccgtcaagggagccgatttacggcccccctcctccgttttcttgttacctatcaacgcggctgcatacactagcaggtagcagcacctgtaattaatttgcccccacgtgtctcatttgatgggggggggcgtttccagctctgatgtgcgcggcgtggaaacagtattaaagccgctcaggacaaggagatgtaaggctcccagaaagacctccttacttgttccgaactcgagttatgaagaagacagcgcatggtttattgaccaatgaaacaaccagagaactttcttctaaaggttttaaggaagagtgattacactatataaatagcgctatttcaggtttgaacaatttgagaggcccgttgtagcctttcaactcctccttcctcacataatctaagagaaaagaagactaagatagttgcaaatctcagggtaggtcctcacggaggaaagacgaacactggcctgaccctgggctttagaaacccatggacaacaggaaggaagcttattaacccctctcttccccctccctcttctccccggtggagaatcagctcctcctcctcccggtcgtgagaccctggtgcaaaatgcaaacaaccgcccgctttccccaccctgcgcgcttctcccagaggagggagagggaagaggcgagggcgcagccccaagccgagtccagcaagtctgtcaatcggacgtgaacgtcccgacgagacaacttgaacctcagggccctcgcgccagccggacaccgcaggtaccccctttacctgcttctctgctgggtttgcatccgataccccaactcctagcctcattttccccccagccccataatattccggacccctgctccccgtgcaggtggtgcaaacgcccctgctctccggcgccccctgccgggaagagggaaggcggcggcggccgcggaggagcaggacgcttggtccggacggagctcggcgctgggaagaagccgggagcttccctgatggtgccgccgcctccgagccggggaggagctgccaggggccagctgggcaggagcctgggtccgctgctgctgctcctggcgttgggacacacgtggacctacagagaggagccggaggacggcgacaggtaagcgctgcaagccccagcggagggcgag

SEQ ID NO: 19953 - DNA, 2300 bp, Homo sapien
gatgggtcatgcctgttaatcccagagctttcggaggctgaggtgggaggatcacttgaggtcaggagttcgagaccatcctggccaacatagtgaaaccccgtctctcctaaaaatacaaaaattagccgggcgtggtggtgggcacctgtaatcccagctagttgggaggctgaggcgggagaattgcttgaatccaggaggtggagattgcagtgagccgagattgtgccattgcactccagcctggcccacagagtgagactccatctcaaaaaaaaaaaaaaaaaaaaaaaaaattaagtacgttgcagatagcatattgtttctacatcaagtccaaagtaatattttagttaatcgcaatttgccacctaagagacagaaactcagtgtaaaaagacaatctactataataagaaaatgtaggccgggtgcaatggctcatgccagcactttgggagagcaaggcaggcagaatgcttgagcccaggggtttgagaccagcatggccaacatggcaaaactccatctctacaaaaaatacaaaacttctcagcaaactattgcaaggacaaaaaaccaaacaccgcatgttcccactcataggtgggaattgaacaacgagaacacatggacacaggaaggggaacatcacactccggggactgttgtggggtggggggagaggggagggatagcattaggagatatacctaatgctaaatgacgacttaatgggtgcagcacaccaacatggcacatgtatacatacgtaactaacctgcacattgtgcacatgtaccctaaaacttaaagtataataataataaaataaaataaaaaaatacaaaacttagcaggacatggtgatgggtgcctgtaatcccagctactcaggaggctgagtctggagacttgcctgaagcagaaaggtggaggttgcagcgagccaagatggcgccactgcactccagcctgggcaacagatccagaccctatcttgaaaaaaataaaaaagtagattccagttttttaaactagtaggtgtgtccttacaaggctgctaagctactgtgttcagcagagccctttctccattaagatgtcttgactgcatctcctgtctacctgaggatggatacactgcctccttcattcctcctcccaaaaggcactgaataaaaagtgtttcccctagcttcctttccagagacttggatcagatgaacacatccaataaagaaaaaaacactcttaattttttttttttcttgtggagacaggggtctctctatgttccccaggtgggcctccaactcccggccttaagtgatcctcccacctaggcctgctaagtgctgggattacaggtgtgagtcaccatgcccagccaaaaaaattctctttgacactaagtcccccaacacctctagtcacactctcctgctttctttccctctcttccgacaaaacaaacttcttaattattaacccagcagaggtggagcccaactcccaccttcacttcttagtgagtggcacttaaaccacaactaagcagggatgagattttcccaaactgataactgccctcccaaacaaatctacattgacatcataaatacagtactaagcattttataagcttatatataagaacataccttatttgaattggtgctaaactggggagaggagaatgcgagtgggaacttgctccacatgcagtgatgaagcctgttctatgcaccagccacaggttctaggggctgggaaaacagcagggaataaatggaataaatctaagtcttgccattgtgttgcttaacattctcgtgtggaatatagacaataaaacagttgaccaatacaaggtggggagtgacaagggccaggaagaagaatcaaacacagaagagcagagagggcaatggagagagctactttgggtagggtagggggaatgtgaacagaggtctggttgcagaagggagggagctacctggagacagaggaagcatattccatgtacaggccttagggctggaatatctctggtaagttgaagaacaatgaggccagagtggctggagaggagagagagagagagaaggaaaacgttggagggtaactaggagcaaggttctgcaaggtcttgttgaccatggcaggaatttggggttttgctccaagtgtgatgggaagcgtgggagggttgagagtgaaggagtggcatgatctgatttatgtaataaaaaaatcacttgagtggctgtgtggtatgaaggagaaaaata

SEQ ID NO: 19954 - DNA, 2300 bp, Homo sapien
acagaaatttaataatttatgcaaccaaaaagttaacggtgttccttatgtattaggtaagtcaaaatgagcctggagtggttttgaattaccacttggggataatagatttcaaggcagcatctccagtgtgcttcctgcgtcttgtgatgattcctaaattctgtccacttttactcgtttgtatataccccattcaaaaacagccaacatcagcctcgaaactatgttgtttaaactcaagagcagttttgttccatgcttatattgttgtccataccttcagcaggaccaagccataaataaatacttgctggtttgtgttgactgaatgatttaagataaataaacaacctcaaatgcctactgaggccagataatgtaaatgggaaaagcaaacagcggggagtgtggtgaacaggagcaccctaggttcctctaaagggtgtggcttcgaccacacttcaaacctagtttgcacttttggaaaatggatcccacgttgtcagagattctggttttccaagagatgctggaatctgggtttttcatgcaatccctcaatgtttaaaatgttggtaatcaattcaaatttttacaatacattttgaaggccaatactgtaaaccaaactaagcacttctagggagcccatgcaacgaatttgcaatcttttcattaaacagcacagctaatatgaaaacacgctttttttttctttttcttttttgagacagagtcttattccgtcacccaggctggaatgcagtggcgcgatctcggctcactgcaacctccgcctcccaggttcaagcgattctcgtgcctcagccgcccaagcaactgggacgacaggcgtgcaccaccaaggccggctaatcttttgtatttcagtagagacggggtttcaccatattggcaaggctggtctcgaactcctggcctcaaacgaaccacccgcctcggcctcccaaagagctgggattacaggcgtgagccaccgcgttcggcgaaaacacacattttctaagaaactgattgctgggaaggctacagtgggtaagagctcttgctctctgtgggcctgcctggttcggaatcagggcagtgctctctgcctaagtgaacttgggcaattttctacaaacctcagtttctgcacccgtaaagtagcaacggttgttctgaggacggaatgagaaaatgcatgtcaaagtccttagcatgaagcggctctcagtaaccgttaaccactcctaattactcctcttcataatagtagaattactcatggcctcgccaaacattatgcaaataatttcacgttcccaggtagctcagccctcccacaaaagatttgaacgttttccatatgataacgatccactcgtttttgctaaacatccacaatgggcgatatcgacctatctggaaggacacacacaaatcccttcccaactcaaacacgatgttctttctggctggcaccagggcttctgtttgcagtgacttcctgggacccggagctttctcacagggcctctggcatctcctctgcggtgattaaggttcttctcatttcccttccctgttactgcccatactcttcaagttcgaaaagtttccttttccaatctcttttctgggcttgtttacccaagtctctaattgccaaggcctctggtctctccccacccacaacgttcctcctggttaaacccttcccctcccgccactcccagctcccgccactcccagctcccgccaccactgccgctgacgacgtccagcgtttgcagatggtcaaagccgacccccttctcctcccacctcgttttgtaaggaagtaatttcggggccgagcgctctgcgccccccgccgcgggtcggcgccgccgcgggtcgggagcgtgtccgggcaggtcgcgctcagcggggtacttccccgcccgcgtcccgcgtccgctcccataacgccgtctgcggggcggggacaggggcggggacaggggcgggccgggcgtctagtttccctacgtcaccagggaagttctcactggacaaaagcgtggtctctggcgcggggatctcagagtttcccgggcactcaccgtgtgtagttggcatctccgcgcgtccggacacccgatcccagcatccctgcctgcaggactgttcgtgttcagctcgcgtcctgcagctgtccgaggtgctccagttggaggctgaggttcccgggctctgtagctgagtgggcggcggcaccggcggagatgcctgggaagaaggcgcgcaagaac

SEQ ID NO: 19955 - DNA, 2300 bp, Homo sapien
taaaatgtctaaaataggcacattgatagagacagaaagtagattagcagttcctagaggataaggaaagggtaaaatggggagcaactgctaatgggataatgaaaatgttttagaaatagaaagtgatgattatggcacaactctgtgaatatattcccccaaaaatccatttaattactaaagaggtgattttttttggtatgtgaattatatgtcaatttttaaaaagagaaaaaataaggcaagaggaaggtaagattatttccagctcatgatgttcaggaaagcccattccagcattttacaatatacagatgattaggcattcagaaatacaggggaagggagttggaggtgtgagttctgctctgtgcaatcattcaagagacaggctcctttcatgatatggtcctgccacctgtaacatgagatttcaaagacaggagagaaaacttgtgtaaaattatgaaagagctaatgcgatgagccccactgtcaacatgccattagctagaatttagtcataaggtcctacccaattccaaaggtggatggaagacgttaatttatctcaatgctcaggaacaatacttagtattgtctctgtcacaaaaggaaagaggatacattcccaacctaagtaactgagattcagaattaaccctgaaataagcagctacaaactatagagcactaaaaccaaaaataatcatagaagaaaagaatatacaaaattttgtataatctgttgttcagttaatttggaaagtaactttgctgccatctttcaaaccaccttaagcaaaatattcagaaacttcaataactaactagtatcaccagtcttggcttgataagtaaagttactaggtatttgtcggttcaacttacgatacgttaaactctggaggtttaaaaaaaagttgcttaaaaaaaaaaaacagaatgcagcttattattttcctgagttcagtgtaagcatagttacattaatgccgtatgagtttaaaatattgtaaataaaaagcaccttttttcagctataacacaaactcctcaatagagaaatatgggatattagtgcattaaaatcaaccccttttgaacccattcataatttatagctacctacatagttcttccagccataccatgtctatctgtatcattaaatatcctctctgtttttcaggtattttaactgaaccactactggctgggttcttaataaaaacaaaaaattaagaaggtaaataaattcagtatcctagccaaaaagcagagtatctgtttcaggaacataagacagtatactttccatttcattttacacacacacatgatgtcttttacataagaatgaacctggctgcctgaagatagcttgttttgatatcacagaatggcctctagggatcaagttgtttcccttgaaaacttaaaaagggaaattcagtctcttatccggcttgcttctcgacttcagacttcaggagcttctgcatctgaatctgtgtcaccctgcaatttgtgtctctgaaacataatcctgtctcacagactcccattgcattgggattggtcagaaggaagcagaggaggagccaccgtgaacatgttttttttctctccacacatcataaaaatcagcagctggcgcctacagcccctaacactcaaagcaacgctcaggctggaaacagaagcttccgagaggcagccgatgtgagcatgtgcgcacagattcgtctcccaatggcatggcagcttcaaggaaaattattttgaacagacttgaatgcataagattaaagttaaagcagaagtgagaacaagaaagcaaagagcagactctttcaactgagaatgaatattttgaagcccaagattttaaagtgatgatgattagagtcgtacctaaaagagactaaaaactccatgtcaagctctggacttgtgacatttactcacagcaggcatggcaattttagcctcacaactttcagacagataaagacttggaggaaataactgagacgactccctgacccaggaggttaaatcaattcagggggacactggaattctcctgccagcatggtgaactccacccaccgtgggatgcacacttctctgcacctctggaaccgcagcagttacagactgcacagcaatgccagtgagtcccttggaaaaggctactctgatggagggtgctacgagcaactttttgtctctcctgaggtgtttgtgactctgggtgtcatcagcttgttggagaatatcttagtgattgt

SEQ ID NO: 19956 - DNA, 2300 bp, Homo sapien
gtcatttacagggcacttttttgcctgcatgatcccatcagactcttgtgatggtccagtgaggtaggtgggagaattattggccctgcttaatagatgaggaaactgaaattcatacaactaaataagtcagaggtaatgaagatagaaccagtaaccaaactgtctcttagtctaatgcactttgaggaattatagatacattgtgtcttacaatatacagaatattgcttttatggtttactaatcacagcattctggcagtggctttttttttgtttgtttgtttgtttgttttggcaatgccctttagtctgccttctaggcccctaaaacagcacagctatttctcactaatctttgtcatcaattcgtttcctgggttaaattccttcttcccaaacacctccctgtagacagggatcagagaaacatgaactgggcttctctgttccctaagggaagatgtccaccagtccaaagagagagagaacagctaatatttggtaacccacctgctagcagcaccattgttctttattagcaaacccattgccctcaatgaggtgcacctggcttgctttttcttaacactcaatctgccttcagagctggagctcataagaggcacagcctcccattctgctacaaaaattctatagtctcctcagctactttctctatcatttctcattaaaatgatttattatacagaaatgaaatggcatattgtattaaataattataaagtagtttaaaatttcttttgtacatttcaatcatgagtatttgagaggaagctgaaaccagttctgatgacaggtggaaggtagtaactaagttagcatcaatgcattcacttcaaaccacttgaagaaatgaagtgttatttagtttcacagagctgcaatctccaaatacacacatttgttctcagatgacagcagttcttcgaattaacagtgaaaatattaagccgaaggaagacattttggttgtcttgacaggttgacttgagtgttatgccatctcattaaaccaagccaagtaagggaagaaaagattgatgaggccatagcccagaagtgaggtcaccagctaaatgtgaccacatagcaacaaaagaagtttgactgataaagatgtgtccccacggtagaagtccttttccctaaatgagtccttcaggtcaagaaaggagatttgttgactagattctcttagcttgctcccataggcatgtgactaatagcactttaaagtctgttgtgaaggatataatgatcaactgaccatttaaatcctggaaaggtcacattagcagcccctatcagtgcttcggagccaaaacagtagagtgtgaaacttgaaatccactgtgagctcagaaaatgattaaagtcagaagtgagccctggctgcttataaatgaagtccaagatttctagcattatcaataacagcagtaggcacaagatcattgtgggtgaccaaaaaaaaacaaggtagttggattttactatttttttaataagcaaagaaaagcagttgggctaatggaaatattagttattagctgtaaattttgtaaatgaatgctgcttttaagagtttaagagcctgtctgatcataaatatttcaaagagcacactattaattcaaaccaatcaataatacagtataaccctccagctaagttaccaatgagaagaaatttattcatcagttttattcccaccgaatctatatccaaaggtttgggattgattatagcaagatgtgttgtcttattatcaaaatagtatttattactcaaacatttctaaagcaataacctgttatgactttttaactcattgagtagaaagttgaatatttactgacatttcttgaaaacttgcaacccgcctgcaggaaagaatctgacatcatcacactgtgttttccttaacttgacaggaagtcaacttcaagcagattgacttgaaacgggatctcatttaggaagcataagtgtccaatcaaaaactgtgtatttttttaaatttggaaaatactcaagttccagttgcttatcattctccttcattttctgaaaacctggcaatcccatgtggacttctggtagaatgagcaatgcaaagaactggcttggacttggcatgtccttgtacttctgggggctgatggaccttacgaccaccgttctctcggacaccccaacaccacaaggtgaattagaagcactcctgtcagacaagccacagtcacatcagcggaccaagaggagctgggtttg

SEQ ID NO: 19957 - DNA, 2300 bp, Homo sapien
ggtaaaaataatgtggcatacatacacaatggaatattcgtttcagccttaaatattcaatacagctttagaaaagaaagaaattctgtcatttgcaacatggatgaatctagacgacattatgctaaattagccaagcacagaaagacaaataccacatgatctcagttatatgtagaatgtaagaaagtcaaactcatagaagtagagagtacaatagtgattgccagaggctggtgggtaaaaaggaaaaagaatcaaaaagttcaaagcttcagtaaggggtagtaagttcctgtgatctattgcacagcatggtaactgtagttcataataatgtattgtatatttcaaaatagctaaaagaatagattttaaatggtatcattgcaaaaaacaaatacatatgtgaggtaatagacatgttaattagcctgatttgatcattctatgatgtatacatatatctaaataccacattgtacgccataaatatatataattattacttgtcaattaaaaaaataaaaatggctggacacggtggctcacacctgtaatcccggcactttgggaggctgaggcaggtggatcacttgaggtcaggagtttgagacccgactggccaacgtggcaaaaccttgtctctactaaaaatataaaaatcagccagggatggtggcaggcacctgtaatcccagttacttgggaggctgcggcaggagaatcacttgaacccaggaggcagaggctacagtgagctgacatcatgccactgcactccagcctgggcaagacagcaagactccacctcagaaaaaaaaaagaattaaaaaataaaaatgataaaaattacttggcctttaccaaggactacataaggttctcattgatggttctcaatcatggctacatatcaaaatcccttatggagggtttttaacatccacatgcctgagcctccatccatatttattgagtcttccaagatggggaccagacgagataacacaggtgagataacacaacagaattggattgccaaatcaggttcaacaggaaatatagatcctacccaggagctagttaactaatggctcaaatgatacagacaacagcaaaacatgagtcattctccccttggagagctctgaaactgtcaggcacaggtgcctataaatgtccttttcttgcataaagatgcatgttggtccagactgaacatgaaaagtagaagcaatggacgaagtgcattgctcgaacgcaaagatccatttttgtgatggaacatttgcttgttatacatcattaattacatagcttatatgacattttccagtaggctgtaccccacaaatttataaactctaggtttatttacagtaaacaacctagccagatccggtccatcctgctaaaagcataccacagttaaggactctccagctagcaaatacattaccattattgtatttgccagaaggtgggtcattagcatgttaagaaagggcctggtacaaggcttcttttctcaatagttgatacaaattataaggactggaaccactaaactacaccttttctccttttctagtttcagattagcatttgagaactcatttgaatacaattctttttaaacaaatatatacaggactcgatactcaggatgtcccaaaattcttggggtaattccaagcattacgtagcataaaccatatttaaatagcttacaacttccccaagactgtcggcaccctgtttatttcattttttgaatgagaaaattgaagcaatatttgttttgtttattggaggaggaggtgacttttgtttctgaacaaataaaaccacgaatgcagtcttccagtagccataactcagaagtggtggaaccatgtttcatatggtaggcactcagttgtctcatgtggtatgctgtcatatgcttacccaaatgcaaatgatgtacgtaatccatgtttctgcagatactccattgatagaagcagtgaccctggaagatttttctatgttgacattacaacaggtgccctaatgacagcaagacccctagaccgggaagaattttcttggcataatatcactgtccttgctatggaaatgagtaagtagcacagtaagttggtctccatgcagtgacaaaatataggtgttatagaaagtggaagtttctagaacttgttgtaacaaaaattatatcctttaagggaagaaatggaaatcatgctttatgcaagtaagtaaatgcgttcagttcaaatacttttttgaggctc

SEQ ID NO: 19958 - DNA, 2300 bp, Homo sapien
tacaatacacttttctaaagaattcccatctttgggtcttgggatctggtggcctgagttgcttcacaccagtttattgttacctcaaaagtttacagactaccacccaatccaacccactgcctggttttgtacaactcatgaggtaagaatggctttaatattttcaaatggttgacaaaaaattaagagacgaatattttgtgatacatgacaattacatggaattcaaagctcagtgtttataaatagctttagtggaacacaaacatgcccatttatcgacaaagcatctgtggctgccttcctgctaccacaatagagatgagtagttttgacagagaccctgcgacccgcagagtctaagatatttagcatcatctagtgatactagaagacactaaatattttagcattaggtcccttacaaaaaatgtattgacctctggtctatcctctccttatttctatgctctgatttcccccagtaagatttaattctgcaggttttctcacagtcagtatgactctgtattttcttacttaactttcactctttagagcaactacttggtggtcttctaaccgtggtgggagatagttattgatcctggaatgtttctcagaggcatccatctacacttatctaccttgtcctcagtcagaattgccctgcctgtacacattttaagaaacaaaccaatcaatttccctaggaagtcctggtatgcactgaaattgaatatgatcattccctggacaaccagaaatgtttaatacagagcctggaatcagaaaattcccagctttcactcagaacagtttcctcaaagcacctgtatttcttcctatgtaaaaaattgttaactcatacatttaaacatagagttgacccttgaacaatatgggtttaccttttgcagattttcttctgcctccatcacccctgagacggcaagaccaacccctcctattcctccgcctactcagtgtcaagatgacaaggatgaaggtgtttatgatgacccacttctacttaatatagtgaatatattttctcttccttatgactttaacattttcttttctctcactttattgtaagaataaatcatataatacatataacatacaaaatatgtgttaatcgaccttatgtcatcagtaagtattctggtcaacagtaggatattaaattttggggtagccaaaacttacatatgatttttttaccacactggtcgggggtgggggcttcatacccctaacctctacattgttcaaggatcaactatacacacaaaaatgattcatgtctcttaacaaacattcattatttatttatttatatattttttgagacaggatcttagtctgtcacccaggctggactgcagcctgggctcatgcaatcctcttacctcagcctcccaagtagctgagaccacaggcgtgtaccaccacacccagctaatttatttgtgtatttatttttgtagggacagggtctcactatgttgcctagctggtcccaaactcctgggctcaagcaatcctctcacttcagcctcccaaagtgttgggattacagtcatgaggcaccatgcctggccctttaacagacatttaacatgattttcagacagttcgtacctcttcatctacagcaaggcttaacagaatttcaacataaaactttctgtgaagcttagaataggtgcaggaaatgttcagagttcacgttctagttcccactgagaaaagcatgtgcaccaatatgtttccccacccaagcatacactggggcccacctggaagtcatacaattctttggccttctgggctgattatcaaatggtcttcctctaaggccacttaacagccagtactaaggcacagatgttgcagaactttgacaataaccagtcattctttctgaacaaaaaacaaatttctttgcttacgtgataatattttagagtctgcgtgaaagtcttacattcagagaaacgccacagttctggcaccaggaatgaaggcgccatctggcccctcttgggctccttggcttgaattcctggggtcattgttacactcagcattctctaggcgaaggagaacaataagaggcaggtaaagctggagcccgtaacaggaggaaacgtgagcattgaaaacccgccctttggatgaactgaccacagctggacaacaccagtgccagggtatgtggaaggtggggacatcggaaatctggtcattgtcgtgcagtaggggaactgcagtgtttatataaagat

SEQ ID NO: 19959 - DNA, 2300 bp, Homo sapien
cgcagttaactcaagaggcgggagattttctccggggaacaagacattctaagcacctccctaggtcgaagttaggttttaaggtgtggaatagggtgggccccgaggttccgtggggttcgcgcttccatataacccctaggacttgcatctctttactcccctgcttcttgtcccccattcgagggattcaagtagtggggtgtccattcgggcctctttggaaagcggggccccaccctggctggactacgtgaacttttaggggcagccaaaaagtatccggtgacgaggatgcagggcagcttctggaaacctgatgatctcagctcctccctctcgctgtccgggtcctaggcacagactgggcaccccccaacccacccaccgcggccccggcccccttcccggccctgcccctcctcccggctgcccaggcctcctttcacacctgccgccagctcaggtcccgcttttgcacggtagagagacggcgtcgaggtcctggccgagggtaggcactgggggcaaagccgagggagcgcgcgagagagggtaggcagcccctcaccccgggggaggtgggcgattcgggactgacggagagaagtcccgggcccgccgggctgtgggcggggaggagggggtggagccgccggggagggcggtgccgcggggagcggagcccagcctctccccccaccccctttggtgccggagtctcagtgacacaaaaagctctcgctcggtgccgagcgcctggcggcggtgtccgaccgcgaacgcggagggcggccgggcaggtgggggtgccgcccgaagggccgggccgggtgctggggctgcaggcgccgccgccgcgctgtcagcgtccgccccgtggctctcggccggaggagcggcggccgccggcccggggcgcgagtctggctgaaaggagcgggcgcgccgggaccacccggcgatgctgtcgccgccgccgccgcctctgtagcgagcacccgagcccgccgcggagaaaggtcagtgagtttcggtttgtttctctgctctgccggctccggatcgggggcggacagaggggtgcgcagggatgtctgcgcccctacggcggccgcgccgaagccgtggaagcgggaaagggcagctgccgcctgctgtaactggggagatcttctggaccgcggagggggtggcggggccgcagggtcccggggaggggagcgcggggtctggcggggcacgggggaggtggtcccgggagttgcgtgtctcctgagagctggcggagttgggcgggcggccgcggcggggagcggcgctgtcggctgctcggccgagtcctcggatgccccctggagctccggtccgagggagctttcctcgtgcccgcgccgcgcgcgcccctgggtgtgcacgtgcgcgcgcgcccgccccagttgcgcccccggcccgcacacaccccggctcatcttctcccggtccccttgtctcgcgccttctccagccctagaagttgccccagggcccctcccgggattagagagcgctgtgaagggccagatgttgggggtcttttgtgcagacacacgcgcctggggcgcttgctcctggaaggacagcggcaggacaaagccagctggactcgtggggcgctgctcgggaagcggcggtccccaatcccgcctggggtcggggcatggcttggggagcgctgcctgggtctggagagagtagagaaatcgccaaagcagagtgacggtgacttgatgaggtgacggtgacttgatgaggtggcggtgacttgatgaggtggcggacaggggcaaacgaaagaaagatgctcgggattgccgcgctgtgtgcctgtctgcgcggctgactaggcgccccgcattcccatatgaccgggttacctggtagattttgccagtgtgtctttgccccaagatgttattccccacctgctccgatttctttctttcctagggcttactgttgctagtaggcgctctgccaccagaggggaactcgtgggcgggggagactgcggaggaggggggaggtggttatttatcctgtagagacaattaggagccgtgacgcccccttctcggccgccagccctccacacctcatctgccttgctccacctccctagtgcacccgctccagccccgtctgcccaggagggcgcttggatttccttctccgcggcgcgtatctaacccttcctgcatgtatttcactgcaggctgaagaaagctcagtctcaattgtgtttcctgcctgtcagcctc

SEQ ID NO: 19960 - DNA, 2300 bp, Homo sapien
gtccccactggctcacagggcttcctctaaaaaaaaaaaaaaaaaaaaaaaaaaaaaaaaaaaaaggcgcggtggctcatgcctgcaatcccagcactttgggaggccgaggcgggcggatcacctgaggtcaggagttcgagaccagcctggccaacatggcgaaaccccatctctaccaaaaatacaaaaattagcaggacgtggtggtgcgggcctgtaatcccagctacttggaaggctgaggcaggagaatcgcttgaacccggaagttggaggtttcagtgagctgagatcgcgccactgcactccagcctgggtgacagagcgagagtccatcttcaaaaaaaaaaaaacagaaaaagtaaaaaaagaaatcttggcagaagcatttcaataagctacttgggggagtgaaaatggggactctttccttgcggatactacggaccttaagacaaagacggctccactccagcagtggggaaaggcagcaagtgccgctggaatccgtggggatcacactcaactgagccctgctgctggggaccgggtaacgtccgcaggctgaacttcatctcaagaagagagttttaggttttcatgctgcagagaaatcctttaaaaaggcaccaaagggcatggaactatcttctaccaaggacctttctcctccattctcctatttcgcagttaactcaagaggcgggagattttctccggggaacaagacattctaagcacctccctaggtcgaagttaggttttaaggtgtggaatagggtgggccccgaggttccgtggggttcgcgcttccatataacccctaggacttgcatctctttactcccctgcttcttgtcccccattcgagggattcaagtagtggggtgtccattcgggcctctttggaaagcggggccccaccctggctggactacgtgaacttttaggggcagccaaaaagtatccggtgacgaggatgcagggcagcttctggaaacctgatgatctcagctcctccctctcgctgtccgggtcctaggcacagactgggcaccccccaacccacccaccgcggccccggcccccttcccggccctgcccctcctcccggctgcccaggcctcctttcacacctgccgccagctcaggtcccgcttttgcacggtagagagacggcgtcgaggtcctggccgagggtaggcactgggggcaaagccgagggagcgcgcgagagagggtaggcagcccctcaccccgggggaggtgggcgattcgggactgacggagagaagtcccgggcccgccgggctgtgggcggggaggagggggtggagccgccggggagggcggtgccgcggggagcggagcccagcctctccccccaccccctttggtgccggagtctcagtgacacaaaaagctctcgctcggtgccgagcgcctggcggcggtgtccgaccgcgaacgcggagggcggccgggcaggtgggggtgccgcccgaagggccgggccgggtgctggggctgcaggcgccgccgccgcgctgtcagcgtccgccccgtggctctcggccggaggagcggcggccgccggcccggggcgcgagtctggctgaaaggagcgggcgcgccgggaccacccggcgatgctgtcgccgccgccgccgcctctgtagcgagcacccgagcccgccgcggagaaaggtcagtgagtttcggtttgtttctctgctctgccggctccggatcgggggcggacagaggggtgcgcagggatgtctgcgcccctacggcggccgcgccgaagccgtggaagcgggaaagggcagctgccgcctgctgtaactggggagatcttctggaccgcggagggggtggcggggccgcagggtcccggggaggggagcgcggggtctggcggggcacgggggaggtggtcccgggagttgcgtgtctcctgagagctggcggagttgggcgggcggccgcggcggggagcggcgctgtcggctgctcggccgagtcctcggatgccccctggagctccggtccgagggagctttcctcgtgcccgcgccgcgcgcgcccctgggtgtgcacgtgcgcgcgcgcccgccccagttgcgcccccggcccgcacacaccccggctcatcttctcccggtccccttgtctcgcgccttctccagccctagaagttgccccagggcccctcccgggattagagagcgctgtgaagggccagatgttgggggtcttttgtgcagacacacgcgcctggggcgcttgctcct

SEQ ID NO: 19961 - DNA, 2300 bp, Homo sapien
tataattttgtataatgctttaatgtatcttaaataatttcccccaagtaattttaattatttgagtgtatgtgaaattggctggaatgggaattgtatctaggcattcttagaactcataacagtgctagaagtagacataatttatgtttgcaaaaaaggaagctgaagctgaggaggattaagttacttattaaaggccactcagatagcatgtgagggactgagactttaatccagagcagtcgtgggccagagagtgccttttcatgtttatcttaatattcagtttattgagaaaaaaatatgtttttatattgatatgttaacaagatttcatagctgatagttcttcattattcgttaatctgataatacagccaatatttaattgagtgtatggtacaatgctagatgctggcaagggtatccaatcttttggctaccctaagccacattggaaaaagaataattgtcctggggcacacataaaatacactatcaacagctgatgagctttaaagctcattcaaagctgtcctggaccacaggtggcctgtgggctgcagactggacaagcttgctgtataggctatacaaagaaataaaagattcagattctaccatcaagaagcttagaatttaataaagtaggtaagagatgtacacatataaccaaccaccttaccaggcataagtcactatatctacactcgactacaaaagaaaactttaagatatgtaaagtgtttgggataataaaaagactatcatattttaaatatgagagctgactttagggtgacgataacaggaaaaagtaagtcttggtgggagtttaacagtcagaatctagggagaggttgagaattaaagcaaactgaatgatgtaaacagaggcagatttgggaagatgtactgttcttctgggttaatagtagtatgtattgagccccactgttccaggactgccctgggtgctttatgtaagttatttagttaggcttaacactaccctaaatttggtggttatgattctcataatatagatggagggatttaggctcagaaaaattacctgttttccacaaggacacatgggttttaaatgacagaacccatattttctgacacttgaattctttctctttctatgccatgcttccttcaaaataaatagttcactttgtatagaatgtgggaggtttgttcgagggactgataagaaataatacaatatagattaggccgaagtaatcaaaggcttcaaatgctggactacagcatttacactttatttagtgaggagtttggtacgttaataaaaaccagagaaatagaaccaggctatatatatatataatatatatacatatttatatatatatatgtattatatatatattttttattatgctttaagttctagggtacatgtgcacaatgtgcaggtttgttacatatgtacacatgtgccatgtagtataagaaattggcttatgtgattgtggggcctagttaggcaagtcctaaattcacaggtcaggctgtcaggaaaggcagactgaactcgccagcaggagctgaagctgcactcaacaggtagaatttctcctttagggaacccttagttttgctcttaaaggttttcaacggattgaatgaggactacccagattatctaggataatctcctgtacttaaagtccctgacctttacaccatgcagactatcactagtgaattagattgatgaattctctgttttggcaggtgattgggaatagtgcatatgactgaatgaagtttctattgggtgggcaatagagagagaagcttagatagcttgtcacattggagcttgaatagataagacattgttccaaatgataattaagtcccataccttattatggattaaataggcttttgcgagttatccagagaactcaatcaacatttataaaatattcctaaaaggaaacatgttcagaattctgaacaagttacttgcaaacaaactttaaggccatagtcacttttaagttgagaattgcttaattgcagcaattccaggttatctaggtttttcctctctaatatgctcctcaaataatagatttttttccttgtcttaatgcagctctttgattaatcatctagtagtataaccattgaaagaaagtaataggttttctttactttataaaatctcttttaaaacctatcaattaccattggtttggaagtgtttcaatgttttgtttgatttttcagaaaccaagccatctcctgccttg

SEQ ID NO: 19962 - DNA, 2300 bp, Homo sapien
attggttccattttaatctctctggaaaatccaactaaaatacggatcagcaatcccttttgctaagaaatctctaacaggatacagtatttgccatttcaattctatttggggggatttttttccccatgttttacttttaatatatggcacagaaaactatttatcattaaaacattgggaactaatgtcctataaaaaaatagtttaaattcttggtactttttttttaaacttctagcaaaaataaaattttaaaaacccaaatccccattcaaatgaaaattttagtttattgagcctgggtatattgaaattaaagcctactcttaactgttggcatacttttacatgtaaaccaataacctgacctaaggttatgtaagaatcgtctattttaatttttccatggagctaacgggagatactttactgtggaatgtttactacacactgaatgtaatatgtcacttacctgtacactaagaaaggaaatctaaagcctggaaaagtggtcatttgtgtgtgaaaaaaataggagccataagaaatagcagtctaattgtattgactggaaattcctttaccttttcagatcataatcaaggaatgacataaaagataaacgttgatcttctaaacttaggatatgtactttatatgctaacatttcatcaaaaaaatcaaaactctctgaagcattcaacttttaaaatagttctaagttccaaaaccttgattctagcctgcatgaacgagtcagaaatgttgcaggagacagtggataaagaatcgtttgggacataagagaaatgatgttaattcctttgactccttattagcggaattgatttttttttttttttttttttttttttgagacggagtctcgttctgtcgcccaggctggagtgcagtggcgcgacctcggctcactgcaatcttcgcctccggggttcaagcgattctcctgcctcagcctcctgagtagctgggattgcaggcttgcgccaccacgcccaactaatttttgtgtttttagtagagaaggggtttcaccatgttggtcaggctggtctcgaactcccgacctcgtgatccgcccggctcggcctcccaaagtgctgggattacaggcgtgagccaccgcgcccggcgtggagctgattttataacaaccactcttggcttaagtttacttatctgtctactggtgagacagcattagatattctgaagggtccctgttgtgtaaatcgtgtattaaatcctaagcgtttattgagtacctaacaatttgttttccaactcgacgatgttcccagatccaggcaaatgccaacctcagcgttcccttttccgtttagtctctccagcccccgtccccacccacaggcaggaccacctccggggctgagaagtcgtgctgtcgctaggcctcccgagtgtgcaagcatgtggcagagaagggaaaagaaaggaagtcacattccgactacaggcctgggcacttgctatccatggggacaaaatgtcaccactggcagcaaatagcgagaaaaagtgcagcgcagtagggaaacagcgcgtccgcgggcgcgacaccacagtttgggcgccgacaccctccgcgcactggtccctgaactttacctggagcttatcccggtcaggcctgatctcgaaaacgagggctcctcagcgcgaaggcaggacccagctccattaaagctctcgggcagtggtcccctctacccactgaagcgatagccgggagggtattcctaagccaccactacaaccacccctcaattccggaacgcccccaatacctgcccggccgctgctgctatcgcgataattctcgggccagtctcccgtcagtccgctccacgccttccttctctgaccaatcatggaggagtcgtgggtggagttttgcttttgagcggagagcggggccttcaatctttgctatctggcgctgggaatgggcggagctgaagtgggctggggcggggctggggcggggctagatcggggagaggggcaggggcacgctccagttctcgcgagactggagaccaggaagacgcctgcagagccgggctgctggtgcagcagaggctgaggcatcaggtgcagctgcatccggatctcctgccttggagcgtactccttgtctctaagtcgggaggcaggacgtggtcaggccggggctgtggaggtgcgctgtgtcccctgaggcctagaggattcgggctgcggcccgtcggaaccagtcagggaggcgcccacac

SEQ ID NO: 19963 - DNA, 2300 bp, Homo sapien
tatatttaagattcaccttgatagaaaatgcactccctaagcttccaccacgtctacgtttggcaatttaagtctctggcactattcaaaagcatagtgattaaaaaaaaatcaattaggctgcagtttaaaaattctatatgaatacttgttaatatagaattaatatatggcctcatactaaaacatctccatacattagtaagggaatatttaagatacctcccaaaagggagacactgggaatcctacatacagtacactacatctttgacagtaagttttcaagccataagagatgcttacgaatatatggggtaaacgattactctatgctgctaaaaatcattccaaggtaaaaaggtcaattcctatctaatgcaaagagaaaagcctgcaaggtggtgggatggtgagacagactgctggtagaacctgtctgccttgctccttggatttcctgtaattttggacattacttaaattaaggcattgaaactgaattacatcaactttatctcaacagaacaaattttgtgcagcagaaaacccaattttggcggtgaaaaagtcgtcccaaagacaaagggtcttaagtacatctgacttttcggagacagcagcagtgtgtcctattctttctctcctggctcagactcaaagaactactgcaggcaattcaggtaacactatttcctggtagtgtgattcaggtaactggagaaaaaggaaaatgcttaaagcaataaactagtataaaagggaaccttctggagtcccgtaatagccagtgaactagaaactcttgatattttatagatactgacaccagtaggggagccaggagccaagtgcaacaccagccaagggttggaagcaggcagagagaacagtcattgcctgatcctcttgcttccaccgcaaaagagcgcccccaccccaatactctcgttccttaaaatgtccctatcgggacccacgcagaaataccccctctcccctacagtaactccgtacaatcccaaataccctgccggagtgtgacaggctgcgtccacttactgagctgtcccccgcccgacgctgtactcggttcccgacctccagcgcccccaacgccggctgctccagggacccctggcgcccccatccccggcggggttccactttgcctctcgaagttgcctggattggagaagtagtcgcgcagccgaggcagctcccggccactctctaacagctcggtatgcagctccagggcggtcagcaagtattgatcgcgcaacagctgagcagcgatcgcatcaattgataatcgggccggggtctccccggtgccccccagggccactgcagccgccgacgcctccccagggagccctggccgcgcactgcttcctaaggccacgggatcctgtggcgacagcgagcccgcagagccaggatctaggccacttccggcgcccagccgaagtactgcccgccgttcctctgttgcagctacctcgtcatcgtcctcatccgaatcactgagaaatggattcacgccgccaccactgccactacctccaggcgccatcgccgccatcttatcctgtcaggagtgtgggcgcctccctgactggttccgacgggccgcagcccgaatcctctaggcctcaggggacacagcgcacctccacagccccggcctgaccacgtcctgcctcccgacttagagacaaggagtacgctccaaggcaggagatccggatgcagctgcacctgatgcctcagcctctgctgcaccagcagcccggctctgcaggcgtcttcctggtctccagtctcgcgagaactggagcgtgcccctgcccctctccccgatctagccccgccccagccccgccccagcccacttcagctccgcccattcccagcgccagatagcaaagattgaaggccccgctctccgctcaaaagcaaaactccacccacgactcctccatgattggtcagagaaggaaggcgtggagcggactgacgggagactggcccgagaattatcgcgatagcagcagcggccgggcaggtattgggggcgttccggaattgaggggtggttgtagtggtggcttaggaataccctcccggctatcgcttcagtgggtagaggggaccactgcccgagagctttaatggagctgggtcctgccttcgcgctgaggagccctcgttttcgagatcaggcctgaccgggataagctccaggtaaagttcagggaccagtgcgcggagggtgtcggcgcccaaactgtggt

SEQ ID NO: 19964 - DNA, 2300 bp, Homo sapien
gtattggtaaattctaatgacatttggcaatatatatgtagatgtgcataaaaatataaattcttgccgtctgacatgggtttttctggctttctgtgccttaatcattcagtgttttactcttggtcacctaaactttcaccaattgcattttgagttttttcccagtttgtgttttaaccagtttttttttctttttttcttttttttttttttttcatatttctatcattctggcgtagggcacttctgatctgcaattgttctgtaatgtcttagaaaattttaagtgatatcaaaagcatgatatatatatttatttaagatacagttagatatttttaaatcaaaatcaattgcctagagttttaaaatgtaaaaaaaaaaaaaaagtaaaccaacatgctgtgtaaacctattctgtacttaccttacacactgaatgtgtccagtcttacttcaatgcaactctaagagtttccggaagtgtaaatgttaaggaaaatgtttaactttgttgcacagaagtatttgcagatcagcattgctgactaccaaaaaacataaagtaacatacgatgtcatctgatttttagtggtgcttccatgttgctgcagttaaattctgtgcatcaaaataattggcctttgtgtactagatgtgattcaattacatcttgtttttattgaaaatgtgcaaactgagtgaatcctaatttttccatatatttttatagctgtggctctgataacatctcatttggcatcttttttatgtgtattagtcagttaggaaaaaattgcatctttaagatgaaaccttcagttccagtttttatgcagaatgatttaactactgtaatttcttaatattcatttgtggcaaagatcacttaattttcccagagctttacttctcagaaatatattttttctcaagtctaacattttaaagagcttattaaaatgtttcctcaatattcatatttatgtcataatcacactctgtgataataggagaaatcctgagtttcactagtacctcttaacatgaacaaatctattagaagagttatcagaaactttgaaattctacttaatcctactcagtatccttagaaaactatacttttagaaatgtacacattcatttgctatagaattatcttaattaggaattaaaagtgaaactgtttctatcctgtggctctaaatgaaaaataaaacccttggggttttggattttttttttttttttttgatatgtgtttgatgtatctgtgtttgtttttagaaaacatactcttgtttgtagaaaaatgtataggcatcacgacatttgttaaatattgaaaccatattccttcaacatcctaatgaagggaactattcactaacgtctctatacgttgatttataacattattctagataatgcattttaagttaacttttgtaaaaaaaaaatcctaagtttttctttttaagaatatttgcttgggcttcatctaatttttaccttatcccctgaaattatgtcacctgcacacatccattacatttcttacctagactgaataaagcagaagtacccagattattaatatttttatttatctaaatgagagtatgccatagattttatttttaaatagagctattccttgtcagacagctagaacatttgataataaccccctgaattctactaaaactatggaaaacattcaccagtttgcttgcaaatcaactctgctgcatgcgttcacaagtttcataaagattgcatgctttctgttttcaatacaaattgtatttttttttcatacccatccttgctttttattttttaatttttgtttcccttttcttggttggatgcctgtgtgtgtttattccaaatccctgtccagtcctggagtttgaactacggaaagccaaggagaccattcaggccctccgagccaacctgacaaaggccgcaggtggtgtacataaaacttttttgagacttttcaactttgacaatgtagaagtagctgagatattttaaaatgtaaaatagtaaaatagtacttatgtttttttccaccagaacatgaagttcctttacaggaacgaaaaaattacaaatcaagtcctgaaattcaggtgggtgacagaagacaaatgtaaaattaatcttccacattaaatggtaacataaatattgaaggaggaatacttatgatttcctgtttgcctcttattttgcttccaggagccaatcaaacctcttgaaaagagagctctaaacttct

SEQ ID NO: 19965 - DNA, 2300 bp, Homo sapien
ggttttataaaatctcctattatccttttttcatttacaattttaaatccttgttcaatctgccctaaagaaaaaggcttctgcagtgactttatgttatgtatttcctctttttctttcccactgaaggtcagttttagaattagcctgtctaagtcaggcatggtgccacgtgtctatagtcccacctactcagaagctgaggtgggaggatcacttgaggccaggagttcaacaccagcctgagcaacacagcaagataagtccctacaaaagatgtttaaaaattagctaggcatggtggcacgtatctgtagtccatcaactcgggaggccaaggcaggaagatcacttgagtccaagtgtttgaggctgtggtgcactatgattgcacctgtgaatagtcattgcattccagcccaagcaacagagcaagaccccatctcttaataaaaaagaaagaatgatatccatctgggttattattaaatcatctcctggtccttcatctcctactgcttttaaccatctgtctacatctgaggggttaactgttaagtgaattaattaatacatatgtggtaccccaggacaatatgtgtgtagtgaaatctgaattctatagtaaagttctgtctgtcttcctgagaattaggaagatccttaattagaggctttaacttccttgagactacagtttaaatgaacttctatagatttcttctagtcaagcaattttaaggggatattatgcagtgtgattgttgcatttctgagaaaaaccttgtaaaaaggtcagagactcaggagaagatgaaataaaggaaccatatatgaatagataaagtgaaagaatgataagtttctgaatgtttgggcagaaatgaactagtgagtctttgagagagacttagagtcactattttgttgaggcctcagcgtgccaattaatgaagctttcaactgaatgtttggagtttttgtttcctaatttgttctagagctcctcataaatatactgttattaattttgacaagtcaaaaggtcccctaaaaatgatcattgttattctgagtttttgtggggttttactaagctaagcatgaaagttgtgattattgccccagcttatttaggatgcaggagtttttccagtagaagattatgactttatatacacaaactcagtgcaaacaagaaaggggtcactacagttggtcagcagttgatgcttatgggtggcgttttgtgatcctcaaccaagcagagactagaaaggggttgtgtgattggtcttgtgattaacaatttaacaatcactgaccctgaagccatttcttcaaagagccctggttttagtgggaaatggtacccagaaaacacaatcttaggctctagaggtgctcattgctactgaattggtttttgtttcttggaccattgcttttatttagcagtaggttgaaattttatgttactctttgagggtattaaactcattgaataacttgaaaactcagccgccagtgctgtttgacattggtctttgctaagaatttgagaaactaaagctgataatagtattctgaaggagtgaaataataggttgttgaaaaagaatatactcttttgatttcatagcaatggtaatattttatttttatggagaaacttaactgcaagtataaataatacaagaggtatgttgtttataattatttgggcttcatttttcaaactgggaaactgaattacagtgaggccaaataatctatatacatcctcataattaggtaatagtgacagtactaaaatttgtttcccccaaatgccagatcactttttattttgaaaaactactttcttccctagttaagaaaaagcaagtataagatatgggtaatcttttgaagtcattcagaattaaaatgaaatttcataaattaaagtgataaattattgttaaagtgtgtcagggttttgtatgcatgttttgggtaaaaatttaacccttttttttctgttttcagttgttataccacatttgcataagttagccttggtgaacaacttacagattgtggattctaaaagactggacattgctacgcatctttttgaagcctacagtgcactttcctgttgttgtatccttgttttattaaggtgtatctacatttatgtaaccaatcttagagtggaacttggttggtaaagattgaaaagtagaacttcttttcttcaacttacattaagcgttgtagaaaattgaagatttgatttgtctcactccactcct

SEQ ID NO: 19966 - DNA, 2300 bp, Homo sapien
ataatgtactttactgacaacagcaaaatacatagctttttcaagtgcacatggaattttgaccaagatatgccatgtgctgggctaaaagtaaggcaagtgaatagttctggcaatccaggaattcaaaacaggttatattctattggcatgggacaagtatcttcatataaacagttaccttatgatatggtttggctctgtccccaccccaaatctcatcttcaattcccacgtgttgtggcagggacctggtgggaggtaattgaatcatggctgcaggtctttcccgtgctgttcttgtgaagtgagtaagtctcatgagatctgatggttttaaaaatgggagtttccttgcacaagctctctctttgcctgctgccatccaggaaagatgtgacttgctcctccttgcctttcaccatgattgtgagacctccccagccacatggaactgtaagtccgttaaacctctttcttttgtaaattgccctgtctttatcagcagcatgaaaacggactaatacatgatacaaaggagggattatacgtatggatccaacatcgacctagaatgtgaggaaagacacaatcctaagcaagtaatgacaaacaaaaacaacaggatgctattgagatggagcaggaacccatcttaggagcctgtggagcacccctaagcatggaaataaaggaaaatcttgagttccttcaagggaaattccaggtacctagctagccctaagaagtaaataagtaacttgataagcaagaaggtaattatagcttaaaacaataaccaaggaagttagattccctatagaaacgaaagataacatcttaacatatgtccctgaattgtttctcagaaacccagacccccaacaaaacagatccactggcatgcagacctcagacaagggggaaatgaggacggaactgaccaccattctttcttctaaatttcttcctgaagggcaaggaggaagtcacacccacgagccagagctaacattcatttttgctgaccccaaatttttaacaaagcttctcttccttcactgatggcaagtcagaaaatctttgaatgtataacctataagcaccctcactttaaagattttcaagatatcccagcttgttagaccaaaccaatgtgcaacctccgtgtattatgattttgcctgtaacttctgctttcttgaaattaaccctgcgtttaaaaatccttacttgcaagccaactgaaggtcaggatttaagcaagagctgccccattctccttgcctggagctctgcagataagcgccctcttttctcccagtgcaaaccttagtgcggatggcttggccttactgcaccagaagaacggacctcagtttttaggtaacactgtgccccagacatctggccactttatgtctgaaagggccaatgtggtgatgggggctgggggacgcctcaaggctggcggagcctggtgcctttctagaatttggtgggtgcaggacgggtgaggggcggaggcagaggatcaggagaagaaaaagagatagtggctgctggccccaacattttgaagcaaagaacaagaggagtattttacgaagattggcggatggtgtattgtgttgatgccttaactgcagtcgacgaaatctccaggaaggatcctcctcccgttcattctcgacggtggcgcatccactttcggaaggccgggcctcgaagggtgggcgcgcggggcaggagcaggaccaccccgatgcccccattccttcccgggaggcggggcccacaggcctggggtgcggcaaggcaggagccagtgccgtgaagggcaacccagggctggtctcccgccaacctgtctgcagcccgagcacctgggccaggggcggagaccggaccaaggaggcaccgggcgcggcgaacacccccggggcccctccccgagcggggccccgcgtcccaccgcaaaccaggggagcttgggcaccacctggctggcaccgccgggcccggccggaggggggcgcaggagggcggcgcgggggcaggtgcggggcggggcacgggggcgggaccacacagggccgcggcagccgcgcccgctgggccacagaggccgctgaggccgcggcgcccgccagcctgtcccgcgccatggccccgcgcgcccggcggcgccgcccgctgttcgcgctgctgctgctctgcgcgctgctcgcccggctgcaggtaaggagcgcccgcgcctgccgggccgcgcggcccgacgcctcctcgggagccccggg

SEQ ID NO: 19967 - DNA, 2300 bp, Homo sapien
agatcccagggtagttgagggtgacagcaaaaaagggcaatgacgtataagtcctcataataaagttttcttggctgtaaattacatctaaagactgtaaagaactagcaaattacaagaaagagtgacttttatatattttgccaacctcaaatgtgctgaaaacagttctccctctcaccctttcatccccgaaactgattcaggcttcagttcacccttttactgaactgtgaatgagcctcttaggacataaacttgtgaggtgaacagagttcagcatatgctctcccaacagatgttccagcaccaccgcaaagagttacaatgtgattcttatctttctgcatactcctactacatagctgtagtaggacttctaaatttaaagtcttaagattttttttaacccaccttttaattaaccctcaaaagatccagctgagttttaaaaatttggactatgttgctaaaaaaaaaaaaaaaaaaaaaaaaaagtaacagtgcgagtgtaaacatcttggaagcctaaatctgaaaaacgtaacaaaactttttttttttaagtttaaagcctgtcaagttggtagcttattaaattcctccagtcacatgaaattcacagcagaacaaggattcaaaatgggttaggcaccgaaatgtcatttagcaaatcaatgattcccaaaagatagaggtttaggggcggggaagggagaggcttttcctaaactatccaggaaataattttcacagagcgttacagactaggagcgtccccagcagcgctcaccctcggccggccgggtcccgctgcgcacctcccggccgcgcgtccccacctgcgcacggtgcctccagcctgggcgtgggcgcggcccgggatcgcggcgccggggccgcaaaccggggccgcaaaccagcgccgccacccgcgtccggacccagtcccctgtgagcgacacctggcaaagtttcacaaggtgggagacagcccaccgccggctttcaggaagtgcactgggcggtgaggactcgaacgagctcgtcccggggctggcgcactcacttcggagaaacccctgctcccgggacgcgttcactccggccgcgcaggcagcccgggcaccactggcggaggcggggcggcagctggcaagcagaggagaatcaggagtccaaagccgggccagggccctcaggaaaggtgagagcggccgcgtccctccgctcacgtgggcctcgcacgctcctcaccgctcccgggctaccctcacgccgccccacggccccagcccgcgtcctcctcctgccgagcaccagcctttaggaccgcacggaagccgccgagagggaggcggccggccagcagttgggcgtggcttcctggagaaaggcggccccccagggggcggggagagcgacgtcaccgtcgattcgcggtgctgattggcggaggtgaggtgcgcggagcccgcaagcttctccgcccggcccggctgctccacctcctcacccagccgctccgtcctcaccggctcgcgagggaacagctcaggcaccgccgccccggctcagcgcggacggcggagagagggaggcggaaggaggacaccctcgctcgcttgctcccacccgcacccgggctcccagaaccggcgaggagcccagggggaggagccgtcgcgggcacgccccgcccccagcccgggaagacgacgccagcgaccccgccggccggccaccgcccccctcgccggccgagacccgcccccggccccggccctcccccggcggcatggaggggccccgctcctgacggccgcgccgccgcctcggcccgtgctccacctcgcggcccctcccgcccgcccccgctcgcatgtctgcgccgccctagccgaggatgctgaggatgaagctgccgctgaagccaacgcaccccgcggagccgccgcccgaggcggaggagcccgaggcggacgcgcggccgggcgcgaaggcgccttcgcgccgccgccgcgactgccgccccccgccgccgccgccgccgcccgcgggcccgtcgcggggccctctgccgccgccgccgccgccccggggactcgggccgcctgttgctggtggagcggcggcgggggcgggtatgccgggcggcggcggggggccctcggcggcgctgcgcgagcaggagcgggtatacgagtggttcgggctggtgctgggctcggcgcagcgcctggagttcatgtgcgggctgctggacctgtgcaacccgctggagctgcgcttccttggct

SEQ ID NO: 19968 - DNA, 2300 bp, Homo sapien
gggattcatctaaatcctattatgtatcagaattgcattcctttttaaggctgaatcataggtaattggatgtgtacaccatattttgtttatctgttcatccattgatgggttttgagtttacaccttgtggctattgtgaataactgctatgaacactgatgtacagattatgtttgcatttctgctttcagttcttttgggtgtatcttagaagtggaattgctgggtcataaaataattctgtgtttaatattttgaggaactgcctgactgtcttcaacagtagctatactatttttgtttccaccatcaatgtgtaagggttccattttcttcatgtccttgccaacactgtcttttttaataatagtcatcctaatgggtataaagtggtatcttcttatgcatctcactaatgaaaacatttttttcatattttgcattagtttacatttgaaagtattgctttaaatttgtgaactatatatgagcaatgtagagaaatatttcgctttaagcaatggttgactggccaggtacaatgactcacacctgtaattccagcactttgggatgccgagttgagaggatcacttgaagccgggaatttgaggctgcagtgagctatgatcatgccggtgtacttcagtctgggcaacagagagagaccctgtctcaaaaaaaaaaaaaaaaagaaagaattggttaacctattcacccaagcttcttccagttaacacaactatttgagaggattatatagcactttattttctttgttttttaaagtatttacagcaatattaaaatttttgagaagcagaatctctcgtgggtaaatgtggttttacattttttaataaaatatatggtctgggttaggatatgtatggttttgttattaaaataattcatatctgcatttttaaaaaaccagtcgcattgaaaattggtaaaggctatcaggccaagtgtttcagaagttggatgttgactgaagaggtctgtactctccttattaaatggttttaggtagacagtctttgtttccttgggtttctaaataaaggaagacagactagaaggcagaagtttagctcccaaaagtatataatgtgctctgttctcataaacagagcaattcatacttactgtcgggtcgggatgtgtgattagacagcagaacaaaatatttttaaattgagatttgtggggagcttagggtcttctatttgcctaattttttacagaaaaaaatattaatgtatgtttactgcagatttgtaaaatcataattgattcttaaaaccaagttgattttgatatgagtagtgttttgagattctgcacataaagggaggggataaggtgcaagctgtaataaaaaactgtcataaggctatttatttacttacttaatatgatgttgtaacagtttgtatgtgacagtgcttgatttctggcgagctgtttgtaagtttggcatcacctttattactccaagcatcggatctaggagtcaaagttaccccggttcactagtgattggctgagcaaactcagttaggtttagagcacccagttgctgttagatgactgaaccttaatggtaaactccctgcctgtacatattcttgtttagaaatccttggcatgtattgatgatacctttcataagactttttcctaataaagcatctttttagactgttattaaaaccaaacaatgaataaaaatggtgtagtgattcttgtaaaaagtacacatgccgttccctatggaggattagtgtaaagggcaccatttgttatgtgttcctttgatttggattcagaattgacatcattggcaactctgtatattattaagcaatttcctgtgtcccaagaaagctaggacagtcaataattaatagagtgctcatcttctgcttgcggctctcacactgtgcctttgtgcccatagtgtgcagtcacctattggacctctaaaaattgccactaaaatggttgttagtaaaatgagaagacctaaatctgtgattattactcttagtccatggtttaagttaacgtatctccctctttctcatctagaacaactctgctcatggtgattacatgcaaaataacgagagcagcttaatagagcaagctccaatacctcaggacggacttaccgtggcacctcacagagctcagcgagaaggtatgctctcttttttgtaaacttaaagcattaatacatcaaaagattacagggtgctctttacgctgattaactctaaactttttac

SEQ ID NO: 19969 - DNA, 2300 bp, Homo sapien
gaaattgagagcagacactgagagattaacaatttgacagtgccacgttattttattgtattttacaaaagtaacgatccacagcaaactgaagatttaaaaaaatgaaaactgaatctttaccacaccacagatgtttaagaagcacctttctactttatttcctcattttgcacatgagcacactggggctgacagatatgaaatgacttgtccaggtcagtcgctcttcagggaacagctggcctcttgaacacggttcccactcacagtctagtgctttgggctgtgtcatcttgccttctcactagtagccatgttttcttcaccactcaccctccattcattttccttaggtaaaaaaacaattattatatttgttttctttattttaattttcctaaaaagttaatagtattgaatgcttcctgcagataacttacaatcctctctgaagacttctaagatattagaacacttaaaagaagacagctctgaagcttcaagtcaagaagaaggtaaaggtagattcactagagtaaatcattctgcctgctgatagcacatggatagaacatttaaggagtgaagaaactgacatataggaattggaatgtgacagaggttgcattacaaataagtggagaaggaatagaccattcaataaatggtgtgtggagaaagaataaattgttcaataaatggtgtgtggacaaagaatagaccgttcaataaatggtgttggcacaattgattttccatatgaaaaaataggtataattagattcccagttacatcatgcagaagacattcaagtgaataacaacttatatgtaaaatgtaaaacttaaacttttcaatgttaatttgggaggagaagcctttcttgaataaagtagagcatgaccacggtagagatcttaataaattagagcttctctgtgacaaaaggaaccatatagccaggagaccatccatagattgagagatggtgtttgcaagatatttacagataagactatatccagactatggaaggatcttcctaaaaagtcaatgagacaatcatcccaacagaaatataggtgaaagacataaataggtgattctgagatgaggaaacctgaacagctattacataatgtgcagcctcactggtagtcaggaaaatgcaaatggaaacaggtgtcatctcacactcagcagattgacaaaacattttggagtctgacatcaaggatatgaagcagtgggaactctcaggcactgctgatggggatataaattgacagaactattttggacgaaatttggtgctgtgtagtgaagttggagataattatatgctgctgtccagcaatcctgcatctatgagaattgttacacacctgcaaaaggggacatgggcccgggtccttgaggcagcattgtttgcaagggcaaataccaggaaattgcctgaacatttcaaatgttagtaatgttataaataaataatgtctttgtactaggtagcaattaaaataaaggatatttatagtacaattggctctccatctctgcattggtgggtttaaccaactgtgagctgaaagtatttgggggaaaaaattctttttcttgtcattctctaaacaatacagcataacaactatttgcatagcatttacattgtactaggtattataagtaatctagagatgatttaaaatatacaggaggatgtgcatagattacatgcaaatactgaaggacagttgtatattgaaacatgtaacagctaatgtgtttatgagcacacatatatggatagttaaaacttgcactagaatgtttcaacaagtaagctactagttagcctctagagggatgagggggagtggaatggagggaagaccttcagtcattcctgtgatattctgtttcttaaaagaggcaaatatggagcagtctggagggtggtgtacatggatgtttgttatattaatagatacaggtttgaatgtttgaaactcttcattttttaatggttaaaaagttctatctgaaattggatgttttagttttgtagggacatgctcatatagactttcatagttttgaacaagattgatttgctgttaggtggaagacatttgagagaacataaaaggtaattcagagtttactgtgtttttgaaaaattgcttaagatgtcttctatgttgagaaatgcttagaagtgcttcataccatctgtcaccagtggttatgatcatacaaactagtagcatcctactgttggtttttgctgcagcat

SEQ ID NO: 19970 - DNA, 2300 bp, Homo sapien
cactgcagatttggccctgtccgaagtgttagtgtacatctgtacacttgggtaatgacagcatccctcttctgccatcagatggcacaagttggaggcctgtgtggaggaacttggcttttttcaaataggctgttattaaatatgaaagaatggcttagggctgtcttcacccaaggaaaatatccattatggtagagagttttgatcatttttagaattctgagtggatgaaaagtctcctttgaaaagggcgtgggtggctttgctgttgctctcctgggtagtgatggtatttctgtttggggctttacacttaccgaaatcagtgcacaaaagggtgagacatgtctcagcatgtctagaggagtctcaggatgcttagaaaaccaactgggagcattaaaaatcatgaggccatttgctatttcacatagaaatttaacgcacttcttccaaaatgtttctgcttctttcagacttaacatttttatctttgactgtgcactggtgtgatgatacagataaaatgccttcaataagtttggattttgggatagtttttattttgcaaagtttagcaagaaataccccaattattaatctattaggggaagtttatgctagaaccattcactctttgagtttcttctaatataaattaaaatcattgaattagtaatactgttgatgttctgtgtcagtaagtagctttcatttaatctttcttcaggaagacgaattcgtttttagtgttctgtttgaaaactttttaatatctgaagctgaatataaacagttcataccttaatgaatacaaatattttaagtacctagtacaattcagcttatccatacaagcagaaagatttttaaataggcactacattttaatggaatggtctgtgtatacatcaacacagtgtctgggtctatgatgtttaaacattgtgaatcagattttatccttgtcccctttataccaaaagtcaggacatcccctgaaggctaggtccacgctatttctgtacacaagcgtaagactgatgcaggagtagtagccgatgcagtgttgtttgtatttgctgttttgctgttttgattttggagaaattgccacactctcctattcctgtttcttgtgttctagcgtgtttgttttatgattaataatagctttaaattttcttccccccattgaaatatttagtattaagaatattgattccattctaaaaaaaacaacaacaacaacaaaagaaaactcttctgttccctgcctctagatatttgagttaaatattgtcttgactgagctctttgaaattgtatcatttatctgcgacaaattgaagaacttgggttggcagtgcagaatagaaaccaagtggattgcctgaagtttattaaggttaagagtgtctgatgctcttctcagtacaaagatggtgttacataaatctctttgttttatactatgtttcattcagactccaactagccttttatgttttgttttctgtttatatccccgtattttaaaaataaagcgttgatctaatatcgacccatagaaagccgaaagttaaagggaggtcagcttggacagtcaggaaacatagagggacactttccaaacttgagttactttgaggtatactcaatgtttatttctagcaagaaagatgggagttatgcccgtgttaatatctctttatgtttgttttctttagacacagacagcaattctgaggattctgggaatccatcaacaactaggtttacaggttacggttctgtcaaccagactgtcactgtcaagccacctgttcaaattgcttcactaggaaatgagaatggaaaccttttagaagatcccttaaactcacccaagtatcagcatatttcttttatgccaacgttacactgtgtcatgcacaatggtgcccagaagtctgaagttgtcgttcctgcacccaaacccgctgatggcaaaaccatagggatgcttgttcctagtcctgttgctatttctgcaataagggagtctgcaaattcaacccctgttggaatactagggccaacagcttgcactggagaatcggaaaagcaccttgagttactggcttcccctttacctattccatcaaccttccttccacacagtagtactcccgctttgcatcttacagttcagaggctaaagttgccaccaccacagggatcttctgagagctgcacagttaacatcccacaacaaccacccggaagcctgagcatcgcatcaccaaacactgcct

SEQ ID NO: 19971 - DNA, 2300 bp, Homo sapien
ctttagattgtgttagtcttttcttttttttttgtgagacatgctttagctcttgctgcccaggctggagtgcaatggtgcaatctcgactcactggaacctccacctcccgggttcaagtgattctcctgcctcagcctctcaagtagctgggattacaggcgtctaccaccacgcccagccaattttttttttttggtacttttagtagagaaggggtttcactgtgttggccaggctggtctcgaactcctgacctcaggtgatccacccgccttggcctcccaaagtgctgagattacaggcgttagccactgcgcccggccttctgttactcttttacttgtttatttccccacacactgctcctaaatataccgtttctttttgtttttcttgagctttataagggtatccttttgtgcctagctttctgtgcctggctctgttcatctgattttatggtcttgatgttgtgttcttatatttattcattttccctaccttatgatagtctcattgtggggaagaatatagataatttctccattctgtcaatggacatctgggtggttttaattttttttctgttacaaacaagtctgctgggaacattgttgtccctggttcgtgtgtacacgagtcctctagggcggcaagctgggagtgcagcggctgggttgtaggacatgcaagtattcagtttgccaagatttgcagtattgttttccaagtgatttacactcacaccagcaatgtagtagagaatcctgaatgggtatctagacccccctcccgagatggtgtcacagtgctgtggaaggccaggtggacccctcccgagacggtgtcacagtgctgtggaaggccaggtggacccctcccgagacggtgtcacagcgctgtggaaggccaggtggacccctcccgagacggtgtcacagtgctgtggaaggccaggtggacccctcccgagacggtgtcacagcgctgtggaaggccaggtggacccctcccgagatggtgtcacagcgctgtggaaggccaggtggacccctcccgagacggtgtcacagtgctgtggaaggccaggtggacccctcccgagacggtgtcacagcgctgtggaaggccaggtggacccctcccgagatggtgtcacagcgctgtggaaggccaggtggacccctcccgagacggtgtcacagtgctgtggaaggcgaggtggacccctcccgagatggtgtcacagtgctgtggaaggcgaggtggacccctcccgagatggtgtcacagtgctgtggaaggcgaggtggacccctcccgagacggtgtcacagcgctgtggaaggccaggtggacccctcccgagacggtgtcacagtgctgtggaaggccaggtggacccctcccgagacggtgtcacagcgctgtggaaggccaggtggacccctcccgagatggtgtcacagcgctgtggaaggccaggtggacccctcccgagacggtgtcacagcgctgtggaaggccaggtggacccctcccgagacggtgtcacagtgctgtggaaggccaggtggacccctcccgagacggtgtcacagcgctgtggaaggccaggtggacccctcccgagatggtgtcacagcgctgtggaaggccaggtggacccctcccgagacggtgtcacagtgctgtggaaggcgaggtggacccctcccgagatggtgtcacagtgctgtggaaggcgaggtggacccctcctgagatggtgtcacagtgctgtggaaggcgaggtggacccctcccgagatggtgtcacagcgctgtggaaggccaggtggacccctcccgagatggtgtcacagcgctgtggaaggccaggtggacccctcccgagatggtgtcacagcgctgtggaaggccaggtggacccctcccgagatggtgtcacagtgctgtggaaggcgaggtggacccctcccgagatggtgtcacagcgctgtggaaggccaggtggacccctcccgagatggtgtcacagcgctgtggaaggccaggtggacccctcccgagatggtgtcacagcgctgtggaaggcgaggtggacccctcccgagatggtgtcacagtgctgtggaaggccaggtggacccctcccgagatggtgtcacagtgctgtggaaggccaggtgggggaatgcatgtgcagcctaggtctttgcatctagaaagagccccagagtggagagtcaccttggggaaggggacgcaggctgggcaggaacaaaaacagcagt

SEQ ID NO: 19972 - DNA, 2300 bp, Homo sapien
cccttctgtacttctgctgcattttttgaatgttattctttctaacctgtaaactctatgaaggcagggacagtgtgtgatttattcaactgctataacacggtgactggtacataataaatgtttgtaattatctgttaaattaattgacttgaaaatgttatcactcttgggagaacttgcaatctccctaatttttcatatgttgctgttgattgaatttaaataaaatacatattattaatagattcatgaggctaaggggtgaaactttaaatgaaaatacagaaaatcatcaggaatgtaaaaaatcattgagaaatatttatttttatctccacagcttcttcattcttgttcaatgaaactgtgataacctaagcggtaagttccagttggtctctctctccaacccccttcactcttcatctgcaagtttagtcactttattgaggttaaaacaggtcatagatagtatgtggtttaaaactgtttaaaagtttcacatgtgaaaatccggatttagggcctggcgcggtggctcacgactgtaatctcggcactttgggaggctgaggcgggcagatcgcttgagacctgccggggcagcatgaagggacttcccacccccactaaaacaatacaaaaaatgagccgggcttggtggcaagccctgtagtcccagctactcggaggatgaggtgggaaaatcacctgggcccgagaggcggaggttgcagtgagcccagatcgcgctaccgcactccagcctggacgacagacccactctgtggccaaaaaaaaaaaaaaaaaaaagaaaaaaagaaaaaagaaagaaaaaaagaaaagaaaaatcccgaattacaaagcaattgggggaatggtaattcaattaaaaaggtgtacaacattcttttaaatagtaaactgcccaatgattacaacattgattcaactgacgaaaaatacaacttttcagaccacgactaaacattgtggcagtagaaactattttttttttccctgaatgatgaaagaaaaaaaccagagaagacgttaagacagaacacgtggaaaaagcccatctcatactccattctaatgtttcttctacttaccagtgctttctgtgtcattaaactacttcagacttcaagagcaatgggaaacaatgaaacctcagtcctttgctattttccttttcaggtacaggagagggagaggacagacttagggttgtgccttcgaacaagcacattcaacgacagcctcagttagaattcccagacgctgcctgtcttcctgggtcttgaaaaagtggggaaaaagtgaggttggcccactcagactgccagtgatgctgtggtgtgacgggtgtgtatctctatctcatacaatgggcgcaggtgaggaccaggacctgcgaccttcgtacgtttacagtccctgaaagccctcacctttaattagtagggaaaataaaagtcatctggcaagctggagtgcgggtaaaatacaagttaatgaacatgagcattcgtgttcattaagaactctggcacagagttcaacggcagagggcacaatactcactggccacggccagctgctggcggccaggagaagcagaaccaaaggaccgctgggacttgtagtccaccatgtttccctcgggattgccgatccccttacgagaaccacaactcccaaggtttaccgcgcgcgtcggtcttcactgccctctccgaggccggctcaggaacctcccgggaaactgccccccaccccgccctcgtacgcacgcgtcacgtttgtttaccctgaagctccgcctccggccatcccctggctctccccactcctccctggaatgccgtcatgccggcgatgaatatttatgaggcacacgcggccctcccgccctgccagcctcccgccttcccgctcccggcgcatgattaatattcaatgagcccagatccgcggctggttcgccgggttgaggcgggggtagcgggcggggccggcgctggggagcccgcgacccgggcggggagggcgtgtgtcgggggggcggtggcggcgaggcgggcgcgcgggatggaacactgagacaccgacggaatgctccgaatcgccacataatcccctggaacggccgcgcacaacgccattggcttctcccttctccgcgcgccgccgccgtctcccacctccgcctcatcgcctccctctccgcccgctgcctccggagctgggggggaaacgcgaagccccactgcaatggagcccgccgccgc

SEQ ID NO: 19973 - DNA, 2300 bp, Homo sapien
gtagtccaccatgtttccctcgggattgccgatccccttacgagaaccacaactcccaaggtttaccgcgcgcgtcggtcttcactgccctctccgaggccggctcaggaacctcccgggaaactgccccccaccccgccctcgtacgcacgcgtcacgtttgtttaccctgaagctccgcctccggccatcccctggctctccccactcctccctggaatgccgtcatgccggcgatgaatatttatgaggcacacgcggccctcccgccctgccagcctcccgccttcccgctcccggcgcatgattaatattcaatgagcccagatccgcggctggttcgccgggttgaggcgggggtagcgggcggggccggcgctggggagcccgcgacccgggcggggagggcgtgtgtcgggggggcggtggcggcgaggcgggcgcgcgggatggaacactgagacaccgacggaatgctccgaatcgccacataatcccctggaacggccgcgcacaacgccattggcttctcccttctccgcgcgccgccgccgtctcccacctccgcctcatcgcctccctctccgcccgctgcctccggagctgggggggaaacgcgaagccccactgcaatggagcccgccgccgcggccacggtacagcgactccccgagctcggcagggaggaccgagcttcggctccggcggccgccgctgcggcagcagcagcagcagcggcggccgcggcggctctggcggcggcggccgggggcggccggagtccggagcccgcgctgaccccggcggccccgagcggcgggaacggcagcggcagcggggcgcgggaagaggccccaggcgaggcgccgccggggccgctgccgggcagagcggggggtgccgggcgcaggaggcggcgcggggcgccccagcccattgccggcggggctgcccccgtacccggggccggcggcggcgccaactccctcctgctgaggagagggcggctgaagaggaatctgtccgcggccgccgcggccgcctcctcgtcgtcgtcgtcctcggccgctgctgcctcgcactcccccggcgctgccggcctccccgcctcctgctcggcctcggcgtcgctgtgcacccggagcctggacaggaagacgctgcttctgaagcaccggcagacgctgcagctgcagccgtcggaccgggactgggtgaggcaccagctccagcgcggctgcgtgcacgtcttcgaccgccacatggcctcgacctacctgcgcccggtgctctgcacactggacaccacggccggcgaggtggccgcccgcctgctgcagctgggccacaaaggcggcggcgtggtgaaggtgctgggccaggggcccggagccgccgccgcccgggagcccgctgaaccgccccccgaggccggcccccggctggcgcccccggagccgcgggactcggaggtaccgcccgcgaggagcgcgccgggtgccttcggggggcctccgcgcgcgccccccgccgacctacccctgcccgtcggcggcccgggcgggtggtcgcgccgcgccagcccagcgccctcggactccagccccggcgagccgttcgttgggggccctgtctcttcgccccgcgccccacggcctgtggtctccgacaccgagagcttcagtctgagtcccagcgccgagagcgtgtctgaccggttggacccctacagcagcggcggcggctcctcgtcgtcgtcggaagagctcgaggccgacgcagcctcggccccgacgggggtcccgggccagccccgccgtcccggccaccccgcgcagcccctcccgcttccccagacggcttcctcgcctcagccgcagcagaaagccccgagggccattgacagcccgggcggggccgtccgcgaggggtcgtgcgaggagaaggcagcggcagccgtggccccgggaggcctccagtctacccccgggaggagcggggtgaccgcggagaaggcgcctccgccgcccccgccgcccaccctgtacgtgcagctccacggagagaccacccggcgcttggaggcggaggagaagccattgcagatccaaaatgactacctcttccaactgggatttggggagctgtggagggtgcaggaggaaggcatggactcggagattggctgcctcatccgcttctatgcaggtaaggaagtcacctgccttgacgggtggttgcaaaagctgccgaggaccgaggagtgattcaaattgcttgtcagtttgcccaacccaaga

SEQ ID NO: 19974 - DNA, 2300 bp, Homo sapien
ctctaccctcccacctgggataagatgattttttttttccaccaaattaattatgttaaatatgtgtgattttaatttatagtcaaactgtcttctgcattttaagctccagttttaatgctgcatgttcattagaaacatagcctcatgaagataactttgatttattgtattttcttaaaaagggcctatattcaccagattttcattagcttggaatacatatgagaaatttttagctgtgagtcttgctgattggaatgaagattcccctaagaaactgttttagtgactaataaaagttttgtaagaaagtgccagttgcctccatcacaaataacacttggtagcagtgttggaggttcagtgacttgtcattgtttcacattcttttttgttatggtcatgaattctctgttgtcctaagtcctattgtaatatgttttcagccatacttttgatttcatgcttttcagatgccaaaggggtttgtctttgttacatatttacgcaaacacttcgctgcctatttcctcttcactttactgatgctcctcttgctcaactggaggatgtctgccaagaggcatgagtctgcctgtgcaggtgtctcctaatcctgatttttgcttgtatttgtgaacatgtggcaagcctcttctgctgaaccaagtaagggttgtggagagagaacagaggcaccagacatagactaaggtgtaaggagcaagatgtaatagtttaactcaattggattttttaattgggtggaataattcagggttgccacacaatattatcacctaaaaagatgtgacttactgtgaaggattcaatactaaataatggggctctctctgccatatatattcttgcttaaaagtatcttagtacagtgcagacatattatatacaaatttaatttacatgaattcagctatatgcactccatcttttatattaactataagtgttatatatgtgacagaattcacaaatgaaggaatttacagcaataatttcaataatatgtgattttatcctattcactgactttaatatctatccctaggtaagatagggataaatctcctatcctataaattcttacctgtaaattatttgagggaaggagaaataacaaggggtagtgactcttggcggtgttaaagatggcatagcaaaaggcagtgcagtggtaatttttgacagattaagatcagatgttttcggggcaaagcgctatttgttttttgacttccagtggtctgttttttgacatctgtttgtgctgtagtaaaattaatttatttacttttataatgttttaaacacttagccatagtttgggttgcttccagctctcataagtaaatcactttgatgagagtttatgagaatctttaaataatttagggaccaataaaatactgttcttgccagaagatagaaatgatacccatcaatggtactcatgctaaaacttagtgagttaaaagtatttgttttcagagttttaaaaaaaaaaaaaaaagatgagtcacgtatagttactaggtcttgattctgctccccacaagcctttcttttttttttcttttttttttttttttgagacagagtcttgttctgttgcccaggctggagcacagtggcgtgatcttggctcactgcaagctctgcctcctgggttcacgccattcacctgcctcagcctcctgagtagctgggactacaggtgcccgccaccatgtctagctaacttttttgtattttcagtagagacggggtttcaccatgttagccaggatggtgccgatctcctgacctcgtgatctgcccgccttggcctcccaaagtgctgggattacaggcgtgagccaccacacccagcccacaagcctttcaataaatgctatattgtaatggttattgtaacaagaagctattgtgcagcactcatgaaatgagtatcttttctgatccatgaatagcactattaaggggacacctgaagccttgaagaaaagcttttcttttgcccttttttcttgatgcattttttttttttctcttagaatagctaccagtttatgtttggaatacagcctaataacttgtgccttaacctaattaaatcatgtttcttatggggtgaaatgattgactgtaggcacaacagtccacataatggaagtaaaaaagcaatacggaatttatagttgacttttagagaacttatacttctcacaattttggtctggtctctcattcaagaaagggcctgagaatgagaagaa

SEQ ID NO: 19975 - DNA, 2300 bp, Homo sapien
taaaaaattaaagatagcttctttaattgcttaagttgcttgggcaactgtgaaaatgaaagggctattaacaaaaatagaggaaaaagaagtgccagtttggaataaagatggtaagttcagtttggggctggaaatgtggggtagctcaggagaggagccagcatgtgataggactgagataattgctcacataggagtcaaaacatttccaaggaaaacagtgtagagagagcatgaaactgctaaaaaacctatctatgaagattacttcaatttgggttggggaagaaaagatgaagaaaaggaaggtaatacatgagaagagggcttaagagagctaagaagaagggtgtgtggtcagcagcatcaatcaagtactgtattgagatcgacgaatgataattggttcttttttgagatagagtgtcactctgtcgcccaggctacattccaggagtgcaatctcagctcactgcaacctccacctcccaggttcaagtgattcttgtgcctcagcctcctgagtagctgggattacaggggtgcaccaccaggcccggctaattttttgtgtttttggtagagatggggtttcaccatgttggccaggctggtcccaaacttctggcctcaagtgatccactcatctcggcttctcaaagtgctaggattacaggcctgagccaccaggcccagctgataattggttcttaaatttggaactgcgaagtcctggttaccttagagagagtattgttttgataagtttttattatttcagttttgggtttgagaaacatgaaacaggagtttttgacttgtctgaaacagcaccgactccagaagggctaacgccagctctgcctggtccctttcctccttcactggggccatttacactgtgttaattaagctaattgagatactgctagaaagctttctccagcagaattcacttcctgaaatattcaaccttattttagagggaaaagtttgtttttagatagaatgtttacattttaggtaaaacactggccttagagtcagcagatgtgcattccagtgctgctgctccttaacctctctggggcccccatttcctctttagttgaatttgggagttgggctagattatctcttaggctatgctaaaattatgatgttaatgacatttgtctcttttttcccttttgttttgctttattgtaataggttcaccaagttgaagagtcttaacctttccaataatcatttaggggacttcccactggcagtctgcagtattccaaccctggcagagctgaacgtgtcctgcaatgccctgcgatcagtcccggcagccgttggagtgatgcacaagtgtgtacttcaaaccccactggcgggtatatccagaagccccagggaagctgcattgggggtgtggcacatgagattagttaacttgttatgttgctcatgtaagtcttggccccaaatcaagagatcagggactatgtagtccgtatggagttcatatgttggatttgtactccttacagtcttgtaaaaaaattaaatattcttgtttagaactgaagatccctacagatgagtatgtctaaacatggaatgtgggttatgttctcatttttctgagttatattgaattttaagacttagaaattaattttaagaaataacaaggaaagcccaaaggatatctgaatcaattcatatcacagttagctcacattgctcccatttaagcctattcaaattgggaaaactagtcatgattttcattttcaataaaagattaagatgcttatctctgattatttctctttggtccattattgcctcaggccctgcccttaggcattttgcgaagaataatacattttctggtaatacggtctacacttatggaacttgtatgttgataataaagatgtaaaatttatatgttctctttgtaattcttatgttttctctaatagcttacagacatttttgttggatggaaactttctccaatcccttcctgctgagttggagaacatgaagcagcttagttatctgggtctttctttcaatgaatttactgacattcccgaagtattggagaaattgactgctgtggataaactttgtatgtctggaaactgtgtggagacccttaggctacaggctttaagaaaaatgcctcacattaaacatgtggatctaaggtaaccatttttgagaaatagatctcatttgagtggctggcttatattgcaggggtggggagtaggttattaaccaaggcaaac

SEQ ID NO: 19976 - DNA, 2300 bp, Homo sapien
taacagcaacctatctgaaagagctcattgtcttctttcagatgatgaatgtctaaaccctgcagaggaaaggatcatcagctctaattctgaggatatacccccagtgacccgtgccaggtgtaatcacccaccctaagtgcagagaaacttttaacacaccttgtaaaaaaatccatctaggaatgaattctgtctccctgtggttgtgatgtggctcagtagctcccctgcaaaccagagcaccttaagagctgggtctgtgaccttgctgtatccctcagcctcatatctcacacaaggcccacacttaaatggttgctgaattaaagaacgggaccaccatctagtcattttgtcttcacatcttttgccaccttctttttatgtggcgagttggaaatttctttaactttttcttttgggggcctgttttctgtgcttttaatcatttttcatgcaccattacccattagtttcaaggcacacaagggctggcatctgcttctggtgagtcttcaggaagcttacaatcatggcagaaggtgaaggggagccattgtgtcacatggtgagagagggggcaaaagagatgccagggtcttgcgtgaatgcacagcgtgtgaattctctgattaccatgggaagggcatcaagccattcatgtggtatctgcccccatgaccaaaacacctcccaccgggccccacctctgacactgggaatcacgtttcaacatgagatttggaggggacaaataatccaaaccgtatcactatatttttttcaaaatatgatgataacatatttaaataatattctcagaaattcgggctatcatagatggattacttcatagtctgtgtacatattgtttgtagtctattctgataccacactggatgtatatgatattaaaaggtctgacttcataagataaaaacttagtttttactgtatcttaggcatatatttattttcaagataaacaagataatctttatatttgaaagatgacaaaaataatacagtggtttttttttgttaaattctttaaaagtgtattgtgacaaatgaaactataacaggtagaaacaataccaaaaaatgtaaactattattcagcttatgagtctggatcacactaatggggaatcctgtgcttcttggagtctaacatcagcaggagtggaaaaagggtcaaaaaagtgccagatactattacagtgattgcagaggtagaggcattgttttttctttcaaatttataaagaatgcaagaaaccctgattctggaatttttctttagttggttattgtaattattgatgaagattatagatgaggaggattgaacaataaaagacattcttaaacagaagtattaaattaattacattagaacatattattaagataaggttggagagattccttcttggtagatgtttagcaacaattgagataaatgtcttttggccctggtgtgaatttgggctctgccagaagtccaagaggtgatccaaatgggcttttaacacaccccttgctccttaccaccactttgtattcatcagtgatgtcagaggagttgggggagtgagggttgaagaaaaagcttatcttaatatgaactatagacctgttctctacctcccccttgagttttcagtgccactacaaagaaatcatactctctgagctcttttaaggcagttttattgtattagtgctggcttttgacccatttaaatagtgttttcattagtgttcagaccaagctatacagtaacatgattattgccagggtaacttaatttccacatagacttttaggaggaaaagggcatccattttccttcttgttgacaatttgaagagttgaatagtttttgttctgtagtgagaaaggaggtgttaaaatatttcagtactccaaaatgatagtgaaaaaatggtcttgtttgtaaaaatgactgttacaaatgaatccttaaagtcatagcaatttaattcatcctttgattctcgtcctatattattttcttttaaattgctttattttctctttttttagtaaaatggcgaaactggaggaacttgaagaaattgatctcagtgggaataagctgaaagccatcccaacaacgatcatgaattgcaggcgcatgcacaccgtgattgctcactccaactgcatcgaggtctttcccgaagttatgcagctcccagagatcaaggtatgtggtttcatttcataaactctaagcttcaggtcggcaaagaaagttgacttccta

SEQ ID NO: 19977 - DNA, 2300 bp, Homo sapien
atttcacttcagatagctgctcagccacactgtgttcagctaggtagagaagagaaattgctgcttcactagaaagaattatttgtgtgctggggagagggggcagttaagagttattttttttttcctttaataatcaggctaggaaatggaattatttctctgaagactttgtgttctgtaaaaattataaatgcctttaaaaatgagccttcacttttccctagacttcaggatggtatctaagagccttaggatatgtcttaagaaacctattgtattgctgactgttttagatggataaaatggagtaccaggtcatatggagagcaaataatggaggactgtccttttttttgttaatgcctcttttatttatagaattgaaaactttgaaaaaaagatttagctccagccttattgtaaaacaaggtattaacttgatttggggattttctattgacactatgatttatgtttttcaagacaagatggaaagtaaatgtttgctagtaattgagagtagaaacttttctttaaccatatatttttaaatttcagaaaaattgccatcagttatttctagttacaaagggaatacaagttagatattgatttacttcttagagctttaactggttcttaggaaggatatacagtatttgttagatttgggagtaatgagtaccaacagataattttaattcttgtggtcatgaccagaactatgtaggtgttgcttcagttgtcagcagataatacatatactttttcccttgtttaaataataatgagggggaaacttagtggcaatttacaagtaagaggacttatttcaccttgtggtagccagccttttaacagactactttacatctgttaatgactccctgtttaggggcacagaatgctttctagaggctgattttattttattttattttatgttcttttatgttatgttatgttatgtgttatgttatttattttttgagacagagtttcgctcttgttgcccaggctggagtgcagtggcacaatcttggctcaccgcaacctccacctcccgagttcaagtgatcctcctgtctcagcctcccgagtagctggagttacaggcatgcaccaccatgcccagctaattttttgtatttttagtagagacagggtttctccatgttggtcaggctgatctcgaactcccgacctcaggtgatccgcccgccttggcctcccaaagtgctgggattacaggcgtgagccaccgcgcctggcaaggctgatttttaagaaatgctatttgagaatttgtccctttagtatttctgttttgggtcctgttggatcaattatggcatatgagggctgaggagaggtaagaaatctcccagtttaaatacatacagttaacttgtaatttattaaatacccttcatttgctttgtaattttacatatatgttttattttatgatattagtcttagcatacttggctatacccgtgaggagagtattggaagctccagggaactgcaagtccatgataatatttggaggggttatatggacagaaattggatttggagatgaatattgcagaattctctcacatcatctaaatgcagtataattgtggcttaggtgttttgttgttgttctttctgagtattcatggtgtaagaatacacccatcctattacttaagttttgttttctcatgccaaggctgagagctgtccttgtcattcccaggagagagcagtcatctaaagtggaatgtgtgaaagtctctaatagctgctttacgatgctcattaaaactaattttcgtgctctgtatatatgcccctcagttttcattacaacgagtagctggttcttgttgctgataagtatttcagacacattaaacgcagtaagaaatggtaagtacagagtgtttaacaggtgtattttttatttcttggataaaggtagcaatttgcacacatttggttttaatgattcctgttccctccctgtttctcttgttagtaatatccgctgtttcaagattgatcagccttctacaggagacgcttccggagccccagctgtatggagtcatggttacactgaagcttcgggggtaaaaaacaagtaagtcagatgaaactttagaggaagaagtgcctcctgcctgtctcactcctttagttgggtagaaagaaactcagtgctgtagcacacacttttctcatgtaaaatttctttgagtattgcaagtttccccagagtgaggctccctcacgacttatgt

SEQ ID NO: 19978 - DNA, 2300 bp, Homo sapien
aaagggtccaggcgacacacacactcccacatacacggctagaaaaggtccaggcgagacacacacacacacacacacacacacacacactccacacacactcacacggccagaaagggtccaggcggttcccggcgcttttccagcccttgttttcatggcgcaccctcccgccagccgcccccctccgcactccgtcgtccgcccggcccggccgcgtgcggttccccgggagcccccaccccgtcgcggaccccagcgaccaccaagtccgcacgcggcctgccgcaggcctgagcagaaggccccgcgcacacccaccgcgccgcggccgcgcgggaggcctgtgccgcccgcgccacccactggccgggccccgcgggcgcagcggagcgggcgggtggccggcccggacgcgccctccccggccgcggccccgcgcgccatgtgcccccggcgggacgcgccactcccgggcctgccgcggcgcctttaacccgggccagggagcggggcggagggggcggtcgggtggctcagaggagggctctttctttcttctttttttgaatgaaccgtgtgacgttacgcacaggaaaccggtcgggctgtgcagagaatgaagtaagaggacaggcaccacagccccgctcccgcccccttcctcccgcgcccgcccctccgcgccgcctgcccgcccgcccgccgcgctcccgcccgccgctctccgtggccccgccgcgctgccgccgccgccgctgccagcgaaggtgccggggctccgggccctccctgccggcggccgtcagcgctcggagcgggctgcgcggcgggagctccgggaggcggccgtagccagcgccgccgcgcaggaccaggaggaggagaaagggtgcgcagcccggaggcggggtgcgccggtggggtgcagcggaagagggggtccaggggggagaacttcgtagcagtcatcctttttaggaaaagagggaaaaaataaaaccctcccccaccacctccttctccccacccctcgccgcaccacacacagcgcgggcttctagcgctcggcaccggcgggccaggcgcgtcctgccttcatttatccagcagcttttcggaaaatgcatttgctgttcggagtttaatcagaagaggattcctgcctccgtccccggctccttcatcgtcccctctcccctgtctctctcctggggaggcgtgaagcggtcccgtggatagagattcatgcctgtgcccgcgcgtgtgtgcgcgcgtgtaaattgccgagaaggggaaaacatcacaggacttctgcgaataccggactgaaaattgtaattcatctgccgccgccgctgccttttttttttctcgagctcttgagatctccggttgggattcctgcggattgacatttctgtgaagcagaagtctgggaatcgatctggaaatcctcctaatttttactccctctccccgcgactcctgattcattgggaagtttcaaatcagctataactggagagtgctgaagattgatgggatcgttgccttatgcatttgttttggttttacaaaaaggaaacttgacagaggatcatgctgtacttaaaaaatacaagtaagttctctgcacaggaaattggtttaatgtaactttcaatggaaacctttgagattttttacttaaagtgcattcgagtaaatttaatttccaggcagcttaatacattctttttagccgtgttacttgtagtgtgtatgccctgctttcactcagtgtgtacagggaaacgcacctgattttttacttattagtttgttttttctttaacctttcagcatcacagaggaagtagactgatattaacaatacttactaataataacgtgcctcatgaaataaagatccgaaaggaattggaataaaaatttcctgcatctcatgccaagggggaaacaccagaatcaagtgttccgcgtgattgaagacaccccctcgtccaagaatgcaaagcacatccaataaaatagctggattataactcctcttctttctctgggggccgtggggtgggagctggggcgagaggtgccgttggcccccgttgcttttcctctgggaaggatggcgcacgctgggagaacagggtacgataaccgggagatagtgatgaagtacatccattataagctgtcgcagaggggctacgagtgggatgcgggagatgtgggcgccgcgcccccgggggccgcccccgcaccgggcatcttctcctcccagcccgggcacacgc

SEQ ID NO: 19979 - DNA, 2300 bp, Homo sapien
gtctgcttgcgcgtacacacgtctgcgagtgtgaatgtgtatgtgtgtatctatgtacctcatttgagaaagtgcggccaactaggattggctacgaggcaaaggtggagacctttaggagcccacccaccccagcgttaggacggtgggcctgaaagttactatatggaagtcctcatcgtgtagcactaaaccagtgtaaaaggtgttagggacagagggaaaacattgacttaaactgtcgtaaagcccttgataaaccccttccctggagcgctgagttctgcatggcctgggccacggactaggtgttcaggtggacacgggcggggatgcgcgtgcgtgtgtagtgcgcggacacctaggaagctacttgaaagtaaacaccacgctcggggcgtccctagacattgcttaaaacgtgcagagtcacctgtcttcacagcagggcagcgctgaggtcccactgctgggggcggtggggggcggcattggcctgggtcttcccccggcggccgagcgccggtaacacaacgtgtgtgtgtgtaggcgcgtgtacacactctcatacacggctagaaagggtccaggcgacacacacactcccacatacacggctagaaaaggtccaggcgagacacacacacacacacacacacacacacacactccacacacactcacacggccagaaagggtccaggcggttcccggcgcttttccagcccttgttttcatggcgcaccctcccgccagccgcccccctccgcactccgtcgtccgcccggcccggccgcgtgcggttccccgggagcccccaccccgtcgcggaccccagcgaccaccaagtccgcacgcggcctgccgcaggcctgagcagaaggccccgcgcacacccaccgcgccgcggccgcgcgggaggcctgtgccgcccgcgccacccactggccgggccccgcgggcgcagcggagcgggcgggtggccggcccggacgcgccctccccggccgcggccccgcgcgccatgtgcccccggcgggacgcgccactcccgggcctgccgcggcgcctttaacccgggccagggagcggggcggagggggcggtcgggtggctcagaggagggctctttctttcttctttttttgaatgaaccgtgtgacgttacgcacaggaaaccggtcgggctgtgcagagaatgaagtaagaggacaggcaccacagccccgctcccgcccccttcctcccgcgcccgcccctccgcgccgcctgcccgcccgcccgccgcgctcccgcccgccgctctccgtggccccgccgcgctgccgccgccgccgctgccagcgaaggtgccggggctccgggccctccctgccggcggccgtcagcgctcggagcgggctgcgcggcgggagctccgggaggcggccgtagccagcgccgccgcgcaggaccaggaggaggagaaagggtgcgcagcccggaggcggggtgcgccggtggggtgcagcggaagagggggtccaggggggagaacttcgtagcagtcatcctttttaggaaaagagggaaaaaataaaaccctcccccaccacctccttctccccacccctcgccgcaccacacacagcgcgggcttctagcgctcggcaccggcgggccaggcgcgtcctgccttcatttatccagcagcttttcggaaaatgcatttgctgttcggagtttaatcagaagaggattcctgcctccgtccccggctccttcatcgtcccctctcccctgtctctctcctggggaggcgtgaagcggtcccgtggatagagattcatgcctgtgcccgcgcgtgtgtgcgcgcgtgtaaattgccgagaaggggaaaacatcacaggacttctgcgaataccggactgaaaattgtaattcatctgccgccgccgctgccttttttttttctcgagctcttgagatctccggttgggattcctgcggattgacatttctgtgaagcagaagtctgggaatcgatctggaaatcctcctaatttttactccctctccccgcgactcctgattcattgggaagtttcaaatcagctataactggagagtgctgaagattgatgggatcgttgccttatgcatttgttttggttttacaaaaaggaaacttgacagaggatcatgctgtacttaaaaaatacaagtaagttctctgcacaggaaattggtttaatgtaactttcaatggaaacctttgagattttttacttaaagtgcattcgagtaaatttaatttccag

SEQ ID NO: 19980 - DNA, 2300 bp, Homo sapien
caggcccccattcctatgtgagagaagttggcttgttgggctgatgggatacaataaatgaagaaataaaataaaaacacccaagagagatggcagtgcgtatagtcccagctattcatgaggctgaggtgggagaatccttcgagcccagaagttcgagtccagcctgggcaacatagcaaaagccatctcttaaaaaaaaaaaaaaaaggccaactaagtaaaaattaaaaaaatcataatttggtgtgcttttctggctttttaaagaatgttttgattttagagtaggaatgagacaaaataaagatgtcaggcagggcacagtggctcatgtctgtaatcccagcactttgggaggctgaggcaggcggataacgaggtcaggagttcgagaccagcctggccagtatggcgaaaccccgtctctactaaaaatacaaaaattagcagagcgtagtggcgtgcacgtgtaatcccagctactcaggaggctgaggcagaattgcttgagcctgggaggcagaggttgcagtgagctgagatcgcaccactgcacaccagcctccaagatacaacagagcaagactctgtctcaaaaaaaaaaaaaaagtcatagcatatttgtacacattgtagtactcatttgtcatctttcttgaccccaataatccagtgtccctatatatttgcactcgagccctattaagtaagccgctgtgcttctagaagacctttttcttttcttggtgctttgtcaaagactcttggagataaaaatacacacgtgcaacttgtttgtcctcttgtccttttttgctaggggctattcatgctgattaatttaaaactgtctgcttgcgcgtacacacgtctgcgagtgtgaatgtgtatgtgtgtatctatgtacctcatttgagaaagtgcggccaactaggattggctacgaggcaaaggtggagacctttaggagcccacccaccccagcgttaggacggtgggcctgaaagttactatatggaagtcctcatcgtgtagcactaaaccagtgtaaaaggtgttagggacagagggaaaacattgacttaaactgtcgtaaagcccttgataaaccccttccctggagcgctgagttctgcatggcctgggccacggactaggtgttcaggtggacacgggcggggatgcgcgtgcgtgtgtagtgcgcggacacctaggaagctacttgaaagtaaacaccacgctcggggcgtccctagacattgcttaaaacgtgcagagtcacctgtcttcacagcagggcagcgctgaggtcccactgctgggggcggtggggggcggcattggcctgggtcttcccccggcggccgagcgccggtaacacaacgtgtgtgtgtgtaggcgcgtgtacacactctcatacacggctagaaagggtccaggcgacacacacactcccacatacacggctagaaaaggtccaggcgagacacacacacacacacacacacacacacacactccacacacactcacacggccagaaagggtccaggcggttcccggcgcttttccagcccttgttttcatggcgcaccctcccgccagccgcccccctccgcactccgtcgtccgcccggcccggccgcgtgcggttccccgggagcccccaccccgtcgcggaccccagcgaccaccaagtccgcacgcggcctgccgcaggcctgagcagaaggccccgcgcacacccaccgcgccgcggccgcgcgggaggcctgtgccgcccgcgccacccactggccgggccccgcgggcgcagcggagcgggcgggtggccggcccggacgcgccctccccggccgcggccccgcgcgccatgtgcccccggcgggacgcgccactcccgggcctgccgcggcgcctttaacccgggccagggagcggggcggagggggcggtcgggtggctcagaggagggctctttctttcttctttttttgaatgaaccgtgtgacgttacgcacaggaaaccggtcgggctgtgcagagaatgaagtaagaggacaggcaccacagccccgctcccgcccccttcctcccgcgcccgcccctccgcgccgcctgcccgcccgcccgccgcgctcccgcccgccgctctccgtggccccgccgcgctgccgccgccgccgctgccagcgaaggtgccggggctccgggccctccctgccggcggccgtcagcgctcggagcgggctgcgcggcgggagctccgggaggcggccgtagccagcgccgccgcg

SEQ ID NO: 19981 - DNA, 2300 bp, Homo sapien
cggcctgcacgctcaagtctgtatgacttctgtccttatttggactctattaaaaataccctcacttaaaaaaaagaaaataaaatgaacttatcccatgaaaaataggttctggggaaaacgaacgcagtcatcaaaatgtagtttgttcgtagtagaacttgcatcaaaccaattattgtgtccctacagtaattatagtagcattttttttgaaacctggataatttggtcaaggtaggtgtgttttctgtcaatgaaatcttatgtaattgctcaaactccagatacttttttttttttttttaatttttattttctgaagacagagtcttgctttgttgccgaggctggagtgcagtggtttgatcttggctcactgtagcctccacttcctgggcccaagcagtcctcccacctcagcctcccaagtagctgggactacaagtgtgtactaccatgcctcaccgtttttttgtttattttttatttatttattttttgtagacatggggtctcgctcgctatgttgcctgggctggtcttgatctcctggactcaggtgatccacctgccttggcctcccaaagttctgggattacaggaggtgtgagccactgtgtctggcctgtaaatatttttgacaattctttggtttaattaactttgaagtctccctgtccacctccctttgcccccaaactaaggtaggaccctggcattgttaagggtactatgagtaattttaaaagaatgctttgttggcattttttagtcttttttttttactcagtcttttaggaagaaaggtaaagattttaaaagttactcttttggaaagcagacttctgaggtgggttatagctaaagatgtggtagcagagaccaagcccaaaaaaaacaaactgatgctcccttttctgcttttcttaccctgatcatgcccctctcctcccatctcttccttctgtggtctgaaagtaagctaaagcttgaattctggagtttcatgtaaacagctgtgatcttctttccagcatcccctgtctttgttttgatggaatagggaacagcacatcctatgtggattattttaataacaaatctgttcttttttttttttttttttttttttgagatggagtctcactctgtggcccaggctggagtgcagttgtgtgatctcggttcactgaaacctctgcctccctggttcaagcgattctcctggctcagcctcccaagtgggtgggattacaggtgcccaccaccatgcccggctaatttttgtatttttagtagagatggggtttcaccatgttggccaggctggtcttgaactcaggtgatctgcctgcctcggcctcccaaagtgctgggattacatatgtgagccactgcacccggcccacaaatcggttcttgaacaagtggtcagttgtctttctgtttgaggttgaggccagggagaagggaagaagtaatagtaggatggatgtggggcagagtcgggggcacagagaatggtcaggcaacagggatgaggagaagcagtggccgggcagcaggggactcagttagtgaggacctggctcatccattcttagaaagagtggtgatctcagggagctagcattgtctcataagaacaagtaaagccagcctaccctcatttttttttatgacagggttatgagattggtagattaaaagaagatgtagatgtggtttagtatattcagattttagcaaattatttgaccaagagtttcaggaaactagaatcttaaccttatgctttgttcttagaacgatactggcatgtagaagtaattcagtaagtgctcgttgttgcatgaataaataaaataatatgtaaatggtgaggtgactagccactggaggtatccagccagagactgggagagtcatttggttggatggcatagcgagaataccaatctaggaagcgactggactggtttctcccaaccccagctatctgtgttccttcctcatgaggaagctgttctgaaaagctctgttttaacctttggcaatgcagccgtaaccttgagtttgagaagcactgctctgaaatcctgtcttccattagctttggagccagcatccttctttaccatgagagagaaggcagaggggcagcacagacgtgagtttctgggcagtcgatgtcagtctttatgtgggctgcctaatgaccactcgttggattttttgtggtgtttttctctggtctatgcacagcagagggcaaggctgggggagacaaggttttt

SEQ ID NO: 19982 - DNA, 2300 bp, Homo sapien
caggagctttgcatttggagccctccagactctgccttaggcatttctttccttagctgactttgatctgtattctttccccataataaaccataactatgagcataatggctttcagtgagttctgtgagtccttccagtgaatgatcaaacctgagggtggttcaggaacctctaaacttgcattgatatcagaagtcttggacattatgccttcaaattttgcagtttggctaactgctgtaagtcaagaaaaaaaggaaaagaaaaacttttttttctccttcgctccctagtatttctagaaacaacaacaaaaatgaaaagcaagtaagcaaacaaaaatatgtgcctctatgcaaattaaaatcacaatgagacttcacaccaactaaaaaagctataatcagaaagacggatgataacaactgttagtgaagatgtagagaaattggaacccacatacactgctggtgggaacacaaaatgttgtactcactttggaaaacttctggcaattcctcaaatagttaaacatagagttgccgtaagatgtagcaactcccctactaggcatgtacccaagagaaatgaaacataatgcccacacaaaaaccggtaaatgaatatttacagttagcataattctaatagtcaaaaagtggaaacaacctaaatattcctcaattgatgaatggaaaattaaaatgtcgtatagtcatacaatgggatattatttggcaataaaaataaatgaagtattaacatgtagtacttcatatcatggatgaaccttgaaaacattacagtaagtgaaagataggatgaaaaaggctacatattatatgattccatttatgtgaaatatcccgaataggcaagattatagagacagaaacatgagggattgcttaggcttgggcggggcttgggaggaaatgggtcgtgactgccaatgagtataggattttggggggttgtgacaaaaatgttctaaaatttatggtagtgatgggtctacaactgtgactatattaaagacaatttattataagctttatttatttatttatttttgagacggagtcttgatctgtcacccaggctggagtgcagtggcgcgatctcaccgcaatctctgcctcccgggttcaagcgattctcctgcctcagcctccagggtagctgggattacaagcatacgccaccatgcccgggtgattttttgtatttttagtagagacgggggtttcaccatcatggccaggctggtctcgaactccagacctgaagagatccgcccgcctcagcctcccaaaggtcggggattacaggcgcgagctacctcgcccggcctattacgcacgttaaatcgggaattgtatggtatagtacgtgaatgagaccttaataaagctgagttgtttgcgttatttatttgttttgaacctgcttggtaaagatgaactctgaactcaatgaaattgaattaccttagtgattcctcaaaactccctgttaaggctttccggtcctctgaaaagcgaaagtgggccgtgaccatcttctaaaaacgccaaaaaatatggaatggagcccgggatttcagagcgtagtcgctgggctcccaggctgagcccgctccgggagcctccagccgccctttccgatgctccggggcctccgagcaacccagcgggcagtcccaagccgagggctgaactccagggaggagcgctcgtcacgcccacactggaggccgtggcaggcctggaaacccgccctgcggggtcctaagaagccattcgagctcccgaagagcgagtcttcgcagcccttcccggcgcgctcgcatctggcgctgtccggagcccgctcgcgacgcacagggacgggaggcccggtttccacgggagaggctgcggactgcgggccccgtcccgaggccgggggagtgggagacacccggcgacccccgagaggcgattctggcagtggtggcggtggcggtggcggtggcggcctactcgccccctggaagcaccgccccgcctgggtggcgcgcgcgccggctcctcctcttcccctccgccgcggcccgccccggcccgcaaacccaaacactccaggcgcccgcccgccgcgcgtgattctcgcctcgccgcagcccagccctgcgcgccttgcccggcggcccccgcccggccgctccgggcccctggccccgcggagcgatgctgctgctggctgccgccttcctcgtggccttcgtgctgctgctgtacatggtgtctccgctc

SEQ ID NO: 19983 - DNA, 2300 bp, Homo sapien
ggctcactgcaatctctgcctcctgggttctagtgattctcctgcttcaccctcccaagtagctggagttacatgcaggcaccatcacgcctggctaatttttgtttgtttgttttgagacagagtttcgctctgtagcccaggctggagtgctgtggtgcgatctcagctcaccacaacctctgcctcctaggtcccggttcaagaaattctcctgcctcagcctcccgagtagctgggattacaggaacgcaccaccatgcccagctaatttttgtatttttagtagagacagggtttcaccatgttggccaggcgggtcttgaactgctgacctcaggtgatcgcccgccttggcctcccaaagtgctgggattacaggcgtgactcaccacacccggcctaatttttgtatttttagtagagatggagtttcaccatgttggccaggctggtctcgaactcctgacctcaagtgatccacccacctcggcctcccaaagtgctgggattacaggcgtgagtcaccacgcccggcccatctttgcttaaattataaactcagtttctcccacagttagttcagcctatgctcaggaatgtacaaggacagcttggaggttaaaagtaagatggagttggttaagttagatctctttcactgtctcagtcatcattttgcgaaggcaaattcacaagtgggaagaaaggacgggtagatgcagggcagagagagggctctgtgcttcgagcctggatgatacagatttggcaatactattctaaggagagaccagagaaagaagtttagggtagaaggtaattaattagagtatgttgaatttgtcttgcagaaaaaccctgtgaaggaaacctctgggaggctgttgtaaatgctgggctggggatggggtgggtctagagatccagatttgaagcaatttctagtctattgatagctgaagctcaagaagagagttagatgagcagaggtgaagagagaagaggacatcagactcttgagtaaattcagcttaagctcagggaggagtaagaaagggagacagtgaaggaagcagataaggaatattgggaagctggacaaacaagaactgggtagttgacaataccaatgaagagggaagaggagaggactttaattctttcggagatgccagatgagaaaaaattaagaaatgagtgagaaaaaaatgatggagtgattaaacatctatgttgctttcctttgagaatgttaactatgaaaagaagaaaagggtggtggtggctgcaaaccataggaaggctgagaaagggttttactttggttctgcctctaatccctgacgcattcaacctcctcaagccatttgcttgtaaacataactggcataaataatatctgatatgcccattttacaggacaagtgcttccctctcagaccacatactcgaggacagcggccgtccacgccttatttacattcatcttcccaacacaacagtcatttggaagatgccgagtggcgtgggaagaacaagcgggaacgagcgccgacccgcccgcggcctgactgctagcgcaccgctgtgcggccgcctcaccgcgcactccctcctgaattattcaccaccgagacgaggacggtgatcgcccccattccacagaggacacggagtgaaggcgcagtcacaggcccaaagcccccagtcggcgggtcttggaaatggacgactttttcactcaaaagctacgaggcaacaaagcatgtggatgaggagggaagggagccggggccaataattcatctcaaagtaaaagacgtccccgggggtggggaacaaacaaacaacaaaacccggctctgtgcttccgcgcttgcgctctcctaggtctgccaggctgccgcccgcgcctaggccagagtctcagtgcgcctgcgccgagcccgacttccgccagggctcgattggcttccaggctacttctcccggcccagggagggcctgcgctgtggctagagaagggagtctggtgactgggtgcgcgtgctgatgacgaaatcggaagtgcccggagcagaggcgggaccagaacctagagggcctcgggattgcggaagtttggtggggagggtcggagctctggtggagagagtgttgtctaaaacaagttccggaagggaggctgcccttcgcggtccgagaaccaccggcctccccagtttgagggctgttaccccgtgcgcgcttcgacgttgctgctgttggctctcctcgcccctcgttcccttgggaac

SEQ ID NO: 19984 - DNA, 2300 bp, Homo sapien
agatactttcttttgtttcttgtcttcctactgtaccctttggggagagggaacatgtcttatagccccagtcgaatggtgcctctaattttcacccagttagaatcacccaaaggcatttcactttgctagaacttccttgggtattgttgaattcctgtcattggaaatgtttctgccccggttgagcaagcactgaacaggagtgttttagagggaattaaaacttcaaaaaggagaatagagaggctctaccatttaaatgcaagtcgcttgaaatctgtagaccacagtagcaagcacgaagcaggtattcaataaatgtggtgaattcaatgtcaataacatgctccagtcttttgtccactattccccgagcctacctaaccaatgggcaaagtggtactaattgccatcattaggaagcacatgctatgtgtcagaaagtatgtaagaattgtctcttcatccatctctgtctatatctcattttatcgatcttattgacaaatgagaactatatatagatctcattttacagatgaggaatctgaagataaagggattaagcaatttgctcaggatttctcaagcaatgagtggttagacttagtttgcaaatttatgactctgctcccaaattctcattttccctcctacagctggataatagaatttttaagaagcatccttccacacctcctcacctatgaccttccctccacttgctccactgatgcctaaaattctgtttttggagttcacttagtttatgactttgattctggttaacattaaaatacccaggacatgggggaggggaagctgttatcaatcttagtttagtcagttaatatagcgagttgctcttattcattactcaacaagcacttattgactgcatactgtacatcaggtctgtaccaagctttggtgttataaaaatgaatgaagtttggcacttacctttaacattgttgtagtcacatataggagaatgtaagagattattatgaaacaatgtagtaaatgtacaatagggaattctagataagcacagcagagaagcaaccagctccgtttcaggtcctttcctgagactgattcggctggaagggagtaggtcccgccaaatgaagaagctgtgggaagacaggaggacaagaacaggctccacgaagagatttcagagcagagctgcgtactcctttttctttttgtttcttttgctctgtcacccaggctgaagtacagtggttagctcacggctcactgcagctttgacctcccaggctcaagtgatcctctcgtctcagctttccaagtaactgggaccacaggcatgcatcaccacactaggctattgttttacattttttgtagagatggggtctcaccatgttgcccaggttggtctcaaactcctgggctcaagcaatccgctcacgtcaacctccccaaatgctgggattacaggcgtgagccaccgcgccaggcctgagtaatcctaatcacaggattttaaaaagaaacttcctgcgccacccattaaacaatatctcctaccaatttggtagtaaatattttgctaatagtacctaatttttaggtaggcactgtgtttatacatatatccattccttcttttttgattgtctttctgtttaatgggcagctacctctcttggcatctagcagaatgagctgctgcagtttacacaaaaagaatggagatcagagtactttttgtgccaccaacgtgtctgagaaatttgtagtgttactatcatcacacattacttttatttcatcgaatatttcaccttccggtcctgcgtgggccgagaggattgccgtacgcatgtctgtacgtatgcatgtaactcacagccccttcctgcccgaacatgttggaggccttttggaagctgtgcagacaacagtaacttcagcctgaatcatttctttcaattgtggacaagctgccaagaggcttgagtaggagaggagtgccgccgaggcggggcggggcggggcgtggagctgggctggcagtgggcgtggcggtgctgcccaggtgagccaccgctgcttctgcccagacacggtcgcctccacatccaggtctttgtgctcctcgcttgcctgttccttttccacgcattttccaggataactgtgactccaggtaagcaaggtggggtagcagggctggtgacttccttttttcagggaaattcataaatatcgttatttgagctgatttgagatggtgaacaaaatggacttaggtccatttt

SEQ ID NO: 19985 - DNA, 2300 bp, Homo sapien
ggctggtcttgaactcctgacctcaagtggtctcccaaggtgcaggattacaggcatgaggcaccgtgcccagccagtttttgaaattaggcattttattaggaaaagccgtataaatggttatgtgggtttgcagtagaatttactttcaagtcagctccaccaggaatagtttaaagatctcataggcatctgtaaagaataacaaacgttgcctatatttacagccatacagtcttatttttaaggtttgatctatgcaaatacagtattatatatacttcatgtaatgtgtaacatgtagattataaagtatatgaataacttttcaaaggaacacaaactcttcacaggacagtctctggtttcagtgcaatacagtttggatctgagtggatgatgaattataagccataataatctgacactgtgtcaagagcaaatttgtgtatatatatatatgtacatatatatttatgtgtttgcctatatatgtgtatatatgtgcatgtgtgtatatatgtatggggtatatatatatagtatgtatatataagtgtgtatatataggtgtgtgtatatgtatatgtatgtatatgtatgtatgcatatatatgtatatgtgtatatataggtgtatgtatatatgtatgtgtatctgtatatatataggtgtaggtatatatgtatgtgtgtctgtatatatacatgtgggtatatatgtgtgtgtgtgtgcgcgcgtgtgtgtatatatatatatatatatatttatgcatgtgtaaattgaaaagtaagcagtccaaattttcccttttacagacagacaccaaaccagtgcagatgatgaacatggaggccacgttctgtatgggaaacattgacagtatcaattgtaagatcatagagcttccttttcaaaataagcatctcagcatgttcatcctactacccaaggatgtggaggatgagtccacaggcttggagaaggtaaggagaaggcaggtgctctccacaaaggcaccccctgccttggcaaagagttgtgccaacaggtctgtgtgggccgtgagagctgggccggtagccctcccttattgccactggctcagtcacctccaaggacccatggttctttctggggcctttcctccttaatattaacaacagccaaaatttatttggcacttacagtgttctagggactgtgctaagttgcctacgtgcattatctcatttaattcttacagcaggctgatgagttagagactgttaccacactcttgtttaccagtgagggagctgaggcacagaggggtgggtaactggttacataattagtcaagggtgtgtgcaggatcaggatttgggcccaggtagttggagccaggttcttaactgaaggctagagtgtctccctcacctcctaggcagttaaggcactacgttgctacgcactgccaggtccactatcatgtgacctgatgtcaagcatcctctctcttgctctttctttttttttaaaattagtagatgttatttttagagtagatctatgcctacagaaaaataagcagaaagtacaaggagttcccatatactccccttcccgtcccaggcctacagtttcacctgttattagcatcttgcattagtttggtatgtttgttacaattgatgagccaatactgacatattactattattattattattattattattattgttttagagacagggtcttgctccattgcccaggctggagtgcagtggcatgatggtagctcactctaacctcaaactcctgggcaggctggagtgcagtggcatgatggtagctcactctaacctcaaactcctgggctcaagtgatcctcctgcctcagcctcccaagtagctgggactaaaggcacacagcactatgcctggctttttttttttttgtaaaggtgggatctcactgtgttgtccaggctggtcttgaaatcctggcctcaagcaatcctcagcctcagcctcctgaagtgctaggattataggcatgagccaccacacctggccttcacaatttacgttacggttcactctttgtgttgtacatttatgagattttaatacgtacacatatatgcttcaaaattttgaattatgcagatactattttatagtacacattatatataagtattttattttatatgataagggttattatattattttatttatatagatttttaaggcacaaagtttaaataagagtagcagttttctctgcaggtgaatggagttttagctt

SEQ ID NO: 19986 - DNA, 2300 bp, Homo sapien
gcaagataagaactgtgagttaggtacaaacttggcagaaagaaaatgtagcaataaaatggactataagctgaataaggggggagagtacccacatacagcaggcatgtgtttgatcacctatcatcagttgaggggcaacttagaaacgatagatacagtagaaagattacttagtttggggccaaatatatgtgctatttgattatgcagttttcttttctgaaaaagaaggaatgatcatatctaccttgcagagttgtaggattaaagctaacacatgtaagatatttggcacatgttagacacattttttaaaaagttacataatgttatctttttgaattaggttttataggctaagaaaatctatattaactgggaaagtgttaaaacaaattacaccattccattcaatgcagcaatatttcttcatgcttatggtgtgctgtatctgatgataaaagcacaaataagaggatttacatttctatcttggaaatacacaatatctataggcaaagagacaaaagaaaaggcatttcatttgaaaggcataggtcagtggtgagatctacatattctcttgatactctggaatagattgggtggggaaggcaagatacctgttcttaggaagtcactatctcactctggttctatattatctgtagttctacactgtcaaagaggacattgaacctggtgatatggtttggctctgtgtccctactcaaatctcatcacacattgtgatccccataatctccacgtgttgagggagagacctggtgggaggtgattggatcatggaggaagtttcccccatgctgttcttgtgatagtgagtgaattctcatgagatctgatggttttataagtgtttggcagttcctccttttctctctctctctcctgccgcctaatgaagaaggtacttgtttctccttctccttccgccatgattgtaagtttcctgaggcttccccagccatgcggaactgtgagtcaattaaaactctttcctttataaatgacacagtctctggtattctttgtagcagtgtgaaaatggactagtacacctggtgacatcaagacccccagcatcattcaagatttattgtctcttgaacaatatgaatgactgactaaagtgcctcaaattctgtagtttgcatgtgggatgagtcaaaagggggtgagaatgttaacaaggcacatgacccatgggaatttgctgggcatatcctcagtcacagagcaatgaggggagagtacaggcaaaaggtgtaagcagaaccagccacaatctgtggagaagaatgagatgggatgatgtttgcttggctgctaacttgataataagaatgttagcctttggcttcattttacgtgaatacagggagttccaccacaaagtgggtaggattatgtcccctaaaaatatagtttaagtcctaatccttctacctgtgaatatgaccttgtttggaaatagggtctttgcagatgtggtcaaattaagatgaggttgtactggcttaggatgggctctaattcagtgactgctgtctttaaaagaagagggaaatttggatacatacatggacaataaagagaaggatgtgaagatggaggcagagacttgagtgatttgtctacaagtcaaggaatgtcaaagtttgctggcaaccaccacaagctgagagagaggcatgaaacagattttccttgagagtcttgaaatgaaccaaatctgctgatatcttgattttggacgtttgtcccccagaaccatgggagaataaactcctgctatttaaaccactcagtctgtggtaatttcttatggcagccccaggaaacgaattcacactactaaatgaaaatagatctctgtctatcaatatcaacaccaatatttatatacagggatgataatgaccttagttttccagttcttaatagcatactgaataattgtgcatgattgtatttcaggtatgtaaaataaaattgtttgttcacttattttcttccaatcaccattttctctttctcctttttttttggttttagatcgttataagttttacaatggactctcttgttacagcaaacaccaaattttgctttgatctttttcaagagataggcaaagatgatcgtcataaaaacatatttttctctcccctgagcctctcagctgcccttggtatggtacgcttgggtgctagaagtgacagtgcacatcagattgatgaggtacgtgtccactagggtgctacacagggtcc

SEQ ID NO: 19987 - DNA, 2300 bp, Homo sapien
acgggggatgggagtggtacctggcttcccccgtaggcagctctcttttagccgagaaaagggcatctgtgaattataagggaaaacaacaactgggtaacaggcatgctggtaggttaaggaaatctggtgggaacatcggcagcatccactacgagattacatgcttggagaagaaaaatattacaagtcagtatcagtaacagacacacagaagttggaacaaaactatgagctatggaacagggttgggaacctatcaatactctgcttcaggggataactttcttctcctcacttgttagcatagaaatcattttttaaatggttcttaatcatcaacatatattccacctctggggcagttttgatcctagaaagaagagatggataaaacagaacagggaggagtcctgtgataagaggttgggaaggcgttgaaaattaggtttagagagaataaggatgagaatctgtcaccagatggaggtgcttgagtgttaaacaagagcagttcctggtgtgagtgggccactataaaagagggaaggtgaaggtccgagaagtgagaggcgctggcaacaggaatggtgaagtggtacagggtggcggtagcagctggggtggacaggaagaccatatgcagagtcacggagggacctgtggttggggacagagcagcacagcgtgatggtctaagtttccaaaggggagcattgaaggtgactgaaggaagaaagacttggaagaagagggagtgcgagggagaataggaatggtgactttgctttcccaagatatgagtggccgttcccagaaaagactatgggatgtagtagtcctcaggacatgccaggtttcccggtgaaagcaggtggtagagcaaaagctttagcaaaaagcagaaggcctgtggaaatggctgggcaatagaacaggaagtctaggggccacagagaaagaaataagaagatataaatggatagggatattaaaacataaagcattatggccgactcagagattttatgccattttaaaaaactaacatttccatttcactggcatccagggttcactaagtgttaattctttctaaaccttactcaatttgcaagattctcagtgcctattaaaaagcaaatcaactaaatgtggctttgagtttgcttaaagagcagcaatcaaaatattttgaaaaaagtaaattgtgagtatggagattggaacacacatgacccatatgcccttcgagcctgcgtatctagggaggtgttcctctaggcagaaggaagagctaagacacccttctaggagctgctgcccagcaacgatggcaaatctccacgccctttactgaagattaaagctaagactaatccaagcacagtttcttttaatgaactggtagggccagtagaaatgctccagggttggcaggaaaaactggaatctgggggtgtaatttcctattgagtttttttggtagtgttgttttcctgaaatcagtgaggatattgagtgcttatgaattattggcattagacacagtacctggtacataatagacttgataaatgtttattgaatgaattaaaatgagatattttacaattaatggatggaatacttgagaataataggtgtgtgtgtgtatgtgtgtgtgcgtgtgtgtgtgtgcgcatgctcgcttgtgtgtggctgcctacccaaacttttcttgttcttttttcttgttcctttgtagcaagatagttttctttcattttcttcctggcatttggcactcctaaataatgcaaatgcaaaaataactctgttacagagaatgacttgtcaggacacagctctgtccatctgtggtaagtaaagtatgcatttaatgtatgtgttcatcaggctatacacctttggttcccagcgttggctgtacattgtaatcacctgcggtgataaaaattctgatgcctggtttccactcgagagatgctgactcagttggtctggggtggggcttgggcatagattttttttaaagttccaaggagattttaaggtgcacgcaaggtggaaaaccactgctgaagcagatgtggagaactataaattaaggatcccagctacttaattgacttatgcttcctagttcgttgcccagccaccaccgtctctccaaaaacccgaggtaagttcttattttggctccaatttaagacctctgtattttgagaacaatgatgtttgttgtttgaaagaattacttttattttgcatagactttctggaggtagttttattta

SEQ ID NO: 19988 - DNA, 2300 bp, Homo sapien
gttgtagataaatctcccttgactttgtgatgtgctgagaaaacaaactcacggctggtgttaaaaagggcccatgacaataccaagtgttggggagaatgtggagaaatcagaactctattcacggtcggttggaatgcacacttgtgcagaattctatggagaagagtctggcatttcctcaaaatgttaacctggatttaccatatgacccagcgatttcattcataggtttatactcaaaagaaatgaagaaatatgccatgcaaaaaaatgtacatgaaaggtcacaacatcattattcataatagtaaaaggatggaaacaacacaaatgtccatcaacttatgattaaagaaaatctggtctattcatagaatggaatattattcgaccacaaaaaggaatgatgtactgatccatgcaatgatgtggacaaaccatgaaaataacactagattaaagaagccagtcacaaaaggacttactgtatgattccatttacctgaaatgtttggaataggcaaatccatagaaacaggaggtagattcctggtttccagggtctccaggaagggaagaatgaagtacaagatttcttttggaggtagtgaaattgttgtggaatgagatcatgatgatgatagcacaactttgtgaatataataaaatcattgaattgtacagttgaatttatggtatataaattatatgttaataaaaagggggtccacaaaacaaacagccccccactctggttgtcagggagatattggattaaatggccttggacaacaacccctctccctggccacagacattcttcagattacaagatattccaggggaaacactggaatgagtctgaagccaggtgctaaacagaaggaccattgagaaatgttgtgatcctgacaggtcaagcaatttatttttcggcttcatttttaaatgtaaaattagaaagctgccatttaaaatggcccgtctgtttcaattgctcttctcagtgtcagcctgttaactcaatgtgttagtctgttttcatgctgctgataaaaacatacctgagactggcaagaaaaagaggtttaattgggcttagagttccacgtgattggggaggcctcagaatcacagtaggaggcaaaagttattcttacatggtggctgcaagagaagatgaggaagaagcaaaagaagaaacccctgataaacccatcggatctcctgaggcttattaactatcatgagaatagcacaagaaagaccggcccccatgattcaattacctctacctgggtccctccaataacatgtggaaattctggtagatacaattcaagttgagatttgggtgggaacacagccaaaccatatcactcagcaaggcagataactttctcactgagcctatgcaacagaaaaccatctgggatggttgtaaggggcacaggaagtgactggtaggatcactgccaaagctgagcactcaggagaaggcaatagaatcctattctccatagtatgctataagatactgaagtacacttcttcactatctctttggacttagaattagcactacattccttgttatacagaaaaattactaaggaaattcataggatgacaaaaactttcagaactgaaaaacaggaaatgtaagctttttagttctttggtattcgaagtatgcctaaaagacaatgcaaaatccaagaaaagaatggtggggtttttgtttgtttgtttttgtttttgttttacagctggagtagaatacaaagggatggagttgaaacaaatgagaggaaattggaattctaaacttattctcattggcattagaaaggcacctacatgtatttcacatgagccggtgactgctgacttgcattcttattttttccctatagattaaaaaggaggtacaatggtagaactgtaatcctgtcctttgtcataaattttcatattcataaaggtgagtgttagcccgcttgtgaaatctgaagttgagtaacttcaaatactaaccacagagggaaaggcagcaagaggagaggcataaatttaggatctcacccttcattccacagacacacacagcctctctgcccacctctgcttcctctaggaacacaggtaagagcttcaagcctctccagcttaataacatgaattatttttgagaataataatgatactgtgttctatatcatgcatctcctgcattctgtctgattatattttacttattctgccagagcaaaattaaaatacctatttcatctgat

SEQ ID NO: 19989 - DNA, 2300 bp, Homo sapien
cttgttgtagatgaatctcccttgacttcatgatgtgctgagaaaacaaactcatggctggtgttaaaaagggcccatgacaataccaagtgttggggagaatgtggagaaatcagaactctattcacagtcggttggaatgcacacttgtgcagaattctatggagaagagtctggcatttcctcaaaatgttaacctggatttaccatatgacccagcgatttcattcataggtttatactcaaaagaaatgaagaaatatgccatgcaaaaaaatgtacatgaaaagtcaaaacatcattattcataatagtaaatggatggaaacaacacaaatgtccatcaacttatgaataaagaaaatgtggtctattcatagaatggaatattattcgaccacaaaaaggaatgatgtactgatccatgcaatgacgtggacaaaccttgaagataatactagatgaaagaagccagtcacaaaaggacttactgtatgattcgatttacgtgaaatgtttagaataggcaaatccatagaaacaggaggtagattactggtttccagggtctcgagtaagggaagaacgagatacaagttttcttttggaggtagtgaaattgttgtggaacgagatcatgatggtgatagcacaactttgtgaatataataaaatcattgaattgtacagttgaatttgtggcatataaattatatgttaaaaaagggggtccacaaaacaaacagccccccactctggttgtcagggagatattggattaaatggccttggacaacaaccctctccctggccacagacattcttcagattacaagatattccagaggaaacactggaatgagtctgaagccaggtgctaaatggaaggaccaccaagaaacgttgtgatcctgacaggtcaagcaacttctttttctgcttaatttttaaatgaaaaattagaaagctgacattcaaaatggcccgtctgtttcaattgctcttctcagtgtcagcctgttaactcaatgtgttagtctgttttcatgctgctgataaagacatacctgagattaggaagtaaaagaggtttaattggacttagagttccacgtgattggggaggcctcagaatcacggtaggaggcaaaagttattcttacatggtggctgcaagagaaaatgaggaagaagcaaaagaagaaacccctaataaacccattggatctcctgagacttattaactatcatgagaatagcacaagaaagaccggcccccatgattcaattacctctacctgggtccctccaacaacatgtggaaattctggtagatacaattcaagttgagatttgggtgggaacacagccaaaccatatcactcagcaaggcagataactttctcactgagcctatgcaacagaaaaccatctgggatggttgtaaggggcacaggaagtgactggtaggatcactgccaaagctgagcattcaggagaaggcaatagaatcctattctccatagtatgctataagatactgaagtacacttcttcactatctctttggacttagaattagcactatattccttgttatacagaaaaattactaaggaaattcataggatgacaaaaactttcagaactgaaaaacaggaaatgtaagctttttagttctttggtattcgaagtatgcctaaaagacaatgcaaaatccaagaaaagaatggtggggtttttgtttgtttgtttttgtttttgttttacagctggagtagaatacaaagggatggagttgaaacaaatgagaggaaattggaattctaaacttattctcattggcattagaaaggcacctacatgtatttcacatgagccggtgactgctgacttgcattcttattttttccctatagattaaaaaggaggtacaatggtagaactgtaatcctgtcctttgtcataaattttcgtattcataaaggtgagtgttagcccgcttgtgaaatctgaagttgagtaacttcaaatactaaccacagagggagaggcagcaagaggagaggcataaattcaggatctcacccttcattccacagacacacatagcctctctgcccacctctgcttcctctaggaacacaggtaagagcttcaagcctctccagcttaataacatgaattatttttgagaataataatgatactgtgttctatatcatgcatctcctgcattctgtctgattatattttacttattctgccagagcaaaattaaaatacctatttcatctgat

SEQ ID NO: 19990 - DNA, 2300 bp, Homo sapien
ttatgttgaaggtatgcaaggaggttacatggctaaattggagtgagcttgggggagagtggtaggagattaggtctgacaggtggccagggccagatcacagagggtcttgctggtcacagtaaggactttgtcttcttctctgagtaaaagggaagacagtggagtttttgagcagaggagtacctaaccaactgatatttaaaaaatactagtctatcaaagatattatggaggaggataaagactggagtagaaagaagataggagattatttcagtaattcaggagcaccgttcatgctgttaaaactggggagcatgagaaatgtgcagatggggaatatttccaaagatggggaaaacaggattttttcattgattgactaagagtgagaataagaataagaacgagaaagtacttaaggatgatcacaaggtttttagcttgagaaagaatagaagaatggaattgccatttacagaggtaaagaaggctgtgagggacacaggctggagagaggggttagaaaatcaagcatttgcttttggacatgttaagtttgagatatatattagacatccaagtggggatgttgagtaagcagttggatatgtgggtttggaattcaaggtcagcataaatgtgggagctaatagcatattggtgacattggaggaatgaggttggatgagatcacccagggtatgactgttcatagagaagaggctcaagatctgaattctgttttattgtgatgtctagaggttgagaattgagaacgattctgcagaagagactgagaaggagcagtcaaggaggcaggccgtgaactgagagagaatgatgactcagaagttaaaggaaggaagtgtttgatggcaatgaggctcctgaagaatgacgtctccctgagatcagaaactattcttgattgtttttatatccatagccctctacagttagcggtgctcaaacaatgtttgtggaactgaatagaatgaactcttctttcctgacatattcttgtcctaagataacacatattccagcatcatcttttcttctcttggattttccttttccatttctattttcataaacatgatggctgtggcctccaggctgagatctctgaccactttcttatggcaggtcctacttgttagtattgtcttatttcatggagggatacagggaatgaggtcccactgaggagataaaaatgtgctggaagtgcgggcatggtggctcacgcctgtaatcccagcactttgggaggccgaggtgggtggatcacgaggtcaggaggtcgagaccatcctggctaacacggtgaaaccccgtctctaccaaaaaatacaaaagttagccgggcgtggtggcaggcgcctgtagtcccagctactcgggaggctgaggcaggagaatggcatgaacccaggaggcggagcttgcagtgagctgagatcgcaccactgcactccagtctgggcgacagagcgagattctgtctcaaaaataaataaaataaaataaaataaaataaaataaaaagtaaaataaaaataaaaaatgtgctggaaattttgcgagtgctgtcaacttgtttgtgcaaaaatgactgagatggagatgttctcctgtgacactgcaaaagcgggtagtctagtgggaaaatatctcgactggctgatcgtgtgtagctcaagatttttttctgcacaaattccaggatgaggaatgtcttaaagcatggaaattcagaatacaaagattcaattccttttaatcttttgctccagaactattatagattatttaaaaatatacacaaatgatagtaagatagattttaaccattggctgaaggaatagtaaatcttctgttcattggaatgtaaaactaatgtgaattcccctgtctagcatttactcatttctcagaaattgtgataagggtatgtagtttttcatgaagcagtgtgccctgatacttaaactcatgaaatacaataactgaactccagatactatctgtaacttcaagtgatgttctgagaattttttcccttctgttctcaggcagtcggcataaaaatgggttctctcagcacagctaacgttgaattttgccttgatgtgttcaaagagctgaacagtaacaacataggagataacatcttcttttcttcgctgagtctgctttatgctctaagcatggtcctccttggtgccaggggagagactgaagagcaattggagaaggtatggaattcctcagaggtttgttcagaacc

SEQ ID NO: 19991 - DNA, 2300 bp, Homo sapien
cacttttgtcagtcaactactcactataaagacatgtcttgtcatctcaggaaatccctcttcaggggctttttgcctttatatctatctgaatttctaggatcccttgtcactctgccttcaaatcccatcactttataagcaaaagagattccatatgaagctattctcggtcggtcttgctgcctgcaccatcccacacgcccatccttctgttttcatgttcaggtgtggagggcagggcttccatcgcctgctccctcaaggtcattgcttactgtaacggtgatttgcaagtgaactctggttatctttccatgaaatttctggtactgacattattcccttatcaacagtgatggaagtttcccttattacaaattttatgtcatttctaataacattatatcaggaataggatgaggtgggtgagaattacatttgtgtttccaaaactcatcttccccccacaatttgaaatggttttactagtgaatatatgagagtatagtgattcatatttatgtctccatactcacgaagccatgaccatattcaatatcaaagttaaaatggcaatattttaataagatagataaaatttgtattttccatacagatgatggaggagtgcaaaaaatgaaaggtctttttctgaaaggtaatgcaggaactgttaaggtgtttacaacggatatttatcatcatgaccaacccaaaatagtacctaaaatgcaattaattaagcacctacttatcaagtgcttaccaggtttcttgtagtatgttcaacacaatgtagattttaaaacagcatggcttggtttttgtgtttaggaaaggattttgtactaaatgacttataagtgacgtaagtagtgacttatgagtgacaatctaaaattatacagcagtggaaatatttagtaaaatcatatgataaaagaatattattaagaaataaagaactcaatataggctcataataatatggaagatgatggaaatggtggaagtttgggtggccttgagtaataggcaatatatggataggtggagtactcatacatcctggattttcctgtctcaacttattattataataatagctacacttatcaagtggttactgtgtactaagtactttacatgttacctataatactcttaaccatgacgttatgaaaaatttccccatttttcaaacaagtgaagcaagatacagacaggttgaagagcctctcaaaggtcacatgggtccaagatggggagctggaattggaacccaggtttgcgtggctctaagccttagctgtgacaccccacctcatgtattttgcatccaagggcatactttctggaaggtatatcttgagtctgtctcagaatatctggtctctgctgtgtatgtgggctgtcagtgcttctccagagctgtatattgccacttgatattggtaaaaaccatctgtatgttgcaaacttatcatgagatctgtgacttgagtcacctcctcttttggggagaccatttgaaccctagtcaatgactgccatggaaatagataaaacccaggcatctaaccttggtcctcggtggaggattggattgtccaaagtctgttctcctggctctggctccctcctgggtccttccctggttctaacctgctggccctgattcctgactctaaggctacaacctgccatatgtccaggcacacacagttggaaagggaatgtgaaaggacaatctttagaatgtttacttctctggtttgttggtcaatggaaggatgagcaacacgacaccatggggcactcctctgtgcttcctgcagagtcgggagatgacaagtgcctttctgagctggacaggaaagcccctgtggagtcccttcctgatgttccctccatgattttcctctttgtgcagtctgggatgaaggagggacttttcattcagtgctgtcaccagtgctgctgctgtcatcaacctctcccttgggagttgagccaaagggaagtcttgggaattttccctgaaccttggtataggtgtgctgggaggagtgagaagtcttaggaggtaggaggcaggaggaactgaagcccagctgtgaaggccgcagactgcagtgagaggaggtgagtgcttatgctgggttattctaggcttctgagtatgcttagattccctaagatggatggacagcccctagtgcctgaggtgctgcatgccctgagcatttacctgctgtcaaagtaacagctttacctctggcatctgggattctggc

SEQ ID NO: 19992 - DNA, 2300 bp, Homo sapien
aaaacacaaatgacatcagcttccagggaataggtttatatcttttaggatgtgcaaagaatatccctaatttggaacattaagtattcccaggtcatttccattttctgggcactacactaaatctagcaccccttaccatgccctcgccattagtattcggtcaccaaagaattcttatatcttcagcctaactacagagctctatgtaaccagagttcacagccttctctactgacacctcgtgtaatcctgaattaatccctagtagtttccttaaatccctcttcagccctgggtaagtgaggacaagagacagtaaaatgtaggttattacagttcatgtttcctcatctatatgcatgaactggcaaggccaatggaaatttggattatcattgtatggcaagggagaataattaatgtaacacgccagtccacatgactgctttcttctcatacttatgtcactttgggattggttaattgtaaatcaactgttgcaaacacagtagtgggagggatgtctgagttaatgtgaagaagaaaacaatggtgagtagagccttaattatggatgactcttggtaattccaagaagattatccagtatgtgtgtcacgtgggtcccttgccttttacctattgaccatttcaccacttgaaagtactttatatcctcagtaggtaagaaatagaaaggatatgggattcaaaatattcagcctatgaacactgcaattagaatatggagaacagggaatccatttgtaggctcattttttttttatattaacaacaaccttctccttcagaaagttcaccacaactgctaaatcaaaattaaatttcagggattttctgcaactttacttttctctatgattattctactcataaacaatcatggaggtgagcaataactactttattcgattttggataagttaacaggacccccttcttcctgggaaagaggcaaaattgcacaaaattgagaggcgagcaactgtaagatgatggtaccttctaattccaatagctttttacaatagagaacccagttacttggataaatgttggctgtacttttgaaaacactcaggcagaaggaccaggcttgcagtcatttccatgcatagcaggtgaaggtaggtgcaacatacagctcaacctcatgatgctacggccagaaactgaaatgtgtttttgcccctgtgtggcatgttctgatggcaaaggtgtaggcaaccaactgggcccaacctacctttccctacacctggtcacttttcaaagtgcaaacccactttaacaaactctagcctgtattataggaggaaggatctgggtggtgcagacgtggctttccattgccagatcagaagggtggaggagaggctggcaggatgacaagaatgaatgaacacaccaagtttcagctcctatctgaagctgctcagttcaggtaagcatttagagaagccagttgcaataactaacagggcaaatgtttctctggaaaattccaagccagagaaaattgagaaaaagagggaaggatggaaagcagtacaaagagaagccagctcaaaaggttagaggtccagatgaaaatctgagattggagaatgataaaaaacattgtgtgagattctattttaggtcattatgctagggaaatttacacaggatagggttgaaagaaattaggctataagatgagtggcaagttgcaataaaatggcaccctaaactcaccaagtcactgttgtcactgctatcttgccttagttgatttgatgtctagttagtctatttgtgtgtttctcacagaagagtatgttttgacccaggctgacagatactgttgattctgaaatttgtttttatggttatgttaaaaccattgtcattataagaaacagagatgggaatattgcctcctgaaatctgattcacatacaaactgaatgaactacataacaaccaccttagtcagatactattttgaaacctggttcaaaacctaaatgcttataagattcttgagagacagtgctgtgctctgagtcatagggaagccatcccagaagccaggtctactcatcaataagcagctgcctgtgcagagtgcaggctgcacctttggacagcctttaaaactgaattctcagaattttagaacaaatttttgtctagaaatgctgactttggttcattaggtagtggtaaaacaggctcccttcgaagctctccttcatcaccttcctaagtgcatgggggaaaatacctagggc

SEQ ID NO: 19993 - DNA, 2300 bp, Homo sapien
taggctttcctttcctgagatcaagggctctctgaataatacccgaagaaaattaggaagaagggtagcagaaaggcattgattggggtaggcaatcaacagtaccagctgtatagaattattagaaaattagaagttagagtagttgagaaatacgtgcaagattatacaactagtaaatggcaaaaagaagattctgagtctgagacttttctgagtctctcagtattcatatccttgttcaccacagtatagggcctctctagagagttttagcatgttactccacccattaaaaatatttggtaagaatttgcttgatgctcaccactgttcttgctgctcaagggaaaccaagtatatatttgtggatagatcctaactcagatgatactgtcagaatatataagattcctataccacatcctgaactctgaaagttgcagttctacgtagaagttcactgagggttgtaagagtcagaatggactccatggaagttatggggtgtgaatcaaacctcacaggtgagtcagtggggagaaagaagcatgacattcctcttgagaataactggaatgaaaataatacggtgagaaagagtagcacctgaaaagtgagtgaaggaaagggtggtggaagttctaggtacattgatatctgtcccaacttgttgagctgtcaatgtgtggttaaaaaacagttaaacaggccaggcccggtggctcacacctgtaatcccagcactttgggaggccgaggtgggcggattgcctgaggtcaggagtttgagaccagcctggccaacatggtgaaaccccgtctctactaaaaataccaaaaattagccagtcgtagtggtgggcacctgtaatcccagctattcaggaggctgaggcaggaggatcacttgaacccaagaggcgggagttgcagtgagcagagatcacgccattgcaccccagcctgggcaacaagagtgaaactcgatctcaaaaaaacaaaaacaaaaacaaaaaacagttaaacagatggttggtcacatagacattaccagaggggtcttcttggacagaggctgaaaagaaagaagggacttagctcaccaccagactcctcagcactcacgggagaagagcactaaggacaaaggggcacttaacacgtgtaaaagggcaatggctcctaataaaggataagatctgttttctttttattttattttttgtttttgagatggagtctcactctgtcacccaggctggagtgcagtggcacagtctcagctcaatgcaacctccacctcccaggttcaagtgattcttctgcctcagcctctcaagtagctggaactggagatgtgtgccaccacgtgcagctaatttttgtatttttagtagtgacagggtttcaccatgctggccaggctggtctcaaactcctgacctcaagtgatcctcccgcctcggcctcccaaagtgctgggattacatgcatgagccaccacacccggccataagatctattttataatcaagagaagatgaaaaattcttcttgtgtcaggatattagggtagaatccgagttatttcgaaaattacagcttgagacaatgtaagacagattaaaatagagaatttctaagacagaaaatggattttttcttccctcccatgccctaagcatcgcttgggtctccctaggctcaaaagagagagtaaatctcattatatttatatattggaagaagcccacaggccatggttgtccaaagctagaagaagtattgtagaatttgatactatccttgagcacaagtatagtgggggaaatcttgaaactggggctgacagattttagctaactttcacaggcatgtgtagatattgacaaattcttaagtttcagagtgacctcatcctcccccaaaatttcttaaaccatgcctttacaaacaagtatttctattctaatgatgtcttcctgagtaaaatgttgaatcactcaaaggacacagatcaaaagacagagggagaaaaaaaaatgccatgtgggaggggcaaagctgtataaaaccagtcattaccatgtctgaactgtaacaactctcagaggagcattgcccgtcagacagcaactcagagaataaccagagaacaaccaggtatttcaatgatttccatgccatgtctatgggaaatagggtttcatgttttctcttccctcatgctggtattaatagattgaaaatttggatgtggggtgtttgtagagggcgagtaaaatttaagtggtgtt

SEQ ID NO: 19994 - DNA, 2300 bp, Homo sapien
tagtgctataaactttcctcctaacactgcttttcgctgcatcttagagactttggtatgttatgtctctgtgtctatttcaaagacgttgatttctgcggtaatttcattgtttaccaaaaagtcattcagtagcacgttgtttaatttccaagtaattctgtggttttgagaaatcttcttggcattgatttctatttttattgcactgtggtctgagagtatagttggtacaatttcagtttttaaaaatttgttgagacttgctttatggctgagcatgtaatcaatcttggagtatattccgcgtgcagatgagaagaatgtatattttgtggttgatggctggagtattctgtagatgtttattaataagttcaattggtcaagtttttctttgttagttttctccctcaatgatctgtctaatgctgtcaatggggtgttaaagtcccccactattgttgtgtgtctgtctaagtctttttgtaggttgaagagtacttgtcttatgaatctgagtgctccaatgttgggtgcatatacgtttagtatagttaagtcagttaagtcttcttgttgaattgaaccttttgccattatataatacccttctttgtcactttttacttttgttggcttaaagcctgttgtatctgatataagaatagcacccactgctctattttgttttcaatttgtgtgatagcccttcctccaaccacttagtttaagcctatgggtgttattacatgtgaaatgggtctcttaaagacagcacattaatgggtcttgttttttaatccaacttgccactctgtgctttttaaatatggtgtttagcccatttacattcaaggttaatattgatatgtgaggtgttgatcctattgcgaagttattagctggttgctttgtggtttctattgtgtggttgctttataaagtgtgtgtgctacgtacttaagtaacaggtatcattcttttgtttccatttttaaaacttccttaaggatttcttgtaaggctggtctagcagtaacagattcccttagcacttggttaaatcgtttaacttattcgagaaattattttgccataaaatcaaaatagatggaattaactatagaaacctagttttaaaaggcttttaaattaaaatattatggtattgcttgggtatggtatattggctttggtttagggtggacttggtagcataatatccatgcagtttcctcagttgtagtcttcatcaataatgtctgcagttgcctcagtggtccaagctgtgagtgtttgtgatggagtggtggtggtgcacatttgctgtggattggggcacctgtcattttcaggccaggtacatgcaggtgtggtaggctggccagctgtttggttgcttccattagagatgacatttagatgttgagtataatatcaaaaaagatgaggaaaactgagtactcttgttccagaagactagtttcagagggtctcaaatgagtgagaataaagacaaacagtcttaacttctcaatttctctacaagcattttccaattagttgtgcatgattccatgtttgcataaattaaaaatggtagttacagcccaaaccgtgaatatcgtaaatgagtaataaatatttacaagcacccattttgtgcaaaatccttagctaggtgctgttgggtgcacgaagcagcataaaaagaatattttgctctcaataagcttatgctggagttggaaaaactagatacaaacacatggaaacaaaactggtggtgtgaaaaatgtcaagagagtggcaaaaactatgttatgggactcagcttttaactgaccagcatccatttattctctaatgcacattagcactaaaatttgaggcaattcccgtaaattctctaaacttcagtgttttaatatataaaatactattattggactagaattttgctaaagtctattcagctcatatgacaatgtatatggatatgtatgcaactatgaatacatattttttcaaaggtgaagtggaaataaatattaatatgctctctaatttttgctttatttttcttaggtttcctcaatggactctctagcaacatcaatcaaccagtttgccctggagttgagcaaaaagctagctgaatctgctcagggtaaaaatatcttcttttcttcctggagcatctcaacttccttgaccatagtgtatttgggcgccaaaggtaccactgcagcccaaatggcccaggtgagtggaaaaggtcaactatcttctgtttc

SEQ ID NO: 19995 - DNA, 2300 bp, Homo sapien
ctcagaaaataaatacaattaatcctcgtgaatatcgacttgcagacaaattccttacctaggaaaacagaccagttctacttttcattgcattatttcaaaaattagatttgttcattcttggattcatctttgattcttcctgctccctcttcctctcatggtccaagaagtgatgccaaatttatgtcctggaaattcctcaaggccatgtcctcctctccatttctcctgcctctgtttcatttcagctttcctcatctctcatccatgctgcgtccttaacgcctcactgcaggcaatggtaccctcctacaatatactccatgttgcagccagagggaccttcgtaaatacaaatatgattatgtttctccccagcttaaaatccttttgtgtttccccatagtccacaagggaacgaagaaacaccaccaacagcgtccacatggccttcacgacatggccctgtggacacatcagacgttgtcttgcagtgcctcatccacactatctgtaccactgcaggcctggatacgtcatggttttcatggtgctatcttgtgcctctttgcacctgcacgcactgtgtttcctacatgggatatctgtgtttacaaccaaactcccaggggccaaattatatcctttgtaaaggacttcaaaccaccaggcatttgctggaagtttcacggaggaaaacaagcatttttcatcttttaatctgttttgctggtcaaagaggaaaaggagtggatggacaaagtggggcccaaagtctggatctagttctgaccaacaaggagaaattgatgcacaatggggaagtgaccttggcattttcaactggcagagccggtaagtttgggcacagttcaaatgtgagtctgtagccactagagagaggggtttcaaagtcatggagaaaagatgggggtgaatcctgcaccaagacttattgaggagagttcttgggaacagttacttttaggattccacagggaaatcactgagcgagttttacaaaatactgctgctgggttccctcctccaagagatctttacttaattggtttggggtgcagagtgggaatgtgcatctttaaaagcagaattcccaaactggagagctctgtgagagcttcctgcaggagacattatttgaactgaattttgaaagacaagcttgcatgccaggaaccccatgtatatgaacagaggatatgaaggaatgtaaataatttgctatggctctaaagaaaagaagggagaaatcaagacgtgaagaggcttacactccttgctcaatagtttctaatttatctttttggataagaggatgttataaaggattttaaactgaggtataaaataattagaattggaatgtttacctgaacttcagagtaggcaataggttggcatggatcagaactgtaggtaggaaaattaattgtttaggagagacatgagacatgatagaggtgacagagtatggacaggaggaacacaaaagtgatagaagtaacaggactgttgatcatttagttaaaagaactgcggagggacacacccaggtttctgagagatgtccagtagtacacaggtaacatctacggctcgagacaggttagagattttgaagaaataagttaaaagttgaaacatgaacctatggatatagtggaggtcatacaagaagatcatattataatgaaaagaagagggcttagaatggtaggaaaggaatcaggataccaagcaaaggagtcaggaaagaagggaagggtgctctggaaatcctgggaaggtcaaagaagaaagggctaaatgtcgccaacaaacaaaatgaaataagacctgggatgtattttttggccaaggcaattagaaaatgattagtatccttatcaggagcaatttcagagaatgtttgggtggacgtctaactacagtggagtcaaacgtgaatcaacggtgaaaaaaggacaatagccaatgtgtacactttttataaaaaccaccctccaaggaccaggcactggccctctctccggtgcccacagacatccacacaggcccaaagaatcagggattgcacaagccagagcaatcgaacggttctgagtcatctgccggaagccttgccctcaatcaaggcggacgtgaagcatctacaaaggaggaatagtcaaagcagcagcggcggcggcggcggcggcagcagcagcagcagcaggaggtgggggcctctgccaggtaccgggcggggcaggcacggaggtgcccaggttcccgcg

SEQ ID NO: 19996 - DNA, 2300 bp, Homo sapien
aagtgctcagtgtaactccacactagaacatgtgccttcccaagtcctgacaaccaagtcaatttcacaaaccgacaacatcatcctgtgttccgatgcccccagtgaccgctgttcatatcagtaatatttgaaatttatcctcacttgtcccataaacatacacaagcacaaagccctcagcagcaactggacaaaatgctttcatgagagaagcctaaaggtctgtcagttattctccctttgctatgctcattcagcattgcttcccatgatctagtgagctaagacatataaactgatactcaaggcctaaaaaacaataatagaacttagcattttaatctcctacctttccctagagtttcatagcaactttttggattcattataagtagacatttagaatgtcagcttccagcaatacgtactctgtggttacaagtcccctgttttatattgggaacataagtataaagggtaaaatataatggcattttaaataaagaactgaagagacatacccaaatgccagaaatgaccaaaatgctaaaaatcaggataggtgggtatattaggccattctttcattgccataaagaaatacctgagactgggtaacttataaagaaagagatttaactggctcatggttctgcaggctatataggaagtatagtagcttctgcttctagggagacctcaggaaacttagaatcatggcggagggcaaaggggaagcaggcttgtcttacatggtcagagcaggagaaagagagagagtggggagataccacacatattttaactaccagatctcacaagaactcacaatacagtatcaaggaaggacgttgctaagccatttatgaaaactctgaccccatgatccagtcacctcccattaggccccacctccaacattggagattgcatctgaacgtgagatttggttggggacacagatccaccccatatcagtgagccagtgatcaacttatgtttggcaggcaggacgagcatgctctgtagtggattagttctcatgattcctaacacctgaagcagctcttaattccttcttatttgattgttttttcttattgacataccttcttggtcacattctatttctagcttcctgaatcagaagatataaaacacaaacagaaacttaaaattgtagtatatacatttgtccacgtgtgtctgccattttccctgctccatgttgctactaatctcctctgtcctcatcaattcctgtctttctcaaatagtagtctctcagtcttcattcgtgtgtagatttcttgattccactgttgaactgaaagttcaaatgagtgtgggtagacaattattttttcctaagcagcctgaggatagcatttcttattcacagtctctcttgttactaatgaaaagcctcttaattatcttccttttgcggcacttctcgtcctggttgttttctcgttgtcttcagcactctccagtttcactaaactgggtctaaaatgtgtttgattttgatttcatattctgtccaagggctttgtttctttcatacatttcttaaaaatgcatgtctttatcttagtcattttcttgtagaatattatacttaccctactttctctcttctcagctcaggaactcctgccaaatgtgtttgaatttttaattctaacctccatggctgataaccagcattgtatgttttaagacaaatatacttaccctacaccaaggggagattcctaatttgttctttttgagttattgaccatgctgtgtttatctataactactcttttggtgttgcttagatactagagtcagtggtgatgttaattttagcctcaaaaaatgtagaatgatctgtggacatggacagggtcacagttacaggcacagaaagcactgtgaagttttcaaataggcaaatatttacatatgtatatggttatttaaaaatgtatttcttatgtcaatccatgacttgcgtatgtcacaatggaatctggtgtaggttttatttcttgacagaaagaaagattctatcctcatagtgttgagtcttttgcaaggacctatggatataggtggtacctacatgggaacacattgtctaataccacccagaatgggtagcaaagttcatagtgaagtttccactgtgagcggcaggtggcgggctcttctgagaaagaagcttctagatgcatattgtggggagcaggtatgggataaccacttggagtctccctcatcctccttggataataagtgggttt

SEQ ID NO: 19997 - DNA, 2300 bp, Homo sapien
aagactatagaatgtcccacccccaacacacacccacaggcaccttcccaccacattgtgaaaggcttatttggttcttttaccccatccatcatgttggctttcaacacaacaacaaaaagtcacaaggtgtactaaaaagcaaacaaacaaacaaacaaacaaaccctgaagctggaaaccatcattctcagcaaactaacataggaacagaaaactaaacaccacatgttctcactcataagtgggagatgaacaatgagaacacatggacacaaggaggggaacatcacacaccagggcgtgtcggggggttgggggctaggggagggataacatcaggagaaatacctaatgtcgatgactggttgatgggggcagcaaaccaccatagcatgtgtatacctatgtaacaaacctgcacattctgcacatgtatcccagaacttaaagtataataataataataataaaccatcctaaagagacagtgcaagcatcaggactagaatcccataaggcagggatgttggaattatgagattgtgaatttaaaacaattaggattaatatgctagagattctaatggaaaagtagacaacttgcaggaacagatggggacaattaaacagagagatggaaattccaaaaaaaaaaaaaaatcaagaaggaatgctagaaatcaaaaatgctgtaagagagagatggaaaagcctcttttttttcaaaacctcttcaggattaattgagttgcatcagttggggtggtagatgaagggatccgtagcaggcctgttaagcaaagtctggtccttctgaccaggacagaaagctccgcaccggagatcctccggtccctgcaccacctgctgtgtgccttcattaggctctgctacctggaaaactgatgggagggaggcattgagtacaagagctctgctcggtgaagcatttcagaactgctgcttgcacactgtccaggcattttacaccatcaattgtgcgagctcccacttattgccactaattgctgcagagagaacgatgctgaccacggcagagcagctactaaaccaaggaaggtaaggccaggagcgcttaatggcttattgggaccgtcgggaaattctgtgaagagaatcaatttccctgtatcagcctgctaacagcaaaaggcactcaggtttttaatagtaaataaaggcctcctgaggacgaatcgttaattcctaactgaaacttgccctttacagtaagttatttatcataagccacgctcatcctcacgcacacacttcttggctcacaaatgaatttccaaagctggacaccctataaggaatgtccgtgatttaaagatattctccattctttgcttattggtagtaaatgtccttatgagagtgttcacaaaacacccaagacaagactttgttctcttttgttgttgttggttattgttattctcttttaagtggacatttttatatgagttttaccacaaaaggaattcctgaaaatagaaatgaactttgtgatcactgacattgctctgtttgactggaatttctgggaaagagaaaagggttatgcatcaagctttatgttacttgttagtacaacatttccattcatctaatggcccttgatattttgcagtgagggactcttttgagaatcggctgaaagccccagaatctctcctgagaaaatgcacagaggcacacgcacacatggttgcgtgataaatcaccctggctgccatcgatggtttccccagaagttcaatgacttcagataaaggctccctgctctaaggcgtgaattgggtgctcgctttttcacaaatggtgtctttagtggatggctctttccataccatggtgagaaattcattcctgccactccccaagagattatggaaacattttacaaggcactcaactcatggattccttccaccagtggccatgaaggggagtatggttgatatattttgttagctgatgtagctatctgcactatgttcctttaacttctcagaacattcctgccacttcagttcaacagccatctgaagcccacctgtgagctggtccaggaaatgatggactctgatttccacacccctttcctgtgaacttgtctccaatttagtctgtcaaggtccctttcttgtgagttaatttctccctagtgctacttctcagattggccagtgactcacagagtggcacaagtacaaatccagcctgccttgcatccaacacagattccaggaccactgaaaccagctgag

SEQ ID NO: 19998 - DNA, 2300 bp, Homo sapien
tcctgtaatttagactcagtttttagatgttttactaattatgacagctacatgctatctttagctaataccttaaggcacaatatacacttagggcaaatttcgtcttcactgaaaatggaaacatagccatatttcaaatagtcttctcgttaatttagatgtttgaggtctattccttgtcagatctggttaaattatcattatgtcctgttgcaacatgagtgacaaaatacttatactagaaatagaagtatcagttctgccatttcttttgtttccttgtgcttatttatattgccttctaattttactagaatgtgttaacattttatttttcgattttttttaaagcttgataaataatctgtaaattcatttatgtgtttccctaacctgaaacataacacactacgtggctaacacaggagcaagcagtggtgctgctgcccatctcccaggtttgaggagctccacacttcctattcattgtctgggaacataggagcagggcagagggccggtgtcaagacctacattagatattaataaagctgatattctttttctattttgtttctgaaaacaggataagtataaagggaaaacaaaatctaaaatgttccttctccgtgtggatcatctccctgggttgtgtgtatccctagattctgtaggaaaacaacgcatgagtcattttcatggccaagcctcataaagcaccttgtctgcacattacaaatacctccattccctgccaatatcttgataggacttcctaatgggacatgctttgcccaccccactctcccgcctcaccttctgctgaagctcacacttgaaaatcactgaatgggaggctggtggcaaaaatccaggaggcaaataaaagaatgaaagcattgaaaagagggtagaataagaggaatgtatatggcagcctaatggacttagcctggcaactgatcccatatgtggaataaagggggaaaatgttgaagtttcacaaccaggtgcctagaaaattggggtgggatggtaacccagacagaaagagaggaaattaagtaggagtgatttaggaaaatcaattcattttttgacaccaagccttatacctggaggttcacctgagtgtttgtttggggaagtgaaaccggaatttggtgggtggctaggcctgcagataaatattttaggattggttgacagatttgcaataatggaggcatacgataaccaaaataaatgatgtagacatggaagaaaataatgaaaacaaggaaaaataagacctatagggaattatatttaaaggttgaaagaaggatgataatacacagagttattttttttttaatcaggaagatagaatgtcatcaaggcaaaacaaggagagttcccatgacagggtactcattaatgtgcaatgtagaagggaagttgcaaaagggtgggaactaatgatccgttatatttggtaagtttaatattattgctttacttatttttcttctttgagagaaaaagaaattcccagatagctgtatgactttcaaggtaataagcaggaacggaaagagcagatgcaggtttctctttaaagcagtttggtggtgataggaagaaaggaaaggcagacaggtttgattttcagttgataacagatgcaacaggatgaggcttcagtcagattttagggttaagaaagaccttgcaggatacataaattaaagacacaaaaaatgtagaaagtattattgatagagcactgatatcctctacatacgtgtcaaatctgcattcatattttcacatgagattccgtctgagaaggaaaaatactgctaatactcagaattttaacacaccttaagggctttacaatgacgacagctttatgtttacattcgacttcatctttaagtgctagaaatagtagacaagctgaggaagtggtttcttcaagttccagggaaagcaagcaggtctttagttccttgtcacttatctactcctcctttgtctggtaatcagcagcatgcatcaaggcaagcatgtagccaccctctggggccttgagacctaggttaggcaagggatgccccgcaggcctggactgatccaccaggagaacttcagtgcatcatgggtcctgctattgctcatcctcttccctggaaatgtgcggtttcacaggatggtaaacatctttccctggaacagagccttgaggatggtaagcatctttccctggaacagagccttgagtggcatggtttattcctcgcaaaatcggt

SEQ ID NO: 19999 - DNA, 2300 bp, Homo sapien
taattggcagtgccttgggattcatctactacagtttttttatgttgttgttgttgcgtttctcagaaaactgggtcttctaatcaaaccagaaattgtgagaaaaagaaagaagaggagaaaggacctaataaaacatgtgttgaccctaaacttgacaacagcttaagcctggtgaactcttacttgctgttcttgatgctgggcttcctcctaagataaaatataaacatctttcagggcctggaagacctggaaagatctattccatatctattactacaacataatccatctccattctcctcccttcctgcagtacatacatccaaccccttcctgccgcagacattccccttgtttattctgcctagatcattcttccctcagagctgcacaacgctgactcattgtcatcattacatttcagcctatgtgccatcacctcagaaagagaccatcccttaggtaaaaggtgtcccttggtttctgtctgtattattcccagttcttacccttgctctaggttgtgtcttttggacaagaagaatctagacctccctctaagatcaacagctgttagtgtgggaaccagggctagaattttggttaactgaaattacttcacctgttttggattctgtagaggttactgaggaaattttttaaaaggaaggcacatagaatggtttaagaagaaagcgtgcatttggaatcaacatttatgtggagtcataagaagagaaaaaatatgaaaacttgaggaaaaatatctttttcttaaagggcctcaaaacattttcattttctatgcaatgtcttttgaccaaaacaagccggtagatgaaaacagtgcagtttctgattcccaatcacaatatgacctcctatagatgaacaacccaggcaatccaagagcagtttaaaaatagcttggtatggtcagatttgtgataaatgctagatgggatacaaacacttctttattcaaaaaatgcttactatgggccgaacatgtgctgtgtcttgatgatattgaatattaatcacagccctcctgaagcttttagttcagaacagttataagaaaaaatctcatcccagaagtcagttcgtaggcaaaacaaggcaaatatatgtaatgttaccagaaaaatctgaattgaatctaaagattgtactacatgagccagaataattgagcattttaacacagaaaagtatttcaaagagctcaaagatgaagccaaggtttgatacctggctaccaggtgaatgatagtgcccctgacagaaaagaacatacagggaaaatccaagctaatatctaaaaaaagatacggaggtcttttctaagcatcttgaatttgggtgatggctgacagctgagtggaaatggaccatgaaatggtcatccaagcagccctggatctggggagctttggggttggagttagaacttttaaaatgcattaatgttaggtaagcaacataggatggtatctggaacttaacaggagtccataattgctgtcagaattattagcatagaattcggttttaaacattgactaaattgaatgggcgaggtgggggaggcatggcgccagttaaatagccaggagaggctggactggggacagaaaagtgtgcttgactgcacaagaaatcagagataatggtacggacaagcctaagcccatgtaactggtatccgaagaattactgctaaggttaagtaagaataagtgcgtaagagaaagaggacactttccattggtagagtgagaaaaatgaaaggaaggtagttggaaatgatctcttccccctcctaacccctatgacagaacacccagtcatcagattaaagcgagcaccagagcaggggaaaacaaagcgtgctcaactccaggggctgcaccgcgctctaaagaaaagaccagatcctcttccttccttctttccttccttccacaccttgcaagggtcctctgtcccgcactgcgagtaaatcatacactttggaagtttagcattagagagcccagcaggggagaaaattgtctgcaagttaaaaaaaaaaaaaaaaaaaaagtagaactagggcagtccgaggagattgaaagggcaaaactatcaagcaagaaaactgtaagttctgattagttttatgactttgccttcatgcctcaggagctcaactgatcacggctttcacgacaggctaaggtgggtgttggaggggcagcttgaaaataccctcaaaactctcctccagctccgtgctttcagatgcaaat

SEQ ID NO: 20000 - DNA, 2300 bp, Homo sapien
gctgactcattgtcatcattacatttcagcctatgtgccatcacctcagaaagagaccatcccttaggtaaaaggtgtcccttggtttctgtctgtattattcccagttcttacccttgctctaggttgtgtcttttggacaagaagaatctagacctccctctaagatcaacagctgttagtgtgggaaccagggctagaattttggttaactgaaattacttcacctgttttggattctgtagaggttactgaggaaattttttaaaaggaaggcacatagaatggtttaagaagaaagcgtgcatttggaatcaacatttatgtggagtcataagaagagaaaaaatatgaaaacttgaggaaaaatatctttttcttaaagggcctcaaaacattttcattttctatgcaatgtcttttgaccaaaacaagccggtagatgaaaacagtgcagtttctgattcccaatcacaatatgacctcctatagatgaacaacccaggcaatccaagagcagtttaaaaatagcttggtatggtcagatttgtgataaatgctagatgggatacaaacacttctttattcaaaaaatgcttactatgggccgaacatgtgctgtgtcttgatgatattgaatattaatcacagccctcctgaagcttttagttcagaacagttataagaaaaaatctcatcccagaagtcagttcgtaggcaaaacaaggcaaatatatgtaatgttaccagaaaaatctgaattgaatctaaagattgtactacatgagccagaataattgagcattttaacacagaaaagtatttcaaagagctcaaagatgaagccaaggtttgatacctggctaccaggtgaatgatagtgcccctgacagaaaagaacatacagggaaaatccaagctaatatctaaaaaaagatacggaggtcttttctaagcatcttgaatttgggtgatggctgacagctgagtggaaatggaccatgaaatggtcatccaagcagccctggatctggggagctttggggttggagttagaacttttaaaatgcattaatgttaggtaagcaacataggatggtatctggaacttaacaggagtccataattgctgtcagaattattagcatagaattcggttttaaacattgactaaattgaatgggcgaggtgggggaggcatggcgccagttaaatagccaggagaggctggactggggacagaaaagtgtgcttgactgcacaagaaatcagagataatggtacggacaagcctaagcccatgtaactggtatccgaagaattactgctaaggttaagtaagaataagtgcgtaagagaaagaggacactttccattggtagagtgagaaaaatgaaaggaaggtagttggaaatgatctcttccccctcctaacccctatgacagaacacccagtcatcagattaaagcgagcaccagagcaggggaaaacaaagcgtgctcaactccaggggctgcaccgcgctctaaagaaaagaccagatcctcttccttccttctttccttccttccacaccttgcaagggtcctctgtcccgcactgcgagtaaatcatacactttggaagtttagcattagagagcccagcaggggagaaaattgtctgcaagttaaaaaaaaaaaaaaaaaaaaagtagaactagggcagtccgaggagattgaaagggcaaaactatcaagcaagaaaactgtaagttctgattagttttatgactttgccttcatgcctcaggagctcaactgatcacggctttcacgacaggctaaggtgggtgttggaggggcagcttgaaaataccctcaaaactctcctccagctccgtgctttcagatgcaaatgcctcacggagagatggatgggctgcagcccctcctactttcacccctcttctttattttcctgcgaaggaatccatctgtacagatccgccaggcgggaggtggaggagggtgcgcgagggtgcgcgcgtgtgtgtgtgcgcgcgtggcggccgagcggctccgtcttcgcgttcttttccagtagcccccaccgggtctctgggaggcgccgaagtctcagtggctccctgggccggcctccgacagcgctgacagcaggcgcccgccgcccaccatcgtcgccctcttcccctccctcttcggccccggctccggcgcgctctctcctcctctcctgcgcgccctctcgccctctctctggccgcgcgctcccgctggctccggaccctgcgtctcag

SEQ ID NO: 20001 - DNA, 2300 bp, Homo sapien
tttactatgtattacccccccatatatgaaaaattagtcagatatatttctcttgttataaagaaaatgacgtagaagtaatcattaagctgggccgggtacggtggctcaagcctgtaatcccagcactttgggaggccaaggcgggcggatcacgagtcaggagatcgagaccatcctggctaacatggtgaaaccccgtctctactaaaaatacaaaaaaattagcagggcgtggtggcgggcgcctgtagtcccagctactcgggaggctgaggcaggagaatggcgtgaacccgggaggtggagcttgcagtgagccgagattgcgccactgcactccagcctgggcgacagagagagattccatctcaaaaaaaaaaaaaaaaaaaaagaagtaatcactaagcttatctgatgaccagtcccctaagtacttccaagtcttcattcttggttgtggcatagcggatgaatcttgctggatccttggctatcggctgttcatcttatatcctcttccagaaagggcatgcatttcttaagcaatttacagcaactagttcctgtacgtgtttgataatagattatctatttaataaaatcagtttgctgttaatgatattctacataaaacatgtagtttcacactgtaccttctttagaaaatttaatcctgtctcactgtggtttctatagttgccattgctctttattggtactgtaataatcagggcagcaaattgtgacccacctttgctcccttaggctctaaaataagcctttgggacatcatgtttacaggtacactgaggctctaaactgtggtttcaatcctaagtgcaactggatattttataaacatcaagatataaattggcatctcataaaatgttagattcttacagaaatcctagactaggtcatagacagaacagtgaattatgtaaataaatattttaaacaggtatctccaccttttttgatactgtaaaaaatatgaagggggaaatgtataagaatacttcagaggttctttgtaaaatttattttttccctatttactaacatcttgaaacacttagaagtgtttttttctagctgaatgcttttttctacctgaaaaaataaaatatttccacattatactgttcctgctatccacagatctattctcccaggttcatctcttcaagatttgttcataaattattgattcctcctaatattcacaacctcataggatgtgcatttgtgcgtgtgtgtgcatatgtatgtgtgtgcacatgtatgtgtatgcatgtgtgcacatgtgcatgtgtgtatatgtgtgtgcttgagtgtcctactttactgcccatatagcttttgccatttctttcctcaaaagctaagaggatagtgaccaaaatatctatcagaattaacaggatgcttgaataatcctgccccacatagactttcttattatataggtataatttaagaaacttttaatattttaatgtttctctagtttggttcaaaaatggtttttaagtaaataacagcttgagtaaacagcatagaaaatacatatgtattttatgttaaataataatagcttatatcaaaatctaattataaccatgaataaaataaaagattttacataataataaaccaaggaaaagaaaaggacttattaaagtttagacatttctctctcattatgtctttacttgatttctgaggagaaatgaccgaattaagaaacagccatgaggcatagacacacagtggaaaatcatttctcttttcagtaagttttgggtctgctttaaattgatcatttgtttcatcagctaatccccaaacagagggcacgtccgctctacttgcaaaattcttgtatgtaagttgaattctccctttatcaactcaggccaataagtactttattttgtttttgcttgttgttaggggaaaaaaaaaaaaaacaaagataatcagctcatactacttgcgtagctgtctgcattttaattccagactatgaacgagcgtcagagtgcccttatgatattttgcacaaaaggctcagtgtttatgactctactcagagaacccaaaatagcattgagtaagcagtgacatactgacagtgttgtggtactaaaagcacaagcgtctgtaactctgggcaatggggcacatcgagagtttgctgagaagactgtgaagcaaaaagaagaaagtttttcctactcttccttatgtgtccaacacgaagtttgctgttcagttttcacagaacttct

SEQ ID NO: 20002 - DNA, 2300 bp, Homo sapien
attcttaaaaaggatttgtctaactccaggtggcaaacatttactataatataatattttacagttttatgcttttagttcatatgtttagatataagatccatttgaattaagttttgtggaacttttgagattgagacccaacttcattctttagcaaaagttaatccatttgttcagcatcatttgttgaaaaacctattcttaccccattgaattgtttttgttgccttttagaaaattaattgaatgtaaatttgagggattttttaatggatcctctattctatcccattgatttcaatatgtcattatgtcagtactactctgtctccatttttgtaaagtttgaattccagaaatgtaatgcctccaaatttattcttcattttttaagattgtttgggcctattaaattttcttttgaatttaaaatcattttctcaatttaggcaaagaagccatctgatattttaatagggattttaccgtttctataaatcaatgtgccgagtattgtcgtcttaaaaatggtatgtcttccaaatcatgaacataaaatatctttagatttatttaggcctgctttaatttttaacatatatgtatagcttttagagtataaattttatgtgttaaaatataaataatttttatttttatggcattctatggaaaacgatgtcttaattttactttttaattgtttcttgttagtatatacatatacagttgattttttatatagattttgtaccctgaaagcctgatgaaccactagaagaaattgaaggtgatgtgacatatattagtaatattttaataataatacgattaattttactcataattattgttttcatgtggattcaaattattgtatgcgatcacttgttttcagactaaaaagtttctttagacttccttatacaatgtaacagattctctgaacttttgtcaattatctgttaatttttttcaattttgtctcaattattggaggtcagtatttcatgattttttttaatagtattactggatataatattcttgcttggctgctttttaattttattttttctgtccatactttgaatatctcactacctcttatctctattatttttggtaagaaagcacatgctattcttatcggggttcctttgtcattggtgagtcatggctgttttgtgctttcaagattttggctttattaactttcagtgtttttactatagtgtgccatgggtgaatttctttgctagtggaattcttaagagtttcttgttggtatatatccatgttatttattttttccaattggggatttttcagtctttattgcttcaagtatttttcagccaaattattgtctcctcttcctttgatactcccatttacatacgttgttttgcgttgtgggagcaccacatttctctgaggctctgtccatttctttttatttattttttctctctgtttttgagattgcataatcttgattcttctctttttaagtttatggattcttatttcttacagcccacatctactcttgaggaacgctaataaatactttattcaatttttgtagatcttaagtccagagtttccatttggttcttttttaaacaaacaattgctctctctttaatgatattcactatttggtgagacattgtcattgtaccttcctttactttttaagattcattgtcattacttctttgaatatatttttaatggctgtcttgaaatctttgtgtgtctgctaattctaccatgcagtccctctcactgtcagtttctgtcacctgttttgcctgtcttcccttcccaggtacttttcacacttccttatttttatgcatgttccttgattttgtgttaaaaactggaccatctagataatatttggtagcaactcttcacaccaatcttccacgctctctctctctctctctctttttcttgtttacttagttactaggttggactatttagtgaaagttatttccctacaacaggaagagtctgatgtcactcatagcacaactcctcctggctgtgtatttccttgaactctctattaacctgtctgggccgggcgcggtggctcacgcctgtaatcccagctctcagggaggctaagaggcgggaggatagcttgagcccaggagttcgagacctgcctgggcaatatagcgagaccccgttctccagaaaaaggaaaaaaacaaaaaacaaaaaaaaaaaaagacaaaaaaaaaataagcgtaacttccctctattaacctgtc

SEQ ID NO: 20003 - DNA, 2300 bp, Homo sapien
tcgacaccggggtccgagctccctctggcggctccacctgaggacagggactcggccacaggtgagcgccgagcgcggagctcccgcccctcggcttggcgcctggtcacgattcgcggttaccccgccgagaaaagtgactggtccgagtagttctcattaggaagataccttctgatcccatgaactctaaaccttcccccggaattaaaaaaaaaaaaaaaaaaaaagatcttttcaactttcagttttttgtccctcggtccttgggaacaagaaataacaaggatagcaggactcatctttgtgtaaactgcatttgaatacaaacattttttaagtgactgaagccacgttagtggcgttaaactatagatattgtcgggagagttctatcttgtatattttgtattgttagttgcttgtcttctgctgacggtcactggtttccaaataagtgcgtgtaaatggataagaaaaaaatcacttgccctagcttaggttgcagataatatgagattttactgtgattctaaaatttctattaagtgattgcagaatgtttaagtcatcagtttatattcattctcagcatacctgaagcctcagagaatttttattttgtcccccatccccagaaaagtgtcatgaaaaaagagcagaagagagacctcactgttgctgaaaggggaattttctttccccgttggcggttacttcatgatcggacgagaagtatctaggtgactgaagatattccatttttatgtttgtacacatgaagctgataaaagaagatgtgaacatgatttctctttgtcataataggctgatgagtaagtaagcctgaaaaatatttgaaatgaaggcaagaattttgaatttttaaaaaccaactaagactttgatcacttgttgaggatgtttctctctcataaatgaaagaaaaacgtattcacaagacaagaagtataaaaagttgagaggaatgacaactgagtccactcactcgaagaatgtcagtacttcatcatcttctttgggcaaacatacacaaatgcatcatacatgtgtggtgagcttatcaccagtgatggttttctgtgctagaaatgactcttaatttgaattttggagtgctttttctctttttttacaatgtgtgttccaactctttgtgttaaatagatttaagtaaaggaggtaaatgctaaattcatagtgttttttacctgtatcacttccctgtgtattatggaaaaattagagattttaacgttattcaaagttttactggaagcaaaactgtgccagggacagagatatacaatttaagttttctctttttggcaactgcacttgcttaaaatgtactgaatgtcagctggatttcacagcatatcagatttacagtctttgtcttatcaaggcctttactgtatgttttatactaaccagatgggaaacacattgagcatcatatctgacatgtatgcctaagggaggagctcccccatggatcatggcgttaatgtttacaggacatttactattcttagcattattgatgtttgctttctctacttttgaggaatctgtgagcaattattccgaatgggcagttttcacagatgatatagatcagtttaaaacacagaaagtgcaagatttcagacccaaccaaaagctgaagaaaagtatgcttcatccaagtttatattttgatgctggagaaatccaagcaatgagacaaaagtctcgtgcaagccatttgcatctttttagagctatcagaagtgcagtgacagttatgctgtccaacccaacatactacctacctccaccaaagcatgctgattttgctgccaagtggaatgaaatttatggtaacaatctgcctcctttagcattgtactgtttgttatgcccagaagacaaagttgcctttgaatttgtcttggaatatatggacaggatggttggctacaaagactggctagtagagaatgcaccaggagatgaggttccaattggccattccttaacaggttttgccactgcctttgactttttatataacttattagataatcatcgaagacaaaaatacctggaaaaaatatgggttattactgaggaaatgtacgagtattccaaggtccgctcatggggcaaacagcttctccataaccaccaagccactaatatgatagcattactcacaggggccttggtgactggagtagataaaggatctaaagcaaatatatggaaacaggctgtagtggatgtcatggaaa

SEQ ID NO: 20004 - DNA, 2300 bp, Homo sapien
tttggttgggtctgaaatcttgcactttctgtgttttaaactgatctatatcatctgtgaaaactgcccattcggaataattgctcacagattcctcaaaagtagagaaagcaaacatcaataatgctaagaatagtaaatgtcctgtaaacattaacgccatgatccatgggggagctcctcccttaggcatacatgtcagatatgatgctcaatgtgtttcccatctggttagtataaaacatacagtaaaggccttgataagacaaagactgtaaatctgatatgctgtgaaatccagctgacattcagtacattttaagcaagtgcagttgccaaaaagagaaaacttaaattgtatatctctgtccctggcacagttttgcttccagtaaaactttgaataacgttaaaatctctaatttttccataatacacagggaagtgatacaggtaaaaaacactatgaatttagcatttacctcctttacttaaatctatttaacacaaagagttggaacacacattgtaaaaaaagagaaaaagcactccaaaattcaaattaagagtcatttctagcacagaaaaccatcactggtgataagctcaccacacatgtatgatgcatttgtgtatgtttgcccaaagaagatgatgaagtactgacattcttcgagtgagtggactcagttgtcattcctctcaactttttatacttcttgtcttgtgaatacgtttttctttcatttatgagagagaaacatcctcaacaagtgatcaaagtcttagttggtttttaaaaattcaaaattcttgccttcatttcaaatatttttcaggcttacttactcatcagcctattatgacaaagagaaatcatgttcacatcttcttttatcagcttcatgtgtacaaacataaaaatggaatatcttcagtcacctagatacttctcgtccgatcatgaagtaaccgccaacggggaaagaaaattcccctttcagcaacagtgaggtctctcttctgctcttttttcatgacacttttctggggatgggggacaaaataaaaattctctgaggcttcaggtatgctgagaatgaatataaactgatgacttaaacattctgcaatcacttaatagaaattttagaatcacagtaaaatctcatattatctgcaacctaagctagggcaagtgatttttttcttatccatttacacgcacttatttggaaaccagtgaccgtcagcagaagacaagcaactaacaatacaaaatatacaagatagaactctcccgacaatatctatagtttaacgccactaacgtggcttcagtcacttaaaaaatgtttgtattcaaatgcagtttacacaaagatgagtcctgctatccttgttatttcttgttcccaaggaccgagggacaaaaaactgaaagttgaaaagatctttttttttttttttttttttaattccgggggaaggtttagagttcatgggatcagaaggtatcttcctaatgagaactactcggaccagtcacttttctcggcggggtaaccgcgaatcgtgaccaggcgccaagccgaggggcgggagctccgcgctcggcgctcacctgtggccgagtccctgtcctcaggtggagccgccagagggagctcggaccccggtgtcgaaagacgcctctccgtgcccgtccgcggctggaagaacctaagcaagtttcagtcttggacaagtctcccctctgtaggaaacattcaggctaggagtttcctgatccgccccgcctgttgcattttttcactggcgtcctccgaccctgccgcccccattctccgctccccgctctggggctgagtgaggcaggatggcgagagacccctgagccaccaagtccgcttacctcaggcagatcccgacgggggctcggcgccgcactgggccccaagggagacggaggtggagagttccagaaaactgctctgcacggcgggccaggctcccgcggggctccgcaagacccccgcgtcgtctcccgcgctacggcaggcgctgccccagctcggtctcctcagccgcgctcggtccccgcgacccgcacggcccggacacgcccgccctcaggaaacgccggacgcttgtgggggcaaccacggaccgcaggacagagacccgcgggcggcgggttctctcggtggcgccgtatccagagcagcgcccgcgtgcccaggcggtgatgtcgccgcggccgaggatcctctgtgccagctccggccgcgcagcccggg

SEQ ID NO: 20005 - DNA, 2300 bp, Homo sapien
ggtatttcggttttgcttttccaaaggacagcaagctcagccaggctgcctctcagttccaagggagtgctcattccctccttccccagcccttgctctttccaaaaggatgatttctgtcgtcccagggcttatcccctcccactccagctcctcccatcatttgagtcaatcccacagcccccactatggctctattatatagttgtcgtcttcccataaccaaaaggttttaacgccagcctggcagcgtctttagactctcgcactcccaaactgtcccctcctccagctcgactcctccgggagcgcgcggccaccgctgcaagcccagaacacaaacgcctagagcttcctccgcttagaaacccggggcgcttggccccgcctcacctgctttcggccccgccccgcccgccgccggcctgctcacggctcctcccgtcctccccgaagccccgcctctgaccccgccctgtcctgtctccgtcccgccccacgcccgccagccagcgtcgctgtctctcgccttccctgaggccccgccttcagccccgccttcaaccccgccccgtcctgcctccgccccgcccccgcttgccggcccgcgtcgccgtctcaccctccccgggctgcgcggccggagctggcacagaggatcctcggccgcggcgacatcaccgcctgggcacgcgggcgctgctctggatacggcgccaccgagagaacccgccgcccgcgggtctctgtcctgcggtccgtggttgcccccacaagcgtccggcgtttcctgagggcgggcgtgtccgggccgtgcgggtcgcggggaccgagcgcggctgaggagaccgagctggggcagcgcctgccgtagcgcgggagacgacgcgggggtcttgcggagccccgcgggagcctggcccgccgtgcagagcagttttctggaactctccacctccgtctcccttggggcccagtgcggcgccgagcccccgtcgggatctgcctgaggtaagcggacttggtggctcaggggtctctcgccatcctgcctcactcagccccagagcggggagcggagaatgggggcggcagggtcggaggacgccagtgaaaaaatgcaacaggcggggcggatcaggaaactcctagcctgaatgtttcctacagaggggagacttgtccaagactgaaacttgcttaggttcttccagccgcggacgggcacggagaggcgtctttcgacaccggggtccgagctccctctggcggctccacctgaggacagggactcggccacaggtgagcgccgagcgcggagctcccgcccctcggcttggcgcctggtcacgattcgcggttaccccgccgagaaaagtgactggtccgagtagttctcattaggaagataccttctgatcccatgaactctaaaccttcccccggaattaaaaaaaaaaaaaaaaaaaaagatcttttcaactttcagttttttgtccctcggtccttgggaacaagaaataacaaggatagcaggactcatctttgtgtaaactgcatttgaatacaaacattttttaagtgactgaagccacgttagtggcgttaaactatagatattgtcgggagagttctatcttgtatattttgtattgttagttgcttgtcttctgctgacggtcactggtttccaaataagtgcgtgtaaatggataagaaaaaaatcacttgccctagcttaggttgcagataatatgagattttactgtgattctaaaatttctattaagtgattgcagaatgtttaagtcatcagtttatattcattctcagcatacctgaagcctcagagaatttttattttgtcccccatccccagaaaagtgtcatgaaaaaagagcagaagagagacctcactgttgctgaaaggggaattttctttccccgttggcggttacttcatgatcggacgagaagtatctaggtgactgaagatattccatttttatgtttgtacacatgaagctgataaaagaagatgtgaacatgatttctctttgtcataataggctgatgagtaagtaagcctgaaaaatatttgaaatgaaggcaagaattttgaatttttaaaaaccaactaagactttgatcacttgttgaggatgtttctctctcataaatgaaagaaaaacgtattcacaagacaagaagtataaaaagttgagaggaatgacaactgagtccactcactcgaagaatgtcagtacttcatcatcttctttgggcaaacatacacaaat

SEQ ID NO: 20006 - DNA, 2300 bp, Homo sapien
cctaccaccctttctgccaatgatttgaattgttcagttgtggctcttgttttattttaatgcattcacattttaccactatgcaaagatgtctgttcaaaatgaattagtctgaaagcccatctgagaatgctgggaggctagctgcatccccactgcttcagcacagatgcatggggcagagctgaaaggccacaatgtcggtacctgaattcattcttctctaaagtgaaaatgatcatactgatatttcaaaatctgaaaacaacattggaagaatatttgcctggcagatgttcgcgcattaattctctctgactcaccttgccctcgcatcatgagacactttgaatccatagaaataaccctgccccacactttgttctgagaaatgttctgtacatctagtagctgtgtttactaaccctaaattctaggctcccctctgcaaacagataggaatctctggagtcagctccccgtttcccccaactctactctctcataaatgtggttggaggccatgggtcctcttcctctatcaggggccatgtagaggcacaatccagattttacaggaagttgtgtcagaagaggatccttgtttgggaataaacctcagtggaggagacgaggctctgtatcagcccaattgttcgaggttcaactcatttcaaaagcagatatagtacttacaaaggggacttgagtgctactcatgacttgaaggagttttgaatagggtacaggagtcaaccagttgaaatagaaagcagaaaataaacaacctaaacggccgaatataggtacaaatgatatagttctggagtaatacattctggctagggaaacttaggagttatttacagaagaatgtaagcatctgagttgagacctggatgatcagataatttcaacagtcagaagaattttaactagtaagtggggtggttgggtaaaggacactgtgagggaaagaatggaataagcatagttactgaagcacccaagcaaaagcaagtgtggctatttggactgggctaggggttactacggggccaaaacagaagagtgatgaggagttagaggccacatttcacctcaaagttaaatgatttgaaatttattctgctagcagtcgtctactgtttgattttcagcagcaaatgatctaagcaagacatttatttttaaaatgttaaaatatatcttattaaatattaccaaaatagtatgggaaatgaagagactgaatgtgttactaatccccaactgagaatggaattgttcatttgtgaagcttgatatttccctgtatttttattactactaagctattattttttacatttgaggtcagagcttgggttggtttatgccaaagtgtcatctcagctatctgtgagaagctccatgtgtggagtgcaacaggagtcccagcctgctctaggatttccacgacctggcactgcactcacatgtcgtagtagccggggcacactgccttctcctgtctgcatgtaggtctttaccgaataccaggtcccatttttaaataagaggctccttctacttgtttgtcccatgcttcccctatttatactgcctgagaaattgttttccatcagtaaagctgattagtcttttctgttttcccttgatctttgttagcatctgggctacagaagttgtcctcctatattaatctgggtatttcggttttgcttttccaaaggacagcaagctcagccaggctgcctctcagttccaagggagtgctcattccctccttccccagcccttgctctttccaaaaggatgatttctgtcgtcccagggcttatcccctcccactccagctcctcccatcatttgagtcaatcccacagcccccactatggctctattatatagttgtcgtcttcccataaccaaaaggttttaacgccagcctggcagcgtctttagactctcgcactcccaaactgtcccctcctccagctcgactcctccgggagcgcgcggccaccgctgcaagcccagaacacaaacgcctagagcttcctccgcttagaaacccggggcgcttggccccgcctcacctgctttcggccccgccccgcccgccgccggcctgctcacggctcctcccgtcctccccgaagccccgcctctgaccccgccctgtcctgtctccgtcccgccccacgcccgccagccagcgtcgctgtctctcgccttccctgaggccccgccttcagccccgccttcaaccccgccccgtcctgcctccgccccgc

SEQ ID NO: 20007 - DNA, 2300 bp, Homo sapien
ttgtatactattggtggaaatagtatacaaatgtgcacaaacaaataagtttgtgcagtcattatggaaaacagtatagagatttcccaacaaactaaaaatagaattatcatataatccagaaattccactaatgagtattaatgcaaaagacttgaagtgagtttgctgaagggatagctgcaatcctatgtttattgcagcactatttacaatagcctcaacctcagttgaatagaactatttacaatatttaatttttaatatttaccctatttataatagtatcaatctcagtgcccattaacagatgaatggataaaaaaatgtagtgcatatacacaatggagtactctgcagcctttaaaaagaaggaaattttgacatttgtgacaacatagatggaattggagacattacgctgggacataagtcaggctcagaaagacaaaataccgcatgttctcacttatgtatggaacatgaaacaataacttatacaagcagagagtagaatgttggtgacagaagctgggggatgggagaaatggggatgtgatggtcaaagggtataacatttcaaacaggaagaatatgttttttctttttatgagttctatagcacagcatggtgaatagagttaatagagtattgcacatttcaaaattgctaagtacatttcagatgttctcaccacaaaaaatgttaagtatttcaggtgatggctatggttaactagcttgatttaattatttcacattgcattcatagattataatatcattttttaatccataattttttttagccagagtactccttcttcacagaacccataaatctatacaattacaaattgtccatttacaataaaaaacacagacgacaaaagaataaaacaatgtttggtgtacttatagaagctacctggtagaaaagataaacaaagaggaaaatatattaaagttattaaacagatttggatttcaaattatccccaggtaattgtttcccatttggcaagtgttacagatcattacatcagtttttctagttcatacctgcacacacacaacagtgcagtaaatatccctgttaaatatattctaaatatattccacaagttaaatttaaatataaattgccctggtatcttacgattgagtgctggaaggttgacaaagtgtttggtggcatatcatatacagctctaaaagttccaacatttaaacaagttagacagaagggatgttattgagctctgataaactaagttcgatgacataaaaggtgcctctggcattgactgctaggttgattttgaagatacatgtgaagggcttaaatacatatttataaaaatacaagagaagaaagaagtcatgtttctatatatatgctattttaaaatgatattatatttaatttaaatattcaaatattttaaataattatatatgctatttaaaaatgtgtacatgaagtaattaagctgatatttaatttcaatatttaaatacattaaaataatttatatatgctatttttaaaatatgtgcatgaagtaatataagtagatatttgatgagtcatgtacatatctcaaatttattataatataggatgctgaatggcttgtaaatctcaaagaaaaatgggatattgcatttaatttggggtttgccttatattagagcaaatacacatatatgtttgtgtagtaggttcatcattatgcatattgtcaaacatctatattttctatatctacatatttgacaaggcctacgttacataataccatttttatttacttacattctccatgcttctgtttcctcatgtggaaaaattgaagtaataagcataaaaatatgaagattagagtggtggtttctcgctcctggtaaatgcattatgcaaatgtttgttgcattttgtattttccattctaaactatctctgaaaaaagcctcaatttggggacttaatattctaacttcaattactcttttttttttctgagacggagtctcgctctgtcgcccaggctggagtgcagtggcgccatctcggctcactgcaggctccgcctcccgggttcacgctcctgcctcagcctcccgagtagctggaactacaggcgcccgccaccacgcccagctaatttttgtattttcagtagagacaggatttcattgtgttagccgggatggtctcgatctcctgacctcgtgatccacccgcctcggcctcccaaagtgctgggattacaggcgtgagccaccacaccccgcca

SEQ ID NO: 20008 - DNA, 2300 bp, Homo sapien
tcttaatttttattttatgataattttgcttttggactgcctggttcagagttttcaacaaagccttgggatattattgttctgaacagacttgggctttcatccatactctttgatactcgaaaatgtattttagatacagctaaaatatttttccttatttatcacatactgcttcctgccagctgtgaggtattcgtgcattttatacttagaatgtgacatagttaaaacccaaaggatctgttcaagttaccgatccctaaggttttactgataaggaaacaaattcctctgtaagcactttttgttggtttgaatttgtcgttgatttttttaaatctacattttgatgggatataaagaaagtcggtgcttataattatttcacatgattatgtgaaagttcttgagaatgttcaagctgtgttaatctttattggctttaaagtataggcacttatgagtttaatgggatatattatactgatagctttaaatagctttaaggtaaattaaaataaaatgagtttgttggtggcacaatactgtctcaaattatttgagacaattcagaggattaggagtgatctttatatattaaagtttgtggtgcttactaatgtaattttcactgtattttcttgtcgaccgtgtttcatttgatttcctttgtgaataaataaattttgaaataactttatgttgtatgaggggagtgctagcgggaggtactgaatcctcccaggatttatattagtcattatgtttgagaaatttttaatgagttttggtttaggcttaagaagggattctcctgatgtaattggagatgactattgtagatgaaatttcaggagtcagttctggagttgcatcacttacatttagttactaagtattaaaattgaggctagggtagagtgatgatgcaatgcatcataaagaattttgaaaatgtatttgcctttctatgttctttttataaatgtgatagagtgaaaattatgtattgtaatatacacaccatatgtaaaagatgactacctcttcttagtttttggtttttttttttttgaggcggagtctcgctctttcgcccaggctggactgcagtggcgctgtctcggctcactgcaagctccgcctcccgggttcacgccattctcctgcctcaacctcccgagtagctgggactacaggcgcccgctaccacgcccggctaattttttttttttgtatttttagtagagacgggatttcaccgtattagccaggatggtctcgacctcctgacctcatgatccacccgcctcggcctcccaaagtgctgagagtacaggcatgagccaccgcccccggccctcttcttagttttttaatgatattttataattgacacgcttaataacctatgacgtaattcattgctcaatctatttgctttgaaaaatgcttgtataacattttttgttttctcttcatgaggttcttatgtagtgctatgactatcattttctattttattttttctgtaaatgattaatgatatgctttttatactctttggattttaacctccatagggtacttaaaaagtatataccatttaaattgacatagtaagatacaaatattcttaatgaagtactgtatattcctgggatggtattcacagtgtttttgtgaatgatcttttgaaagggagaaaaaaataactctcttgggaattgtcttgttttaggctgaggattctaaatggacaatacttctctttttgcccatcaaaatactagtaatgatggtactctctgaatggatgttttgacacttattttgaaactgatagattaaattgtgggtactatattaaccttttatgtatgtgcaatagtagtcatggaccacagttttattatattcatgtggattttgtgatatacttaaaatgcagttgatatattattgaaacttaataacttgagacatgattagttatagtataaatagtaaattatgtactttagtttataattcaagtttgttttttgttttgttgtgcaacagggctctaattcggccacttccaagtcaacaaatgtttgaacatatgcagaagagacaccgtgtatttttcgtttatgtaggtggagaatcacctttgaaagtaagacttttttttaatccacaaaaacagatgtattgtaatttaatttactctataatcaagacttcactagaaacgcagaacttattactctgcacttactggaaatattttcattcattctaagcatttc

SEQ ID NO: 20009 - DNA, 2300 bp, Homo sapien
agatgttttagcagaagtgctcaggaaatgcctcaggtgaggtcccaataaggaggctgctaaacagagaccactgggttgggagtgtagacatgcaaatgagcgtggctggcctgggaggccgaatccttgactaccactccctccagggactgtaatgcaccggttatacaccaagtttggtgtagggagggcaccttcccctatgccagaaaaagccttgcaattgtctatggtcaagcctgaaagatcacacacaggaatttgggtctgaagtgaacctcctcacttactataagcaaggctgattaatgctgtcatactatgaagataaatacagtacagttaccaaattctaacacccattcaatataattaaaggaaaaagacataaatacaaggtaagataatgaggaaaaaaagaatatgtaaaagtttgccacagttttttgatctcataactattaataaaactcttctgggcacaccctcaccttcacttacaacaagtgaaaaaaatgagtgatatataaaaattggttccaatctaaaatattagaatcacatgcaaatattcagatatctgagttggacagttaaaataatattttaaatatatatatgtatactcacgattcatctaaatcttctacaaatcctttacagacgaccatatcaagtacaacaactgaaaaaaaaagacaaaatgtacacaataaatgctgattatttggctcataccgtataagcttagtcatctctgaagtgtttttgacctttcacaacctaccaaaaaattcatcactgatgcatcccagggtgcaaatgatgcaaaagcaaaggtagttcatccatttaataaatatttagtctgtatgcaaccatatcgtgaccggccaagttctaggtaagccaataaatctaatacacacagttcctttttcctccatattttcactctcatcttacgtctctttttaaccatcctatctttttggaatacaaatagacagcattcttctttatttcttttgctttagtagcaattacctcttccgtaaaaactccaaatgccattcaaaatatttcccctcaaatagatacgtaggaagaaagtcgagctgcaactctaatacttattacacggcagtgcctgacacagagtgggctctaaaaggttgttaagtgagcggaccccagtgagaatgagggcactccatgctgacgggaggcagctgagaaccgctgacacacactcaggtccttttcacaccgcacaatcccggcggcctgaccctgatctgtcctcgaccaccctctcttgagtactggtggtaaaaatccttaaacgtgacaagactcggaacctaaagccaaggcaagatttggtcgttaagctgggacggcggcatccttcttgcccatcaaaggagtaagctttattgaaacttctgccacaatgagaaaaacacaaacacaaggcagcgcgcccttcccacgtccagcattggtccggcacagcggcggcggaaggaccccaaggtgtccgctccgtcagggccaggcagggtggcgcggcgggggcggcaggacgctgccgggaatgggtgggcatctccacgaaccccgcaggcctcgccccagacccgggtccaatcccggccccacggcggggccaggtcccacgcgcccgccagcgtcccgaccgctgagcccccattacctgtggcgcagagccgcagggccgtccaactcttccacgctgccatgctagcccgggagagctgcagaagctgactgtgcaaaagagggataaagacactggggtccgccgcctgcccgcccggaaagggaaacggagccgacccggagcggaagagaagcaccgcgctaactacgggggcggggctacccggccagtctccgtctccggctatgcgcgggagtgcggcgcatgcgaggggagtgcggcgcatgcgacagcgcctgcgcagtcatgtcttaagaatcctttgcgctctcggtgcccccctccacgcccaggagcgtgggaaccctgcttaagggctttactagggaaaacggtgctggttcactggggcgcgtttccgggaaggtgaataccggtgaaagttatgctgagggtgaggtaggctctgacgacgcacttgcaggttgaatactggcacatcatttacttgttactcccgtgtggtgagtgcacctgtgggttttgatgctggatcaaattcctggaaagaggcgcgcattaagactgcggattgctgagctgcgcgaca

SEQ ID NO: 20010 - DNA, 2300 bp, Homo sapien
ttttatgacatttttgcctgttggaattttgaacctaaggtgaaccggctgacatcatatcccccttctgttgttgtcacaggttttcaaaatttggtttgatctaaattctctggtaccttatgtcccataaaaatttcatctagttcgtaagtagtgattgctgcagtaaccgtcttataaaagtatatggtttttacaaatcattgtcgtatagaagaaaaaacaggtagcaatataaatatttcatactactttatctagttccaaaataatcagaaaagagccatcaaaaaatatcctacgcttaacttcatgttctcaagtttcaagagaaagtttttaaagaggcaatccttactttggcaaaaatgcattaaagcttgctgcatttaagagatgtcccattatgcaaacaggttgaaagaatattacaaatacgttttggaaaaatacggagtgtcgcgcagctcagcaatccgcagtcttaatgcgcgcctctttccaggaatttgatccagcatcaaaacccacaggtgcactcaccacacgggagtaacaagtaaatgatgtgccagtattcaacctgcaagtgcgtcgtcagagcctacctcaccctcagcataactttcaccggtattcaccttcccggaaacgcgccccagtgaaccagcaccgttttccctagtaaagcccttaagcagggttcccacgctcctgggcgtggaggggggcaccgagagcgcaaaggattcttaagacatgactgcgcaggcgctgtcgcatgcgccgcactcccctcgcatgcgccgcactcccgcgcatagccggagacggagactggccgggtagccccgcccccgtagttagcgcggtgcttctcttccgctccgggtcggctccgtttccctttccgggcgggcaggcggcggaccccagtgtctttatccctcttttgcacagtcagcttctgcagctctcccgggctagcatggcagcgtggaagagttggacggccctgcggctctgcgccacaggtaatgggggctcagcggtcgggacgctggcgggcgcgtgggacctggccccgccgtggggccgggattggacccgggtctggggcgaggcctgcggggttcgtggagatgcccacccattcccggcagcgtcctgccgcccccgccgcgccaccctgcctggccctgacggagcggacaccttggggtccttccgccgccgctgtgccggaccaatgctggacgtgggaagggcgcgctgccttgtgtttgtgtttttctcattgtggcagaagtttcaataaagcttactcctttgatgggcaagaaggatgccgccgtcccagcttaacgaccaaatcttgccttggctttaggttccgagtcttgtcacgtttaaggatttttaccaccagtactcaagagagggtggtcgaggacagatcagggtcaggccgccgggattgtgcggtgtgaaaaggacctgagtgtgtgtcagcggttctcagctgcctcccgtcagcatggagtgccctcattctcactggggtccgctcacttaacaaccttttagagcccactctgtgtcaggcactgccgtgtaataagtattagagttgcagctcgactttcttcctacgtatctatttgaggggaaatattttgaatggcatttggagtttttacggaagaggtaattgctactaaagcaaaagaaataaagaagaatgctgtctatttgtattccaaaaagataggatggttaaaaagagacgtaagatgagagtgaaaatatggaggaaaaaggaactgtgtgtattagatttattggcttacctagaacttggccggtcacgatatggttgcatacagactaaatatttattaaatggatgaactacctttgcttttgcatcatttgcaccctgggatgcatcagtgatgaattttttggtaggttgtgaaaggtcaaaaacacttcagagatgactaagcttatacggtatgagccaaataatcagcatttattgtgtacattttgtctttttttttcagttgttgtacttgatatggtcgtctgtaaaggatttgtagaagatttagatgaatcgtgagtatacatatatatatttaaaatattattttaactgtccaactcagatatctgaatatttgcatgtgattctaatattttagattggaaccaatttttatatatcactcatttttttcacttgttgtaagtgaaggtgagggtgtgcccagaagagttttattaatagt

SEQ ID NO: 20011 - DNA, 2300 bp, Homo sapien
tgttgccaggctggaatgcagtggcaggatcacacctcgctgcaacctcaacttccctggcccaacttatcctcccacctcagcctctggagtagctgggaccacaggtgtgtgccaccacatctggctaattttttttttttttttttgaaacagagtcttgctctgtcgcccaggctggagtgcagtggcgcgatttcaactcactgcaagctcggcctcttgggttcatgcattctcctgcctcagcctcccaagtagctgggaccacaggtgtctgccaccacgcccagctaattctctgtattcttagtagagacggggtttcactgtgttagccaggatggtctcgatctcttgacctcgtgatccacctgcctcggcctcccaaagtgctgggattacaggtgtaagccaccgcgccaggccacatctggctaattttttaattttttgtacagatggggtctcactgtgttgaccaggctggtctcagacgcctcacctcaagcaatcctcctgcctcagcctcccaaagtgctgggataataggcatgagccacccatgcctgggacttgatcagtatttagatttcataaaatttacagttgaaaaagtagattcacatacctcagttgttccaaccacattaaaaaaactttccaatagctgaatcgagtgtcagtttttgagtttactgaaattaaaaaaaataaatattcagttatttcatcacactaggcacatttcaaaagctcaatagccacatgtggttagtggctacactactgaaaagcacagatctaggtcaactggcttttgttgttgtccacatgtgaacttaaactgtaacgcaaatataagaggaaattatttcactttgcatgctgtggaagacagaaaactttgaaatacatgagaatgaaaaaaaaaaattgaatatgggtcattcagagaccttgccaagaaagtagaaaagcttctgtataagagtatcgaggcgatggtactattataaagctgttccaccaccaccgggagaacattcccatcatttcaacagtccccttacgttttagtctacttttttcttaaaaaaaaaagaaaaaaaggaaaagagaaagaaaaagaaaaattgaatctgtagagggcttgcgctggataccatgctgcatgcacaaagggggtgacatttagggcttgctctcaattagagtgcaatttaatcttctagtcactaggaataacgacgttttatgacatttttgcctgttggaattttgaacctaaggtgaaccggctgacatcatatcccccttctgttgttgtcacaggttttcaaaatttggtttgatctaaattctctggtaccttatgtcccataaaaatttcatctagttcgtaagtagtgattgctgcagtaaccgtcttataaaagtatatggtttttacaaatcattgtcgtatagaagaaaaaacaggtagcaatataaatatttcatactactttatctagttccaaaataatcagaaaagagccatcaaaaaatatcctacgcttaacttcatgttctcaagtttcaagagaaagtttttaaagaggcaatccttactttggcaaaaatgcattaaagcttgctgcatttaagagatgtcccattatgcaaacaggttgaaagaatattacaaatacgttttggaaaaatacggagtgtcgcgcagctcagcaatccgcagtcttaatgcgcgcctctttccaggaatttgatccagcatcaaaacccacaggtgcactcaccacacgggagtaacaagtaaatgatgtgccagtattcaacctgcaagtgcgtcgtcagagcctacctcaccctcagcataactttcaccggtattcaccttcccggaaacgcgccccagtgaaccagcaccgttttccctagtaaagcccttaagcagggttcccacgctcctgggcgtggaggggggcaccgagagcgcaaaggattcttaagacatgactgcgcaggcgctgtcgcatgcgccgcactcccctcgcatgcgccgcactcccgcgcatagccggagacggagactggccgggtagccccgcccccgtagttagcgcggtgcttctcttccgctccgggtcggctccgtttccctttccgggcgggcaggcggcggaccccagtgtctttatccctcttttgcacagtcagcttctgcagctctcccgggctagcatggcagcgtggaagagttggacggccctgcggctctgcgccacaggtaatggggg

SEQ ID NO: 20012 - DNA, 2300 bp, Homo sapien
gaagaagggagttgacaaaaagattaaaaaaccttcatggacttcaagtgcataagtaccggaaatagactactgtatctttttaaagatggagcagaagaaagctgggagaagaaagacaatttaagagacagagagacactgcagtgatctagaaagatcatgatggttgtctgaaccagagtagtggcagtgagaaaagaagactgggcaaattattgaagtataatcaaaaggaactagtgctggatttgatatagaatagaaggagtcaaggatgacttccagaatttttctttgggaaactgtaaaactgggttgacatttacatagataacacagcaggtccatggagagatgatgatttcagtttagataagctgatgccatatctgtgtaattttctagttgaggggtatagtgggctgacaaatatgagtattgaaaattcagacagtcattgggtctaaaagtagatatttgggagtcatctaaaaagaaagatggtaatttaaactatgaggatgggtggctttatccagagagagaatataccatttatatgtagatttatctaagaacatatgtgatgcacaccaaaggatggatggaggatgaggcatcatcaaagagggtgagaagggccagcaaaagaggtcaagaggaaaaccaggagagtgttatgccaagacaagagatgtcttcatgtgggcagggttgtgaacagtatgaaaggctgtgtagatgtcaactagaaggattgaggtgagttagaaaaattaaaaataaatagaatatttatgtacatgcatgtgtgtgtgtgtgtgtgtgtgtgtgtattgtcactttgatgaattaaaatcaggtggatgcaagactaaataaaattcttggctggagaactttcaatcatttggccatgacagaaagaatggtacctgaaagtgaaaatgactgaattaaaagtaaagttcattggcatacatgaaattgactagagaatgtatggtatttaacatcacgtggggaaaatccggacaggagggaacgttcaaagatagaggagagagaatcatgattaagtttagctcgatgggtcaattggctttatacaggaagatggccaccttttccattgcatcagaaagtaagtgggaaaagaatgttaagtagagatagatgataacaccgtaataagcctacaaattagggaagggtgaaaaataaaataatttgaagacatttattgcctaaatttcaaatgttgtttttttgctacttaaaaggagcaaggctatcctgttaccttttgacttttcttttttactttggacatttttttgctgctagtttcaaccagagaagctcttttttatgtgatctctcgcctcccccctcaacccccatcagaacacttcctgacagctgagtcatgtcaatggaaagctacttcatattctttttccccagggaaaggggccagagagctttcactgggcaccccggggactacagctcacaattcctgccaatgtgaccacaatcaagggttttgacatgcagttattgtttcatgatttgtatactcaaatcttttattaaatatgatttcttttgcttttgtgcaatctaatgcaaatcagattggatgaatattttatattgttcctgtaatgtgcagtataatttccttttaaatatttttcagataggtacttcctgggcttttttttttttttgctttgctattttagtttttctattattattacaagttatactgttgtaattaaacattaagaacacttgtggatcaaggcgtgggtgtctttttctttttcatccacagtacaggtttcaaatggttgtatggaaagctttggataaccatacttagggaacattaaaaatggttttattttggttggctcaatggtgatccaaagagggggttgtggtagtggtttcaataaaacttcacaaccaatgggaatcttttttgagtttgtgtggagtgcccttaatgctggaaataatcctgttggctaggactccagaactgtacggatgagaaaaggatgcaggaaattctgttgtttacacatgtggctgcaactgagacactggagcagcccagcaagcccagagggtaagagtgtttaataaccttgtggttttctatttaatttttatattttcctgctgaggtacagcatgtgttgttctcagagcaaagacagttgcttacaagatgcagagcaaaactactgtagagctgggaagcagaaggatttggagtt

SEQ ID NO: 20013 - DNA, 2300 bp, Homo sapien
ttcaatttagtgcagtcatttattctcatcattttctactttctggcaaaatacataatgtgtattttccaggatgctatattttataaaattttaaaaattaattttataaatataatatctttattaatattttaaaataacttgtttggatgcactatacaatctctttcctaattctttaattagactcacatacaatatttaaatgccacagagagaaaacaaattttgagtaatcaaaattcttccctttaatgaaaaatacagagttttgtcctatctggaaagttagctcatgcactgcaaaacatgccaaatacaggcagcagaataataaacccagtatgttgcaaagttctttcttttccttcttttcttctccttcttccttccaattgaaatatataaatatatgtgtgtatatatatatgtatgtatatacacatatatgtattttttctatggagaaaatcagtagatgttaattagtaactgaaacaagtttctatcaattttaaacatctaataaccattttgagtaaactatatatacaccatttaatataattgtagagaaaaataaaataaaatattccaaaataatttcaaaactcccttaggaaagagccaagagtttcaatgtcaaaagagtttcaagatttgtattcttctatttgggatatgatgagtataaaggatttactaaatgtgctaggtcaaatatcactttgttctagaagcttgtaaaattataaattggaatactttctaaaaattatgaaaactactgtagttttctgagaattgagttttttcattgtttaaagctgaaatattggctgggcatggtggctcactcctttaatcctagcactttggaaacccaaggcaggtggatcacgaggtcaggagtttgagatcagcctggctaacatagtgaaaccctgtctctactaaaaatacaaaaattagctggtcacagtggggcacgcctgtagtcccaggtactcaggatgctgaagcaggagaatcacttgaacctgggaggcgtaggttgcagtgagctgagattgcaccactgcactccagcctgggcaacatagcgagactccatttcaaaaaaagaaaaaaaaaacacctgaaattttgtagaaacaaataaatgtttaacatgtcaatttggtgttttaatttgaaattgggcatttaaaaactgtgattatttaatactattattatttttgttttttacaacgcctatttttagatacataaggtacctgtgcaggtttgttacatgggtatgttgcacccaggtaggagagtatagtacctaataggtagtttttcaactcccctcctcccagtattccacaatgtctattgtttccatttttatgtccatgcatactcaatgtttagctcccactttaaagtgagaacatgcggtatttggttttctgttcttgcattcattagcttaggattatggcctccggctccatccatgttgttgcaaaggacaatatttcattctttctatggctgtgtagtatttcatgatatatatgtgaggcaggagaatagggtctggagcctaaggccaacctgaggctgacttcttggaattgaaccaaaaagaaaacctcacctctctatgcctaagtgacaagaaaccagagtcacctgcctctacaaacccctcccgcccccacactcccctgtagcacaaatgggaagtacctctgattggtctggggccaagccttcatttcagcctttgattggttgcaggaccaggctccatttcagcctctgattggttgtgggccaagcctccacttcagcctctgatgagtcatgggccaatgcttcattcgcataggttgtaaccaattggaggcctctaaagggtacatataggtgttaccaaattcttttagcttagtaaaaacttcaaagagcattgcaatcggggctcttgagccgcttgctcgagtctgctccctgtctgtagagtgtatgtttgcttcagtaaatctgtgctttcattgctttgttcttttgttgttttgtttgtgcgtcttagaattccgaattccaagaacctggacaacttgccgtcaagactttccatcaggtaacttatgtaccacatttctttatccaatccaccactgatggatacctaggttgattccatgtctttgctattgtgaaaagcagtgatgagcctatgagtgcacgtgtctttttggcttcatgatctattttcctttgggtatatacccagtaat

SEQ ID NO: 20014 - DNA, 2300 bp, Homo sapien
gggctaagactctgtgtagtgttatctatgctgtaaagtttcctcatttctaagcgatagtcataacttcttcagtaccccttagattaccttgaccatacctaagaatctaacactgacttgacacatattacataataaataaagttattgaacaaatgcacatatttgttataatgtgaattatgtatctttaaaacttaactctgcttctctcacccaccagactgtaaaatctttgacacacaagaaccatgtctttttcataatattttatttttgaccttatcacaatattaaccacagtaagaaattaattcatgtagaagttagatgtgcttttgcctgaaaataacagaaaactcaaccatcataacttaaataaatataggttatcctgctcacatagcaaaggattcagaggtatgcattctacgtgtcatgccataattcgcaccttaaatcagtctcttatcttcatgattcaccattttgaatgttatgagaaggctgttatactcaccttcttccagaactatgtccttattcaaacacacggaaggcagaggaaagagagttcctcattgtgatgttctcatatttttctagatgggaaatcttctcagtacccttcatctcacatcccagccgccagagccagaccctatggctgccttgagactagtcaatagtcaacagatgaagggcatcatggaaaatgtagactatgattcaacctctgggactgggatagaggcttgttaacctatagatcaataggttgtgcattctgcctgaacaaattgaggcttcgcagggataaagaaaaccattatgtagttagtggacaataaatattacaatttgtatttcgtagtggacaatgttacaatagatatgacctaagtagaactggaattgtcaaaatgaattatttatgtcatatgctatcttcaattgcatctttatatttttatttgtatttggcaaaattgaatacgagcattttctgtttcttagtggatagttacaagtgtttaaattcctctgtatttttagttacactggaaaaatatgcaatattgaaaaagcacggccaggcatggtggctcacgcctgtaatcccagcactttgggaggctgaggcgggtggatcacgaggtcaggagatcgagaccatcctggccaacatggtgaaaccccatctctactaaaatacaaaaaattatctgggcgtggttgcgcatgcctgtagtccgagctactcagtagactgaggcaagggaatcgcttgaaccctggaggcagaggttgcagtgagccgagatcatgctactgcactccagcctggtgacagagcaagactctgtcaaaaataaaaaaaaagcattgttttcatcaattttcaaaaaaaaaaaaaaaaaaagtgtaggtcttgttcctgtatttacaagggaaatttcagcgtgaaattatggtctctatcttttctcaggtcttaaaaataaatatgaatttagattccatacatcgattaattgaggaaacacagatcttccagatgcaacaatcatcaattaagtcacgcggcgacatggtggcacctgcctcaccccccagggatacctgtaatacctgcttcccacttcatgggctacaatctcatgctgctcacaatttctgtgctcactcatataacaccaacaaatgggatatttgtgaagaacttcgcctgcgggagcttgaagaagtcaaggccagagctgctcagatggaaaagaccatgcggtggtggtcggactgcactgccaactggagagaaaaatggagtaaagttcgagctgaaaggaacagtgccagggaggaaggaagacaactcagaataaaactagagatggcgatgaaagaattgagtacactgaaaaagaaacagagtttgccacctcagaaggaggcattagaagctaaagttacccaggatctgaagcttcctggcttcgtagaagaatcctgtgaacatacagaccaatttcaattgagttcacaaatgcatgagtctatcagagagtatttggtaaaaagacaattttctacaaaggaggacacaaataataaggtaagaaaaaaatccagagatgatgtgaatttctgaaggtcatatatagtgatggggaggaagaaggaagtgacaaatgcaatggtgattatactagcctgccagggctaccataacaaagtaccataatcacagtggtttaagcaacagaaattcattttcttacaattgtagaagctagaag

SEQ ID NO: 20015 - DNA, 2300 bp, Homo sapien
cacatacataatcattaaaagctacgattattgatcacacctgttacttatgtaagcactaagattgttgctgagacaaaactaatccctgacttcaaagaactgataattgacttgtgaaacagatgattatataaataggagaaggagtcagtggtcatagaaatcactgtagacctcaaatcaatcttgaaacgtgtggctctgcaactgaatgtctgtgagcctcaatttcctctagtaactggcaaccacatttaacatatgtggttgcaaagagggctgaatgaaatcacttatttaaagcatttacaaacctaaagcagtctttacatttctaaaaaaaatggccatgcagcgtatgaaatagtaagaagtgggtggaatagacaagctgtgccaggtatttagaggaaagaattacaaggagttatcagagagtttatgcaaattttctgagaaggtcagagcttgagcccattccagggagtttatgcaaattttctgggaaggtcagagtttgggcccattccagagtgacagcggaaaggattttaccatgttatccttagtatctgatctgccccagcatctggtactttgcacggtggaaggtttttttatttaaaaaaaaaaaaaggctagcccacattaatgaatgaataggaatagtgtgctgttaaagcaagtaagaatttccattggtttacacgggctctagatggagatttctgcaaaggatgagacaaaaatctcccttggatgctcatctggttggactgagctaccttgtccttcaagtttttacattccccccacaacctcattcaagtaagtttcctttctttctattattgtgtttcaaatggggtaggaaattttaaatgagaacctggaaaaatactgctcaccgtaataaacaaacatcatcttttgaacttttactaaatataactcttgcaggagtcaccttaaaaattgtcaatctttatacattttactaattagaaacatccttagaagtaagtactaaatgttctagcctatagtaaaaatccatatgttgcctccggccaaaactcaacatcgctctttttcctcgaatctttcacaaaaacataatcctaaaaattaaaacatctttacaataatgaaaaacctacttttaaaatgccatgtgtttctacattaaggggagaaagtttttcattttttgtttgtacaagttgagcatttcaggaagtcattggtatccattgataacaaccacgttctccattttcccagaagagccaggagccactttcagtcctagttaacgaaaacgcatgcataaatcaaccactcgggtcggtcggtcttctccactccttcagcagaggacgtcggcgcccggctgcctcgcccgcctgcctgtctctaggctgcgggaggattagacacatgcgcacgattggtctctttgtgtgcaccaggaagggtctggcgtcgatttacacttcctaacggggcagagacctggaacggccgcgagtgcttgggaataaaaatgtactgtaaacaaggccaatgaaataagtgtctcgctcccgctggccttccgcgttggaagtgtccccactgccctttccccgctgcacagcttgcgagtggagatttagagcccgggaatgaggcgccgtgtccttaggaatctcgcgcccggggagcgctgagggaccggggagccgggtggggagcgggcctcggggcgcccggcggcggaggcgctcccacccgcgcggagagggatggagcgcgtcttgcgagcgtctccgagcccagccaccccacgggccagggggagggagcggggccggcgcatcagcccgccccccccggcccgccccctccccccgcgccggggagccgcggtggtgcgctccggccagctgtgcgccgccgagcgaggcgccagcccgtgggtgctgccgggggcggcggcgcggtgggggctcccgcagctggcggaggcgcgggccgcggcgctgggctcgcggcggggagcgaaggtgagcgccagaacgcggagggctggcgcggctcgcggcgccgggccccgttccccgtccgcggcggccctgcaggcgaccccgcgtccccaccggcgggagctcggggaagagcgggcggcggcgctgctgctggcggcggccggctggatgcgagacccgcgcagacccggcggcggacggcggctctcgactccggagagcggatcgcggggcgcaggagcccgatcgcgctggccatggcctcca

SEQ ID NO: 20016 - DNA, 2300 bp, Homo sapien
gcttaattacaacagtgccttagcaggcatgcaggctttcctcatgcttgcctaaacgaaatttagaaacggaaagggttagagatgcattagtctttgcggttttctcatactggttgtggcatctccgctgttaattgctttcctttagtgattaatataatttttccatccattaatctatatgccaaactgggtttgttcgtttgaataacttaaatatctacatatttttattttttaaattagcaaagatgtttaacagtttaacaatgaatcctaatgttttatttatctgttgtgtcagaaagcaagaagttgagggatcctgctcttagtggatatcattgtgaccctaatatatattgaattattgttcacttaatttataaatcctaagtcctgagcctttccataaaaaaaataattaaatgttcaataggtctctaaaatccgagactggctgaaatgttattcttataaagcattttgattaactggtttctatgtaatacgtatatgtctttaaaagactcaatgctttctttgctttaagtaactaagatacttattttatagaaggaatccaaataaatgtttcagcttcgtatgcctgcatagagatactcagttgatttatttttgctgatgggaacaaagcctaaatttagaagctatctttcttttatatcactgtcctaaaatactttcagacgttttcgagttttgtattttgtatttgttcaatgaatcaaataactaatatggcaaaatctagaagggttttaagctttgtcatcaagtaatactgaaccattgctcctagaggaaatacagggttgggttctcagagcctcaggtcacaacatttttacccatggatcaatacagaaacttgttttgagtgtgtttctattgaaaaacatcttatgtaatacatattcttgattcattaacattgaactcacggccagcagcactgtaactcatgcctgagctaagcttatctcatcatattttctccttaaggtgcaccacagccttctcctgcttaggagtcctggacagcacttcagcactgtgcttagaagttatttaaatggtgacatcgccaacaaaaagtgcaaaaatgtggaaatcatgactaataaatagaactctggaaaagacacttgtttatagttaagagagctggaacaggaaggaagagcgtcacctgctgggcttcagctgggaaacttgtgtgttgggtgactcagatttctccctttctctttctgagaaagtgcagtgaatattgattggggggttacaaatgcattgtaacgagtaggagaatttgcaaatacagagtccactaatagtgagggtcacttgtctcttcacagtagatcgtttgcacatccctttgggatttggtttgggatttgtggaatcaactgttcaacagatgatgcaacagcaatgctcctggattcccagtggttccatggtgagcaagggcagcaagtgagagggcatgctgaaagccttgctagaaatttgtcgtgattttagatgtgttggatctattagtgctttctatatcatatatatgtatttttcttagaaatatattttaatgtgctttatgaagtctcttaacagataggagattaaaaaagaagaaaaggtcctttaccccagaccatcaaaggcattgcctcattcagttggccatttcactctgtcccgtggatgcagaataaaggcaagagggcataggatatcctgcagttgaatcccctaattgttcactgatcccaagtctgtgcttgagaagtgaaggcttaatccttttttgtgccattttgttctaagatccttcagaggagtgaagggtaaacattcaaacattcaactcggtttgagaagagatgatgtgtttatgtctaagggattctagaatgcaatacaaattggtaggaaattttgagagaatgttttctaggaagaattttaacacagacatatcctgtccattctagtaagaagaaaatttagtcaaatcattctgaatagaattttctgtctcattgcagacttcagacatttaaggctcatatatgtatgtgtgtatatatccatatatatagtatacgtatatatgtgtgtgtgtgtgtgtgtgtgtgtatatgtatatctcccagtatcccctaaaactaagcttttttattaatatatgtttcatttattgaaatatacctgatcttcctataagtattatttactcattctcttttggtctataaatgccactt

SEQ ID NO: 20017 - DNA, 2300 bp, Homo sapien
atgctgttttggttactgtagccttgcagtatagtttgaagtcaggtagtgtgatgcctccagttttgttcttttggcttaggattgccttggcaatgcagactctttttacttgacaaaaacaagcaacgaggaaagcattccctatttactaaatggtgctgggaaaactggctagccatatgtagaaagctgaaactggatcccttccttacaccttatacaaaaattaattcaagatggatgaaagacttaaatgtcagacctaaaaccataaaaaccctagaagaaaacctaggtaataccattcaggacataggcatgggcaaggacttcatgtctaaaacaccaaaagcaatggcaacaaaagccaaaattgacaaatgggatctaattaaactaaagagcttctgcacagcaaaagaaactaccatcagagtgaacaggcaacctacagaataggagaaaatttttgaaatctacttatctgacaaagggctaatatccagaatctacaatgaactccaacaaatttgcaagaaaaaaacaaaccaccccatcaaaaagtgggcgaaggatatgaacagacacttctcaaaagaagatatttatgcagccaaaagacacatgaaaagatgctcatcatcactggccatcagaaaaatgcaaatcaaaaccacaatgcgataccatctcacaccacttagaatggcgatcattaaaaagtcaggaaacaacaggtgctggagaggatgtggagaaataggaacacttttacactgttggtgggactgtaaactagttcaaccattgtggaagtcagtgtggcgattcctcagggatctagaactagaactgccatttgacccagccatcccattgctgggtatatacccaaaagattataaatcatgctgctataaagacacatgcacacgtatgtttattgcagcactattcacaatagcaaagacttggaaccaacccaaatgtccaacaatgatagactgcatgaagaaaatatggcacatatacaccatggaatactatgcagccataaaaaatgatgagttcatatcctttgtagggacatggatgaagctggaaaccatcattctcagcaaactatcacaaggacaaaaaatcaaacaccgcatgttctcactcataggtgggaattgaacaatgagaacacatggacacaggaaggggaacatcacacactggggcctgttgcggggtggggggaggggggaaggatagcattaggagatatacctaatgttaaatgacgagttaatgggtgcagcacaccaacatggcacatgtatacatatgtaacaaacctgcccattgtgcgcatataacctaaaacttaaagtataataaaaaaaaaaagattcaggtgtgtgtgttcaaatcctgacattggcacaaacttcatcttgaaatgaaagtaatgcctattttacattaatctcatttcactatgagtattaaatatgtatataaattttaatttattgcatgtatttaataaatacttcctattacagaagttcaaaagtgtgagacacatgtgttcataataaaaatatatttcttgctgctttcaaaattactaatgaacatctgtttttaaaaatctaaaattctacaagataagtaaattttcaaatgtgatttttttcaaagatagataattattatgtaagtgcttcacttaactttgttaacctgccactgcactagcatggaagatggagaattgtctgtcactaggatggtgataataatttatatggtactgacatccagatgatttagttatattaaagactactaaaatcagccagtacagtgaaaacctcaaaacgaaatcttttcacaaaaaattattttacatgaaatatcatatttaaaaatactgtaatcttaattaagaacatgtttgtcaatcaaaaacagttcctctctgaagtacacttaaaaaattgattaattgaatcaactcctaatgtcgtaaactcatgtaaaaatatggataatgggattcctttatttgctttcagattttcagacgatgctggttggttttcaagaaggcttctagcaaaggacccagaaggttagaaaaatttccagatgaaaaggcagcttatttcagaaactttcataaggtaagtcacagtcctgggagtccctggggaataactgggcccttgaagacttgtggagatatttctttgataaatgaaatcttcagtggcaaaaattaatggcttgggaaaaatgccctt

SEQ ID NO: 20018 - DNA, 2300 bp, Homo sapien
tcattattcattgtagttatggtctataaagcctctgcaaacattcagttgcaaatcatgaatgaattaatgaatgacctctagtcacaatgcttttgttaactgatcattatattacctcgttttattgttgctctttaaagatatctgattgctaataatgaacttagggcaaacagcactgtacctcatgctgaataaagcttatctaacacatgtattttctccataaggggtatcacagtctctttaacttagggacactagacagcagtttagggctgcacttggggagccatttttaaaagtgtagtcaacaagaaaaatcacaaaaatgcaaaagccatggctctacgcagagcatgaaaaggacatgtgtctacagtatgaccacaaacacaataagacacagcatcgcctgctcaacctcagctggaagcgtgcacatctggagactcaaacgcctgctcaacctcagctggaagcgtgcatatctggagactcaaagttttcacccctctgcacatgcacatgtctacaaatgaccacagatgtgccatgtgtatttatgttggggttgtaaatacatttttgcaagtaggtgaattcacagattcagaaaccacaaataaagatgatcaactgtaactttaaaaaatacctgatgacttgggtgattttccttgacaagtaactttcagccactctctgtagtctccattccaacatatccaattgctcatttccatccacattatagattactcgcctgtgatttttaggtttttttgtgttcttattggggatcttagtctagtctacatagtgtaatgttaaatacagatataaatgcttgctaaactaaccacacttaatattaaagataataaaatattatttccttaggaaaatagatcctaaggaatattacttaaatattgattatatttgtattatatattagattatataactataatatgcaaatgtgtatataaatatgcatgtggttaattattgtgtttataaaaatattaatcagcaaaatagccttgaaaaagctagttatatcctgtaaaaattctacatttggagaagagaaattaaagcatagtcaaaaggtaatgaatttattataagatcatataattatagatataatatcataggttgtcataaaagaggatattaacttgctgtttactatgctagttaatcctgtcttctttctgttaacagtatggatctagaaataagaaatcttataaattagaagaaaaaattcgcaccttgataagcagattttaaaaaattaactcattgaatattattattgcaatgttgtgtttgcagagttgttgaggaaatatacatttgtttgtttctgttgactgcgggggaaattaaagatgcacaaattgtagcagaagatcttgtaccaataaggagtcaacatccaaaatacataaggctactagatatttattaattgcccaataaataaattgttgttaacctgggtgcataaatcttggatgggctttggtgggagaagtggtgtatgggtctgtgaacactatgagcatttttctggagagcaagtctattgctctaaaatgtaccttttggagcaatggacttgctttccagtcacttttctgacagatatgtgtcagttgcctcaggaccataggcctacaggaaatttgcatgacaggtgaaaattaagagagaggagatattaaatacaatcaatattcagcagatatttaatgaaaatcctctgttataccacaactgctattatttgccaggtatatgcttttaataaaagcacaaagtccatagaacccttctacataatgtgtaggtcatttcaaaatgcagcaaacaatatagtctgtgaccaaagttaagggcataatagaagacattttgtttttttctttactgtttttggctaaagtcaattcagaatgagtacaaatatcccgtggaaattcatgtaagactgtgataacttatcattttgtttcagcactccaacatacagcatacatactgtacactaagttaaatatattttttctttcaaggtaactgaactgcacaatatcaaaaatataaccagactgccccgagagacaaagaagcatgcggtggcaatcatctttcacgatgaaacatcgaagacatttgcctgtgagtcaggtaagctattattggccatctaccccttgaggaaattgagctgcttgtgagacaatggcccaggcggattaaggtacactattgaacag

SEQ ID NO: 20019 - DNA, 2300 bp, Homo sapien
acttagggggaccctgtcctcaggacctcaggaattctctggacttggtttagcccggcatttgtagtttgatttttgctggtgcctgtcaggggaaaatcttgtcattaggacataataggacataatagatgaaattaatttttccaattctgatggaggtcttccatgtccttgccactccagtttgttctgtacagtgaccaagattatctttccaaaacgcgaagttgtgtgcaccgctttctccatcagctcctcggcggctccatgttcctctcaggaatgtgttaacgtcacaggcgttactgagagcctgctttgcctgaggaattgtgctgggtgctggagttacagaagttagcatgacgccgcggtttctgattgctacgtttcagttcctttatgtgtgtcactcaggtcacttttcagtccagactcagtctcattttcggtcacttccccacccactagactgtagtcacaccatttcctgaaacacccgcattgtcacgcctctgttttccccccactttttctataaaaccttttccacaatctattagaatgatttgttctctctggctttcataaaacttagcaaatgacttgtatagagatgatcatgttttgctacaataaattgcttttaaaattaatatgacccactatattatgcataacctgagagcagagatgtgtcctctttatgattgtatttccaagggactaagcagaggacccagcataactcagtacaatttggaggaattgttgggttgacttatttacaaaacagagataacagatgcctcttttgactacatcacaaaacaactagaggcacaaataatatcatagatgtgaaaacttttagaaaatataatgccatataaacacaaggtgacaccatgcttgattatatgtacacattacaattttgttctgattatcattgcattgttgattttatgttccctgagaaagttcccacattagatattcatgctgagtagtcgacacttgctgatacactttgagactgagtcacaaacaaagttcagggtcggcattagataaaattgtcttcagtggtttctgctcctacttttcccaatttttactcatcttctattttgacagtcttaccagggtcaaatgcatttatacaattcctctttttgtaggggtatactttttatactaacatgctgatatgttcctaacaagttcttaagaattggaacttgtacctaacaagttcttaagaattggaacttgtattttataagagaaagaagagagcaatgatgaacctgaaaaatgaatcctgttttgatattgtactataattatgtaagatatgacccctgacagaacctggggacagggacctgtctgtactctctttgtgacttactgtgactctataattatttcaaaatcagaagttaaatctctcataatggtagatctgcatatgccctgggccagcatacttttgtatctgatgggcttttgatctgttttttggtcctcatcaaagcaaatgtctgagatcagcaaggaggaagaggtgaaaggaaggccacaggatgggctgtcagcgctgggcgtaggctccctccgcccacttcagcctctgcctcatcttatgctctcagtgaggacttctctgctccatgcatgcaccacctttcacttattatttatatttttacatctttattttagtttctgcctcctccacatagaatgtaagttctatcatggcaatatttttttttttttgtattattgtatcctcattgcctacagctgagttaggcacagagaatgcatgcagcacatgtttgttgaatgaatgactccttgtagaaaatgaaagcccgaaaataagccgactggttccccgagagagaagaaactcaaatctgcccatcctcataaaggagcaaacctgtcttttaagctaaggcctttttcctgtgttcatacttcagaaaaagaagacacgactgataacatctgagaggaaggaaactgcattgtgctggggatctgcatgtcacattataaaaagcaatttttttttttaatagaaccagcctttcaaacagtttccagagatggattatcctactttacttttggctcttcttcatgtatacagaggtaaagatgatctttatattttcatttaaaagttttgctcctgtttttgtttgtacagtgtggcatattcagaatttacagtgctctttagttggctaggataatttctcacttgttcagaaaaa

SEQ ID NO: 20020 - DNA, 2300 bp, Homo sapien
tcttgggttctttgtatttattaccatatttcgagagcctccaagaggaagctaaataaaccagagaggataaacctctacagagaaacaacaaaaggtatctccattgtgcctcccttaaaaatagcaatagctaaataataaaaataaaaaacaaaatagcaatagctttattatgggtgataaggagaaggatgtgtgtgtgtgtgtgtgtgtgtgtgtgtgtgtgtgtgtgtttgcctgtgaacactgaattagggagtgaccatgaaaaactaatttgggaaaaccccccagcctgtatcaatctgcattttgtgagtcagggagtaagcaaaagatactttcaagctaggtccctgtaggtatgagcagcagctactgtcacgatagataggatttgcattcaccctattgtgaaccacgtgggtagacggtgactgtttcagccgatgtgtgaggttcacttcagggcccactgaataattttgaggaagagttttgactcaaaagaaaacttgtctttgggtgtgtcctgcaaaaatcagtgggtgttttgggtcaagactgtttttgtctttttccttgagaaaatcgaaaattgaggcaaaaaagcagccccaacgatggcagattggaaacaagatggaattgggattgtgatcacaatatggaaaccttacagatggaagtcattgcatggcttcgtcctattctacaagtgctgactgagcacctggcatggtcaagggccctgtgcaaggatctgatagagcagggataagagactttacctgggcctggaagtgcctgtcaggctctagtaaaaaatgcagcgagtgaataggcataataggatgtggcaagtatttcagtgaggacatatttggggttctcaggaaactcacaggacagatgtgggccccagggagagtataagatacattggagctgagacctgctggatgggagagggataagaggtgaggaaactccacgtgcaaaggccctgccccattagagcattgtcctcaaattacacaatgtaagttggatgagcaataaaggctaggagtgagcagaagacttataagacataacactgggaaaatggcagtcatcaatgacgcaggccttgcaagtcagtaagacatttggatattctcttggggacagtgaggcattgaagggagtgacgagagtcaggcaggtgtttgagaaggctactctggctacctctggcccacaataagtcttagtaaacacttgtgtcttgagaggcagtattgcactttcttctcccttgctttcgtatatgcggtggtccagcagaagagaccagtcctgtacctgcgatgcataattaaatgtgcagggtagggcagccccatgagtgccttctcacctgtcaaacgtccttccttcctagtctttctatgaattttacacactaaagcctcagccacaatccttcatggtggtttaaccagcagggaacctccataacctaataaatcaaaggaatcaataaaactaacgttgccatggcctggtgcagcaaaaaacctagtgtttctaagagacaaaagctgctaaacatgcagggttcgttctcaggaaacaccgacttgtgtactttttctgtcggagaatgggagacaaagaaaaaaaaaagagtatctagaaagtaagaccgaaacatacttagatatgggcagagataaggaagcctcttgacttaaaaagagggctgaatctaatgtgctttgattggcaggaaaaaacacgaggaagaaaaggcaaagaaacaaactgatttcggcggggagtgtagtttctatttagagctagaacaaaggagaagtgcgtcctttcaaattatagattctttgggggaaaagagggacagaactttatctgagtttggaatgagtctgagtagctgcaatagtaaagttgcttccagaagcaggtaaacttgacttcaaaaaaccccgcttcatgaaatattagtgattcacttcagttgctatctgaggaagttctggtagagagaagagctcaagagcatgggcagagtcagctcctgagtgggctgaacgctcccctcagctcctgcagtgctaattaagggagggagcagcggggagcttgcagtgaccaagagggtgttgaggctaggaggccacgataaacaggatacgataaaagtccttaaccaagacgcagatgggaagaagcgttagagcgagcagcactcacatctcaaggttagtaaccttctcagaaaaaagactgga

SEQ ID NO: 20021 - DNA, 2300 bp, Homo sapien
tactgactcatgagtgtcatcttaaatttgcaggaattttataaaaattccagttgatgttacattgttattttgaaatcagccacagtgggcatatcacaccacgtaattcagcgaactgtacaaatcttggatcttttctaccctcaccacaatcagttgtttatttaccagcacatggctggatattttcttcatgtatatgttcatgtatgtcatatatgtatatatatttgaatatattttcttcatatatgtattcatatacatgcatcacttccaaaatgagacattctcttgaactggatatatgtgattagcatccataagaatgagagattctgcatatgtgagagcagagcgggggcagtgctttccaccacttccttatagagcatgttggtgggaagctaagtgggagcacccagaaggaatgtaagtgccaatctcgagtctggtctgtgactttgagctggagacctattctctttcagcttcatttgggtttaacaaaataatctctaagatatgttcaactcttaatctgttattctggtgctatacttaagaatattttgatgaagtgtgatcagactctctttccagggacggattaatcaagtctttttcctctgctctaattaggaaatgcctgagacttcctctgctgcattaagtaataatgagcccagacacttaacacttctacttcttcattactcatctgtaggacatagaaaatgcagcaggtggtattgtacaactcaggctccgaaatatcctgcttgtttgtttttttttctaccatggtatacatctctacatattctacctggtgtaggaaattgtctgaaaacatctttagaagcagcaaaaaaaaaaaaaaaaaaaaaaaaaaggagtgcccacagcacatttatatttgagagcactgacatctgctttatcacccttgtcagtcccaaatccagcaagggttgaatctaaaaactgtcagtttggctgacagtaggtgtgagtgacagcacatgcagctgaaagtgggcatgtaattttacagtttacttattgtgtgggtaatgttgataatatttctgtagctcatttcattcttaacactcagagtccttttgtataaaaacgttaagtttattttatagattaaagccaacatcttgattttggtctaggaaaacctaagagataaactggagtagatttaaacagagagagagaagagttattctgtgcaatcataaaagttaagtgattgcatttcatttctaaaatgtccacctaactgtggtttccatgctgccatgggctgcagcttgatgcagcacttttatactttgcatatagattagtctaagcaataatttattatctttcttatagtgaagggtttggtggggttttttggaaggggctttatttggaggttgaaaagactcttacagttcaaataatagagctttctcatctgtaagcataatagaatgacgtgtagccatcagaaattcttacttgtaatgataagtacctgggataaagtgaatgtaagatgtatctatagatttgataaaaacaacaacaacacctgtagctataatgattcaaaataccctcactacttccagagttgttaactagtattcaagactgatttggatttttgccttttttccttccatagggtagcttttaatagcaaaatcaccagaaggcagagagaagagaaaactcaagagccctgaaataatctccaaacttaattaccaattctaaataattaagagttaactatagtatacttcatccatcatgaggaaataattagcaggaattaaaacttgagcactattttgttcttcttacctttttcacttatgcttggaaataatatagatggaatattcagaagctattagaaaggagaaattaatgtagagggagagtatatcagaatgttagttaattggtcaccaagggactaggaaaataatgaaaaagatgagaagaaaataatattctctctatttatccacagagtaacttcttacagaacttcctctctctagcattgccaaaaggaggaaataaacatctaagtaatctgactattctttggttgaagttactcctgaatatatcatctggagaagatgggcaacaaatgattctgaggcttgatggctgtctagacttactaacagagatgagcaaatacaagcacaagagcagccctttattgcctcttcttatctttcataatgtttgcttcagtcctgcaaataaac

SEQ ID NO: 20022 - DNA, 2300 bp, Homo sapien
agtgcacagtcacagaaagtcagagaagggcatgctcagttgtgtggaatgctattgaaaattctgctaaagtgaggatagaaaaaatggctgttggacttagcagtattgatgttcttttggaccttgagggtaattttagtgcagtgccagaacagaaacctacttagtgtgagctgaggagagaagatgaagaagtagaggagacagcttttccaaaatgtactactcttaagaggacaaagaaatggagcaacagcaagagacagatgtggagtcaaaggaggagtttttgctcgtttttaaagatgtatgtttttaaggcatgtttattaacttaagggattgggagaatgaggtgcaggaaagagtgcaggtaagagcccagcctgagagggtaagagaggtgagagctagagcacagctgacaacagaagcggagggaaggctgagaggaaggatgtggatttaggagggctggtagacttgatgggaatgatgagaaaattcccattttgaatacttctgctttcttcatttaggagagaacactgaccactaagaatgagcaaagacaaggagtagaggtgatgtgagaagaggagaaagtgtgaagtagctgtttttagaggaaggaaagtaaacacaccagagaagcaaagtaggattgctggcagtgttaagtaccacttatggtcataaatttaagaaaataaattagaatttatggtcataatttatggtcataaatttaagatttaaattttattaaatttatggtcataaatttaagatttgactagcaagtttttgtactttcttctaacaacactcagtagcccagcaactggggtctctgaatatcaaaggttatacagagaagggactggaactcacaacagttaaggagcccatctagttactgccagatgctgttgatggcttattcctttgaataatctgccagatgctgatgatggcttattcctttgaataatctgacacctctggagctgtccatttcgatacccaactcaggttgtctccagtcagcacaaagagatataaacagaccttcaagctcttgaacttgaactgtcattgaagcatatgtgtacaggattgtccttgccttcattctgtgctgttaactttctccattccttaggtctggtgggaatgtctcctttcagtgcattttccagctccactagtatatcttttgtttgtttactcatcttttatgagtttcttttacagaatgtatttgattctgatcagtttatacttaagttggcctcctcgtatgaactttcacaagtcaattataccttaggtttatgtataatacagtcttattgatttaacattaaaatatatttctaatttttttttctccctcaataagtctcattcagttacttaatttcctgagaaacactgaaccctggaaagcctgtagatgccacttttggctcctgctatgctaagctgtatgaccttgaacaacaaactggcttttctgagctccatatctttgttgaccaaatatagaaaatagtatttgttttgtccgctttcccagggatattatgttccttatttgtatgttatgtaaaatgaaggcattagacaagttatctcccatttctaaaattctgttcctttacacaggcctttatttagatgttttctttagcaactattaaaaaccctagtatgtttattttattctttttttaaaaataaacctggtgtcttaaagtgctttagtgagataattaggccctcagtgaggacagtatatctattaggttgactgtagacaccaacattagcctccattgctaatttgcagttcacaggttaatggcctagtcattttgttagacagatatgctttgccacttagtgtcttcaaaaactaaacagggaaactgagaagacattgtgataggctgttatttttgaaggttgcagttctctttgttggtcaagttgtggacaacaccctgttcaagctacacatagaggagccgtgagcaactctctgatgctgtgtatcctaaagttggcttcccagatgccactggagaacaccacggttcagcagatggtttttatgcttctttcaaacctggccttgtcgcatgactgtaaaggagtaattcagaaggtacgcacttaaactccccacatatcttaaaagggtactcagtgaaataatctttccaatcaaaagtttacaactcaatttctaagattattatgattttgaggcattttattttaaaggatta

SEQ ID NO: 20023 - DNA, 2300 bp, Homo sapien
tacaaaaattttctcccattgtgtaggttgcctgttcactctgatgatagtttgttttgctatgcagacgctctttagtttagatcccatttgtcagttgtaagcctgtggttttataaaggtacatatgatatgattataaaacaatgagataaattttactgtgttggtatagaaaccagtatcctttctgacatatgtacattgtatgtggatacatcttcatatataaaatctggtatacatgataacatggaaagttaggatacaaataactttctcatcacatcagaattttcttatagtacagaaatgccaagagtatagtataattatttttatgtttttcatgatagttgcccactaaaataaacatgattattttaaaataactaatctttaatttttcatgaagcctcctaaattttagcatagaaaaaagctgttttttaacataaatattcataactgacatttatgtaacctttttaaacaacctacttaaatgtactcaaaattgagttattttaagcttccaaagtacctgctaattcaactgaccgattttttttaacatttattttatcatttgatcattcagtaaacttaaatgcatgatacaatttttaaccaaagcgatagtaagaattatggcaaatgcatgtttaacaaggaacagaattgttaattttctggatgtaggagttctgagtctaccatggagtacagtgtccacgtaggatatcattattttgtttaaaatataataattgaaagagattgactgattaagacattgggattttcttcttgtatttattgggggaaaattagtttatcacctgaatcaccaataatatcaatagaaagcatgatgctacccacattagataaatctggcctgcagcttgttttggtaaataaagttttattggaacatagccacactcacttacatattgcatatggctgctttcatgctacaaaagttgaggtgaatagttgtgaaaaagccagttacctgcagagtataaaatacttactacttggacctttacagaaaaagtttgctgacctctgacttaaacttatttatctaacactatttctttagtgataaaataaatacatattaaattcaaaaccttccttcaaaatatgtgtacagttttatgtaataatagtactaatcaaaagtaacttactgcataaatggttttcataatagtaatgttaatgaaaacattaataacaattatcattttttttgccatggttttatttttgtttatttttatttttttaaatcaattgccatctcatatgcccatatacatttaaaacatgtcgtggtcactccgtaacttgtgttatctataagagtcttttctcgaacttgactaatatttggacatcatttaaatgaacataattctcatgaaaccctactgctgactactttatttttcttatgtaactttaatttgtacaagccaaaatctaagtaaaaatttttatggttataattatcacacaagcataaatctaaaatataaaatcaaacaaaattataaatccaatttttcaagtttataaaatgtaaaacaacacatgtaattttgattaaacaaaatcagttctcacaacaggaaattaataatgactgtttcagtgtaaattcctttcagtttggtctgttctttccactctgtattaagtttgtgaatcagttcatgaccactcatgtgctgtctgaactgctatgaaatatttgtttgtacattgtgccaacactgcatactaagtcttgcttttaagttctggttggcaccagctcctttaacagttgcaacacaatcacacaagttggtaatctagatgatccagagtatagttactttaaaatcaacttgatttcctttttgttgaattttgaagaaattttcaaacattcacatctgaaattattcctttagatatgttctgcacatgtgcaggcttgtctgccacgtgtcctgccctgtatactgccagcttgcaattcctttctgttctcttgaccgaagaagcaaaagggcatctccaggctaagagcaaaacacatttatgctgtagtccaacagtggcttcacttcttgatgactctcaggaaaatcagaaatctctagaacaacttagtgatgtaatccttcaggtacgtcatttcttggtttttcaaaaactttatttagcgtttaaataaattgactttcagtcatggtcttgttaaaaactgtctcagtcatttaaattaagaaata

SEQ ID NO: 20024 - DNA, 2300 bp, Homo sapien
aaagcatcttttctaaacttgtgtatcccttctgtggactatactaaggaaaatcacatctttattaatgcctgacctttgtcatgaatcacaactttgctttcttctaatgagccaggtatttagtgggcccttataagctttcttttcccacaccgatcgttgaaaccgcaaaccaggtacctattctatttatatcagtaataaggccttcttgagtctttatcagttgaaagaatgttcagtgaaatgataaaggatttcagcatcattatccccttaacttttcttatacaaccaaaagagttgtggcaggagccagatatattagcttgtgcatagtttgtgatatcagtcttggcataggattattttcttcacagaactataaatgttgtcttgatatctgttgacaggaacattttttcacatatctctcattgccaaattgtaggcaaatatatttttaaaaataaacaagcttgctgggcgcggtggctcacgcctgtaatcccagcactttgggaggcagaggcgggcggatcacgaggtcaggagatcgagaccatcctggctaacacagtgaaaccctgcctctactaaaaatacaaaaaattagccgggcgtggtggcgggcgcctgtagtcccagctactcgggaggctgaggcaggagaatggcgtgaacccgggaggcggagcttgcagtgagccgagatcgtgccactgcactccagcctgggcaacagagtgagactccgtctcaaaaaaaaaaaaaataaacaagctttaggttatttttacttagtatctggatctaatactatataaaataaggcatttgatgtttgtttatgattgacttatttagactgaacttttttccagatttactttttagattatgtgcttagcctacattttttagctgcagctttctcacttatttcttggcatcatgactgttatacttacttaatgtggtgaaagatggttaagggctcaagttaaaagggggatttaaaaaactgtatattccatttttagtaatttcttcaaatttatattctctttactattagaaactgcaaatgaaaataaccttagtttttgctttcatttcatcatggtaattctaaggtactctaagtgttaagatatatacacaatcaatgtacaaatactgtgagctatataggatctgagtctggaatgatggtttataacttctatggatagctaatgttgtgttgcatgtactgatatggaggctacccaggtatgggcacttcatgttacttcacagaagagaaattgatggtaaggaaaagagttatctgacctcaccacataagtgtttttcaactaagaggtgcttagttgaacacctcttagcgcaaacacatcactttgcgctttttcagtcttagaaggtcggtctgctcattataaacctgtaggtgaaattgtacttgctttccacggattttgttatatttaatgttgtattctgaagcaatctcagcaaactggcacaattttttagtgttcttccttgataggaggtgaggtagagaaaaatcttttaatacttctaattttttaggcactattaaaatttatatgtgccatttggaacattaaaaatatctttattgtcaatcaagaaatgcaaaatatcacaataaattatagttaaggtggtatattttagcctttctaacatttgggcaatgagggaattggccttatgggaaccttaaactcctaaatgggcctgaagtcaatactgctcctttgagttactgatttatgtaaatgataacaattcctttaagaagtggaaatgccatttaaaaaaactgctgtaactcccaagatatggaatcttttctagttatcctaactagtataattttgtcttaaacctccttgtttaaggatatcttgtgtgtatgttgcctgtgtttcattttccgtactgtaacattaataagtaaaataatttactgattcataggtggcaccttcattggggagtactgaatttcagccacttgtgcagtcaacaacacttctacctgaagcctcccatgaccagtttgtggctcaaggtatccttttagtgaagacattctaccttcaaaaagaaaaatgacaagttggtccagacagatattttgaaagtaaatgtctaaagaacaaaattttaatgaaataagttgtagaccattatgaaatacatttagaaccaatatatcagaaattaataaaataaatgctcttaactaataaatggaa

SEQ ID NO: 20025 - DNA, 2300 bp, Homo sapien
agagaaagtggttcagagaatgaagcttaagccaaggcataacaggtagaaggatgttaaaagtctatgggattggaagccgaaaagataccaggcacacagagaaacaaataccacatgatctgtcttatatatggaatctaaaaaagtcgaattcaaagaagtagagtagaattgttaccagaggcaagtggcaggtggatatgggtagggaaaagggagacgttgctgagaggttacaaaattccagttagacaagaggaatgagttctggtgatctcttacagcatagtgactatagttaataataatatatgtttcaaaatagctaaaagaatagatgttaaatgttctcaccacagagaaataagtatttgaggtgattggtatgttaattagcctgattggatcattccacaatgtatacatgtgtcagaacaccacattgtatcctaaagatacatacaattattatttgtcagttaaaaataaaacaaataaatggaatatagtttggtgcatgttatgtgacagaaatttgatactttgaatccgtaaatggatggtcagttgactcacaaccacttgcagaatatattatttctcctctagactaaaatgccatattcaacaaatattatacaaattaattttttttttaaatgccaggcaaagggataggccctgagttaggaaagagtgtcttgtgtcttcaagaggaattgaaaagaggatagtacacttagatttaggggatatgagggtggttataaaatggggttacagaggtgatattttaatgttacactggatatcatagaagacttcttataatctttgtgattgttaaatcataaatctcccaaagatctatggttgttagaatcacctctcaattttcataatccggcacttgccatcctactcagctgaatgtcattttggggatgtgagaattttaagtaaggaaaaataataatgagacaaacaccacattactaagaaatacagcattatatatccctggtgttggactgcttagtttagtattcctgttttaaaacttgctagccgtgtgactgtggaaaaacgacttaaccatatttttgcttgggtcttcttgtctttgaaatagaggtgcctacttcataatgttgttatgaagtttgacagaaaccctgctgttagaacataggctggcacaaggttggtgctccataaatgctgagtattaagattcgtattattgtcactcttattaacattttgatgcaatggctttagatttataaaaaataaaacattacagataaaattggatctcatatctcttgctgattgctttttaaaaaaaacgatttccaaactacttctcccttttaaataaaagttttattgtctactaatcttttagctctcttaaaccagtttttttttttaaagaaatcttagaaaattggctcatatccttttgctctgaacttaaaaagaaatttcatcctaagtctaccttcagtgttttccttgcctgttacaaactctagtagcgtccttgcaggcctttttttccccctcactttattaccttattttttcgagttggtcagaattaggtttgaagtactaattcttctcatcagtgaaacatgacattcccagtatgaaaagcaagtttcactgggcggttattagagtcagtgtttttccccttggtatttttttggtactttttctgaatttgttatttttctcttatgatatttgtcacttctagttattttagttacttgtccacatgttttttccactataagctcatgttcttgaaggcagatacccagtttgtttcaactttgcattttccaaagcatttaaaacagtgtctcataaaatagcatcctcacaagacatctgttaagtccacatatctatgatgaacagtggtattgtgtattttaaagcgccagaaaccatgattattgtcttttcattataggtttttacaggtgcttcctgcttgcactgaagatgagaaactgctaatagatatcatacattttttaaataaattaataaaggaacaaagaaaaaattcttcactagaacttctaaactggattctcgaattacttcttagacatgtaagtggtgttaaggaatttggattttaagtttgggaaataacttatttgtagaaatcattaacattatattatggaaaaggataattttatattgtctatgcttggtaaagtagtcttcatgtaatgaatggctcataacaacatggctttcctgat

SEQ ID NO: 20026 - DNA, 2300 bp, Homo sapien
ttatgttatgacagaattctatagtgtatttcagggttagaaattaacttagaaatcatttactataccatctgtgtgaggtctagagagatttagcaacttggccaaggctataaccaaaaaatggttattgggttatttactttgctactgagagagaatcgaaacttccttacctttgtttgtttctgttttaaataatcacagacctatacatccccattgtaaaaattcaggcaatatagaactatacaaattctaaaagttttcattttcttctcgttctcaatttccccaaagaagactgttctggttatcattaggaatatatttttccgaatgattttttctacatacacatgtagttttcattctgtatattacagtattgtgttgcttccttttttcaactggaaatgtaacttgaatatctttctatattatttcatgtgagtatacattctttaaaaaaccctaaaaactactgcactggtgttgcagaatttcagtttgctatgttactgggtatttgttttagatttttcaccatgacagtaatcatgttgtgtgatcatctttgtgcattcagtgttggaattcctaggtcaaagagattttataagataatggttaagttcctttccaaatcactctcaccaaaggtgtttaaaaatgcttattttcattacaactttgccaacactgaatatgtctcattaattttttttaatcttataggtaaaaatatataattgttttattttcttattttagttttagtgaagttatcttttcatatatattcaaatttcttcatctatggattacttattttcctgttgtatttactttctttttagtgacttgtagggttttttattataagataggcacaatccttatgcttgattttatgtgattaatattttctctcaacttttctatcctttaaatttatttattattatatttttaaccttaaacttaaatattttatggaaacatatagaacttttctgttatggcagttgggcaattttttatcatgctcttcaagtaggactttctctagttccagattgaaaacacttttcctgtgtttcaagtgttgtttaaaaaaattaaatttgaaatcaggcaaaggcattgctgtaattcttatttatttggaaatattatggttcattctattcatcactgatgtgaaatgtcttttattataagttaatttttacatgttctctgtttctttactttttggtttatggctatttttaatcatgccaattacataaggatgattttcttttcctgcagttaggaaaaatctcttctctcaaaacttcttattgctgcttccctgaatttgctaactgtgtattatgttgttattcctgtgagataacatcgtacttctttgtttagaatttcataggtttcaaggagattgtagcattgggatcattacagaagtgggaactgagacttaatgttaaagaatctcaccagggcatttagctaagtagtaagtggtagagctagtgttaagtctgtccattcagagcacttcccttttccatcatcttgtcataattaaaaggaaccaaaacaatgacacagcccaaggataacattttaaagtcaaatccaagttctgtgatcacatgtttgtagtaaagggcaaaagttataaaataagatctcttggtgaggaaactttagctagaattatctgactcggcataaccttcttagaggctgtatcagtttgtttctctaattacctaagactagacagtgtctagtgagtgtatctacaagtgtggctcctggactggcagcatctgcatcctctgagaacttattagaaattcacattcacaggctccaccctaaacctatccaatcagaaactgttttaaccagccttccaggtgattcttgtacatccacaagtttgagatgaaagcctgtgttttagtgtcaccttatctgggtttatgttgcatttcttttctcttcaaatcaagatattttaaatttgaagttcattctttctagacgtacaaatatttcataaagttgtgcttctttttattcagtttccttaatatttcatgaagattgtagtgtcgtgactgaagttggagcactattttgtcttctattatttgatgaagtatcgagaatggatatgtggtgagatataagaatttataagttttttactcttaactatttatctcaggtatctgatgtaatcttatagcaaggcatggaaatttctgatttacgaagct

SEQ ID NO: 20027 - DNA, 2300 bp, Homo sapien
ttgtttgaaaataaggacatggatcctgaagatcttgaagaattagggataaaattcttactcattttggtgcctacagtagaatctatctgaacctatttattttctttgaattttttttttttttgacagccttctcagttgcctaggctacagccttgatctcttgggctccagcaatccatctgccttggcctcctaagcaactagtactataggcacatgctaccacacctggctaatatttaaattgttttgtagagatgaggtctcactgtgttgcccaggctggtcttgaactcctggcgtcaagctgtcctcccaccttggcctcccaaaatgctaggattaaaggtgttagccaccgtgcctggccttgaacttgatatttatgatttttcttacttaccactgtagtttgttttttttcccctttccttttgccatgttagtaccactgtcttcttgttttctctgtgatagaattttgaattgtgtctttaagttgaagtatttctgtggcttttttttttttttgagacgaaatctcactctgtctcccaggctggagtgcagtggtgcagtcttggcgcactgcaagctccacctcccgcctcagcctctcaagtagctgggattacaggctcgtgccaccacaaccagctaattttttgtatttttagtagagacggggtttcgccatgttggccaggttagtcttgaactcctgacctcaagtgatctgcccgcctcggcctcccgaagtgctgggagccactgggtctggcctctgtggcattttgtgtggtcagttaatcacacatgtgttcaatgtcctgtgtgttcctagtggtcaggctgctacaagaggcaggtttataataaaataaatacattagccctacttttattaggggaggtagagctacaaagaagtaatcaaagaaccaggcaacttgattgtaactttaagcttactcagagttaaataatagaaagtctcatgtggcatttagctagggaattttcctacatttctccacctcggctgacatttttaggttgcttgatgagaaagtggacttaaacaaatgtaaacagtctcatggtctctgaatggtctaatttcttgaagctgcttagttagctgttgagaatatcattgcacatgaacttgacatttattgttccattctgcttcttttgtagggagagaagaatctcttagaattagtggagctggcagaccaagccttgcgtagcttttcctatcatcagcatttcccgctaataaaggaaatcatcagcatttgttcaaagatgtaatattttctttcttaatgtgattacgttattattggacacttagggtgtgtgtaaacttagaaacagtgaaagtgaaactgactgtatatctttgttattattttttagtttaattgcttttatatgtgtctgatttttaaagggtatatgtacagctgcattaggatacttaactgttatattcaagattaaacttcaaaaatgtcatgcctacaatcaaaatgaataatccttggatttttatacatttgtttttggtatccatccagactattcacacacattgtttatttatctttaaagttttaattaataacttaaactgagagttttgtaacttttattactttgtacctttttcttatgtggatttttagaaaagactgtgtattggttaatttattttgaggacatcagcaaatttctatttagaacttagtgtctttattgcttttggaaagaataaattctgtgatgtgataatcattaactgagtaggggattttaaagacattttgggtttttaaaaatactctttaagacagaacctcctctgccctgaaacaaataagtgcttaggtgagtacttgctagtattggttatttttaataagatctcagtttgaggagttggagtaggaagaaatcccttccagtatgctttgcagtcttttgcttactaacttacttgcctcacatgtcttggttgttttaccttttcaccagctggaaatctgctcaggccagtccattactacaaggagaaagtcagaaggtgcttctccatatgttgtctcacccattgccacgagtgaaagctgaaacttaccactgctgtctggaaatcacgaaggtgaggttttgttttttcgtatgttttgtttttgagaacaaatagtagactctcttgttataccttcaaacttaatttacttgaccttttgtatgagatataagaactatatcccataaaa

SEQ ID NO: 20028 - DNA, 2300 bp, Homo sapien
caaatggataagtgtttactgttaaaaggaatggttggagaattttataaaataaggactccttcaaggtgaacaatttatggtatttgtttgtgtaaatacagatttttttcttttttttttttttttttttgagacaaggtctcactctcttgcctaggctggagtgcagtggcacgattatagccttgacttctgggctcaagtgatcctttcgcctcagcctcctgagtggctgggaccacagatgtgcactaccatacttggctaagccttttattttttgtagagatggggtctcactatgtttcccaggctggtctcgaactcctgggctcaagtgatcttcccatcttggcctcgtaaagtgctgagattacagacatgagtcaccatgcttggcccccagtgcttggcacccagattttcatacaccaactctgcttaaaaggattggtgtggtatttgtatgttaccttatccttgggtgcaaatgtgttagaaacatattagtctctttagtgtcattctaaaaaatgttcactaagttaagcattggtctgttggcttaattattttcttgcaatactgctactactgttaacaagctaatactgattcatacctgctgtgtgtatggtgttatgccctgtgctttgcatactttgtctcctttagttgtcctagaataggattgatattatatatagcattagtattattattatcatcctcattgaggtttagagaggttaagagcataacagttggtaaagagcagagctagggttaaataaaatgataggagagtctatgctcttagtccttatattgtagttggttgttcagccatgtttttctctttctcctgaagcctttctgcctcattctcttgtgtgcttcatgcttctaagttttcactcctgagtgaacagcttcctcactgaaacttcctttcagagttacagagaagcccgagttgtttccatattttggggtgcttggtatcttgaaattgaagaaacgacaaagttggtttataatttgggcaaatttaaatgttccatagcattaatatgtctcttgtgatccagcttcggttgtggataacatcaaaagacaaaattttgaggctctttgtaagtgtgaggctctagcctttctacactttttaaatccttactccagcactttacatccgaggtaagaactttttaatgaagaaagccaaggacaatgggatgttccgtttttttgggtgcatttttgaagtcactacatgatgtcgaatgtactaagtgaagtaatacatttcccatgaggtttttctagaaacatccttcatttactaacactggcttactcagaacagtggtgaaactcagaaaatctaggaaacggtatgaactattggttttgtctctacacgttgattacagaagagctttcctataaatctgcttatttccttttggaaatgaatgggttatcagtgctaatattgattcctactataggaatgttgacatgttttgagatatcagcctgacaagcaaaatatagatgcatttttggcttcatttacaatttagagtctttttttttttttgagatggagtcttgctctgtcgcccaggctggagtgcagtgtcgctatctcagctcactgcaacgtctacctcctgggctcagaagattctcccgcctcagcctccccagtagctgggattacaggtgtgtgccaccatgcccagcgaatttttttttttgtatttttagtagaggtgggatttcaccatgttggccaggctggtcttgaactcctgacctcaggtgatctgcccgccttggcctcccaaagtgctgggatgacaggcatgagccaccactcctggccttgagtcatctttatggaatttaatttcgtaaatttgtcaaagtttctacaaatctgaccagagttgaatgaagcagtagagttgtgacttgtatgaggcttctaatatgcgaggcagcagatatgcagtaaatctgtttggggattgtttctgtatgcaaggtttatcatttgtttatcttgcagtggaagtagtagtcatgctcatgtaaactccaggatatccgttcattcacctttggatatgggacacatagatctgccagagctggaaactgaagacacattggaactacaattccagcagctcagtcttccccagttttgtgtctccattctggaatcagctgttcctctcttaagaacaggttagttgttttagaaatcgtaattctgatataat

SEQ ID NO: 20029 - DNA, 2300 bp, Homo sapien
tttacttgtaacatgcttgttttaagtcaatggattttttatatttcttctacagtattatcgccccttaccccactgcatctacagtctctcatcacctaagattgttcatctcagaaacatcattgacaagttatttctattatttttctgtattgtcatgtgttttttgaccttgacacttcaaatccgtaattaacaccttccttcctggataactacagacacttctgagttggtgtaactggttctgcagtgcccactgtggtatgctatccatcaggacatgtggtctttgggtcaaggaattcagccactgttacaatcttggccaggcaggcttaggcatgggctagtggaatcttggtttaatatccgtatctctttcctcctactttccaatttcctgctgatgcctcctatcggcggcaaccaactggaagccagagggccaggcagcctggatagtgcagtctttttgcctgttcaggtcagttgatgcagagctggaagagctgggaggaaccactagaaggtggaatggagaatatccagcatgctagcagcaatcttgcccttcctctcttcttcccagagataatatggccaccttgaattttgttcttttcccgaatttgacacactccgtctggattcttgcctttgcaaatacaggtttctcctgcaggaatttccttacccaacttctttgtgtggcaaactcctacttactctttaagatccaactcaaatatcatcactctcctattgacacacatgaggaggcagcaaggcactctaaatagaacaaagaaacatcaggtcagctcctcaatctgtcacttactagttaatgtgactttgtgtgggggtacttttgtgattctaagtttcctctttggcaaaataggaatgggaatacagtaggcctttgctgtccactggttgcacacagagaattcaacacacgggatggaaaatattcgggaaaaaaccccacagttgaaaataacaatacaacaattaaaaaataatatgaataaaagtacagtgtaacaactatttacatagcatttacagtgtattaggtattgtaagcaatctagagatgatttaaagcatataggaggatgtgtgtaggttatatgcaaatactacaccattttataaaagagacttaagcatgggtggatttgggtatctgcgggggtcctggaaccaattacctagggataccgagggcccactttacctgccttgacatccctttcccagggaacgtgaaatgatcagaccgagaaaatgcaaatcattttccaaatgtaattttgttgttgttcttaccgctgcttataattaaaaaaaaaataatttgctcagctcgatcactgtgcacggtgcaaaaaatcaactttggtaccattcagcaaatcatacccccacgtcccgcctttattttccttttttgcagcccggtttctctcttctgctcactcatacccgcccaccccgcttttgtagcttgcttgttcatatctgaacttgggtatccaaagacactgcttgactttgcaggtacatttcacagttaaagagggttcgtcatttagtagtcggggatggggagaactgtcacaaagcaaaagtctacattctaaatcgtgaagttctgggagctgagaatcagattggcagggccaagaacgaatccgtcgacgagccgggaggcggggctcctgctggggcctctgcagcccgcgctgggttcccgaattcccgcgctgtaagccggaaccccaggccagcgggcgccgcggcgggcccggagatcggtgcaggacgcacggcctagccagaactacaactcccgacgtgcgcggcggccaacgctggttctatccctgcttgttgcttttttttttccctccgcttcttgcgacggagactgctgtccaggaagtgcgcagtagtgattctagagaggctggaagctctcctggcgacgctggggccgcgaagggctcacgtaatgactcctactcctggtgagcgcaggcgttgcggaactcaccgtcccacaggacgtgtttccgggggtacattaattgtggctggacgcagtggcgcggcagtttaattctccggcggctgcagattgacgggacgagatggtcctggcagggctcatcaggaaactcggtaactgtcagcttgcccctcgcccaaggcaccccccgcgctctggccacttgctgagaatggtcgtgtcacgtttccgcggccggccgctccgcgaccgc

SEQ ID NO: 20030 - DNA, 2300 bp, Homo sapien
tattacctagattaggcccctaggggtttttgtgcattatttcatgtaatcttacaactatttgacataattaatatcgagccccctcactcaccctttacaaaagtagaaactgaggttccaactgagaaacttgtttgaggtcacacagctgtatgacctgtcaaaactgtgcttctgcaccagctctgccagactcagaaccccagggtcttaaccatacatttaagtgtctcctaaaagagtcaacacttccccatcctgcacagccccattgctgcgtgaaaggctcactaaccccctgctgcacagctcctactggttgtcattttagaaaatatagggagacactggaactccgaggcagtaggattgaaacgtttgcttcttttcttttttttttttttgagacggcatctagctctgtcacccaggctggagtgcagtggtgcgatctcggcttactgcaacctccgcctcccgggttcaaacgattctcctgcctcagcctcctgagtagctgggattacaggcagctgccaccacgcccagctactttttgtatttttagtagagatggggtttcactgtgttggccaggcaggtctcgatctcctgatcttgtgatccgcccgcctcggcctcccaaagtgctgggattacaggcatgagccaccgttaattactgtttgttgtgtttcccactaacttctctgacaattctatttcaacctacattctccaatcactgtaattagatatttgagaattgtgttgcatttcaatcacggtaacaataatggtagtattttattaataaattcaagtaaaaactgaagatgacaatgatagtgtatgatacatgacatcaactttgcatcacctaaagatccaacttttctgttatgaatctagatttcttggggaaatccagattgtatattggacataggaattaagattactggacttgaacttttttgtaactaacaactttattgagatataattcgggtaccaactcatacctgaacagctttttagactttttttctagcccttttttctctgtcctttcggttttcttttaaaaaggtccatactattcaagaaacacaacttttaaagtccacaataattctcattagattttaatatttatctccccccaagctttactgaaatactaatgatattcatttttttaaccacttttcatcgtaagagaaatacaaattttcctattgattcttatgcacaaaaatcaagtttttgtggtactgctatacattagtagtatgttcagccagtttccaaagaaattagtcaagatcccaacatgcaacttgtataccacactaccttggaattcggcggcacaaacaactattccttgtacaaaacctccctgaaaacgactaaatggaaaagtggatggcttgaaacaaggaatgtttggttttttaaaaagcatttttcacaatttagtcgaggtgtggggagggtttccccacttgtggctctgcacagcgtgcgcgcgcgtctgtcctggggtcccctccctgcggggacgaggccggggtccccgcgcgagcccagcggacctgggcagtgcgggggtccgaccgcccgccacagggggacagggaccgcagccgccaaatccgcggggccggggaacgaggagactttcctttccgcgttagccggggccacccccgccagagggaaagcaccaaaggaaaaaccaggacagggactctgggggccggaggagcggcctcctgcaggcaccagcggaggggcgcgggggtgggggaagggatcagggctccgcgctccgtccgccccacgaccccggcccggcgcccctcccctcggaacccccacttagtgcccggcccccgccccgccccgcgcggcccccggcctcagccccgcgcgccccgacgccccgcctgcgccgcgggcccgagtagtggacggggggcggcccgctcggctcctccgcacccgctccccgctcgggccgaggcgccgcggccgcgcgcccctcctggaggaggaggaggaaggaggcgggaggaggagttgccgagaggagaaggcgagcgcggcagtcgcgccggcgctgggcgaggaagcggagccgggccgcctccgggtaagcgtccggggagctcgggcgggaggcaggggcagggcttcgccgtccgcctccgggtcgcccgcggtccgggacacggctggttttcgcctcggagtgcagggggcggatccggcgcgggccgggccaggga

SEQ ID NO: 20031 - DNA, 2300 bp, Homo sapien
tgcatttaaacctcacaactagcctgagtgatgggtgctgatatgtctaagatcacaaaattattcagtggtggagccagaatatagtacgtgaacttacgcagtctggttccacagtgcacagtaccaaacttaacagggttataacaaagacttggcacatagtaggccaatatgtggtctgtatttaccaatattaggtcaatgatcaagtaatgtttgctttttgttttgtttttttttcaattaatgcaataaggaacattgttgtccatatgtctttgtttttggcatgagtatatatccaaagaacaaatcattagtagcataattacttggttaggtgtatatcaatttaaatttttgataaatattttcaaatcatcttttacaaagttttaccaatttacttcaatcatgagttatgagtgctcagttcaggatgcttttcccaacattaagtgttactaatttaagtttttcagactcagatgaagaggttatcttgttttggtttgaatttccttttcaatgaattttaaaaattgagatataatttgcatacagtgaaatcaccttttttagttgtattttgttgagttttgacaaatgcattcagttacgtaaacaccaccacaatcaagatatagaacaatttccattacgccaaaattctttggattttttttttttttttttttgagatggagtcttcctctgttgcccaggctggagtgcagtggcgtgatcttggctcactgcaaactccgcctcccgggttcaagcaattctcctgcctcagccctcctgagtagctgggattacaggcaagtgccacgcgccaccatgcctggctaatttttgtattcttagtagagacaggctttcaccatgttggccgggctggtctcgaactcttgacctcgtgatccacctgcttcagcctcccaaagtgctgggattacaggcgtgagccaccacaccgggtccatggattttttaatgatgaatgaattgagaatattttaggttattgattggccgcttgaatttgtgttctccctcttgcttttgtgatttctttcttattacctttcttcttccttttcatcattctttttgtgtgatgtttgtttctgtgctttgcccgtttgcttatagaattgtttgcctttctcttactgatttctaacagcacagtttatgttacaacattaatcctttgtcatatatatttgcagtttttctctattttttgctttctttatgccattttttggttatcaagaaatttgtacattttgcattgtcagatttattcttttatggattcaaggttttatgttatgtattagaaggccttctgcagtgcaagccttctaaaaaatatttttctccaacttttatattttttaaaaataaatatttatatatttgatgtttctggatttcattttgatacaagaaattaagtaagagccctgctggacccactagtcccgaaagtttctcccacctactcatcatcattcattgatagttcacctatccctggtggtcttaagatgtcttcttgatgacagactcttcccatatgtctcttggtctatttcttgactttctattctgtcatttccctcctctagcgttaagctgttgcagcatgttttaatatgtcatgtagctcattctccttcagttagtcttttagaatttttctcttttcgttgtttgcataacaaagttcactgtcattttgttgactttcttgaaaaagcattattgatgttttcttgggatctcgagtcaatattttgacaggattggattgttttacctgagaacaagatgtgtctatgtatatttgatctattatgattctctgaggagttttaaagtgtttcatgtagttttacatttgctattatttcaccttttttgaagctgttataaataggatctagtcttttattatgttttcttatctgcttcttaaaattatagaatccacaaaaattagccgggtgtggtggcacacacctgtaatgccagctactcgggaggctgaggcaggagaatcgcttgaacccgggagtcagaggttgcagtgagctgagatggcaccaccacactccagcctgggcgacagagtgagaccccatctcaaaactaaaaataaaaaagttatagaatttctagtgacttgtacgtatgaattttgtaattggtcacttgactgagttccttttttttccccctgatacagtcatgccctgcaaaatgacagtttagtctatgat

SEQ ID NO: 20032 - DNA, 2300 bp, Homo sapien
gtgattctggtgttcacaaatccctcaaagatttgacgacattaatcagccctcctgactgattcctgtgatgatcaatccattgagatacttttggctgtaaatacagttagccctccatattcttgggttctgcatccacagattcaaacaaccacagatcaaaaatatttgcgaaagaaaatgcatggttgtgacagtactgaacatgtacagactttttttccttaatcattattccgtaacaatacagtataacaactatttacatagcaattatattgtattaggcattgtaaataatctaaagatgatttaaagtatacaggaggatgtgcgtaggttgttatgtgcaaatactgcaccattttataccagggacttgagcatctgcggattttggaatccgagggaggtcctgaaaccaatcccccgtggatactgacagacaaataaatataaaataaatcctaattaaaaataactttggccgggtgtggtggctcacaccttataatcccagcactttgggaggctgaggtgagcagatcacctgaggttaggagttcaagaccagcctgaccaagatggagaaaccccgtctctcctaaaaatacaaaattagccgggcatggtggtgtatgcctgtaatcccaggtacacgggaggctgaggcaggagaatccttgaaccagggaggcagaggttgcggtgagccaagatcgcaccattgcactccagcctgggcaacaagagcgaaactttgtctcaaaaaaaaaaataataataataataataaaataactttaagtgaatcgtattatctcacctaacaaaaagtcctattatgtgacataaaaataggtggggtagtgggttgcagaatggttttattaaacaaatccacagcaacttcaaggactcagattctctccaccattctgttgggtcattaccagctgtgtttattttttgacccaaagactcctcctctcaactcccccagaactgccatgagcctgttccccagagacaatgtgatcattatcattacagctgacttagactcaccaggacttatgcttgggggaaataggatcactgtccctgagagcctggccatggataggaaaaaaggccctgatcacattggggttctagtacaaaagaagaacttccttgaaggcaaggaagaagaaaagaagggcaatggcttctccacagtcgaaaggaattcccttaagtttaaggattacttctcattcagtatggcactgtgaaaagtgctcctctcaaggggtcggacagaactgtgttcaaaacccaaatcaagctgggcgcagtggttcatgcctataatcccaccacttcgggaggctgaggcaggaagatcctttgagcccagaaattcgagagcagcccgggcaatatagtgaaaccccatgtccgcaaaaaataaaacattgccgggtgtggttgtccacatgtctagtcccagctatgcgagaggttgaggcaggaggatcacttgagcctgggaagctgaggtattgaaaccgcctttgcaaaattatgactgagacactgagacactgaaagagatctaacttaactgactccaccttgcttctaacctccaagctgtccttgttcattcctgggtgtaggctgaactaactttgggagaaatttagtttatagtttaaacaaagacggtagcagccctttcctaaagcagacctccttcttgtgtggggacaagattgtaagactaacattagccacaagattagaaattatggtttcgaagccatgcagctggaggctacaagattctgaccctccctaaactgctcctaagatcagtgcttgagatattttgcagacactgcacttgatggatcagctggcaccacccagatcaataaactggctcatctgatcttgtgcccctctgccccacccaggaactgactcagcgcaagaagacagctccaactccctgtggtttcatctctgaccaatcagcactcctggctcactggctttcccccatccaccaagttatccttaaaaactctgctccccgaatgctcagggagactgatctgagtaataataacactccagtcttctgcacagccagctctgcatgaattactctttctctattgcaattcccctggcttgatgaatcagctctgtctaggcagcgggcaaggtgagccccttgggtggttacagttgcagtgagtcatgattgtaccactgcattccagcctgggcgacagagtgagacc

SEQ ID NO: 20033 - DNA, 2300 bp, Homo sapien
tatcagcatcaaaaatatataaaagtgattgagaatgaggctttaagataacctcctaataatatgtatctgattaggatatgccacatcccactttccaacccacatatctataaagacaaaatctgaatcacatggaaaagcaagctattagtaaacaatttgcaggagtctgagaaaatttataactatagagtagataacacttcagttttaaacataatcagtgacttatactcaacttgttctcagaaatgtcatcttacaagttggtataataacccagttcagaaatatggaatatacaagttacaggaaagtggttaggcatattcaaatttttgcacccaaccatgctctaccctcttagccacactatgggtattattttctgaggcagtcaaaattgactgccactcatttttcaaaatctgttctatgactgcaagctctcaaagacagcaatgcagaaaggataggagattgagtcctgcatatggactcttccataaatcaatgtgatgaaggacaatataatctcttatcttgctgaaaattagtgagcaagacccatgtcatattcatattgtgccctacttagtgtctcactcataataaacacaacaaatactttacaaatgaagaagatgacttctataaatcagtgtgatcaagggcagagacactagccctggtgattggaatttccctggaagaactacaacatgactccaattatttgaaaaatgaaatagctcactaatatacagggaagactgaatattagaaggcccacattagacacatgcattctagacctaatttgggccagacatgtgctcattagtgtataattcaacttcagatctggggaagggggttgcaaggtggggaagggcagggaattcttttagtcacatgtccaatccatacagtactctcagtcatttgaaaacataaaatccaggaaggcaaggccagcttgcctctccttaccatctgttcactctctcagcttcagggaacttcagggagcagttataccgggtacatcacaaatgtttgacctcagccacaaatgtttgacctctgtgaatgccaccagcatccaataaatagctcaatatagagacctaggaattatctaagactcctccactgccccaggttacatatccaacctttatcgatcttatccattttacttcccaaatatctctcatttttctccatttccattattcccacagtagtccaagctaatgtcatctttctccagtaatatgccatcacttgctaactgatcaagcaatatccacactgcaaacctccttcagacgatctattctgccctgcataaccagagtgtccctttcaaaattcaaatccagtgtcactacccaaatcccatctcgaattgtaacccccatggtttggctctgtgtccccacccaaatcccatctcgaattgtaacccccatgtgttgaggaagggacctgtaatccccaaatctcaagggaaggaggtgactggatcatgtaaacagtttcccccatgctgttctcatgacagtgagtgagttctcatgagatctgatggtttataagtgtttgactgttcctccttcataggctctctctcgcctgccaccacgtaagacatccctccttccccttctgacatgattgtaagtttcctgaggcctcaccagccatgcggaactgtgagtcacctaaatctcttttctgtataaatgacccagtctcaggcagttctttacagcagtgtgaaaatggactaatatgctaccccatctccatcccactgccatcctccctaaagccctacagtagattgctgttactcttagaatcaagaccagactgcttccggggtctataccaccttctgtggttttgtccccagctagtttacatcacatgcccctcctcttcctttctccatcacatttcacatttgccatttacttttttttttttttcatttcaaccttcctttgcttttaccctatcatgctccctcaccccacaaagcttttgtacattctgcatctccttcctggaacattctacctccctctgcatctaggtctctgcctgagctcaggttccctaaaaagcctggtctgaggcaatgactaaaaaggctcctattttgtttaaggacgtgcaaactcatggcaagaaggtgaggaaaacagctacggagggaaggatgagaagcaatgcaaagtgacatataccatcctggccacagcttcccaagttgggtcctttgc

SEQ ID NO: 20034 - DNA, 2300 bp, Homo sapien
aggaattcattttagctttgaattttggacttgcttggcagcttggatgtgttaacacagattgtttagtatattaatctgttgcaacatgaacctttgcttcctaaaattgcttttatgtttttgctttaattggaatataccatctgtaattaagaagtgatgtttcttccaaagcataccaaaatcttgcaccactacaaaaatgtttctatataggcatttctctcttatctgtagctaactggcaggacttagtaagagctataactttggcaacttgtgcagatttagtatctcgaagagagttgaatttgaataaatgttagtgtgttctgattgcatacccagcttaatagtgtccttgctcagttctcaaacaggttttatccacaatacttcacaatttaggtagtctaaaagagtttcaaagtgtccaggtcgtagcaagaaaaactcccaaataagtatatagcagtcatgtgggagaggaagaggaatagcagattttaggattttgcaacaatggatagaaatgtctataggtaaagggattttttacagctttattgaagtataattgatatacaaaaaaaccctgctcatttagtgtacacaatttgataagttcagacgtatgtatacatctgtgatatcaacactacaatcaaagcaataaacatatccaccaagaataaaggatttcaaaggaagccagtctagtaacagaagaattgaaggagttttcagtccaaaggaaggtctcaatgatatgaggaaccacagggttaagcaaaaatcttaagactaagtcatcagttgcctcagctgagcttgcactgctgccactgtgtgcaaacaaggagggcaggctttttgtcatgaaatcaatgtgaagatataataagcagtgagtctctgatgcccattttcttgttaagttagaatcctccaaacttgtctcaatgtactaacagaaagaaagatgtatgatcattggagagttatttaagtggtaaaatacattctctagtgagtctataatgcaggattgtcagttttcattagcttacaggagggggcagttagtcgagaaaagttagaaatccatgtctacaatattgtatgggaataagacattttctaagatgtctttcagtaattggccaggaaagtcgggaataacctgcagtctttgagggaaaagacccttaatttttgtttgatatcatggccaagaaaatacacgtggggctgacaaaattggagtttacccctagagactttgtgtgcctgtacacttacactattagcaagtggaataaatcaattctgcaggactctcaatctagagagcaaacaagatcatctatatattatataagagtggagtccttgggaaatagaatgtctccagtcattcaggtgtcattgagtatttccaagaagtaagagggtgtttctgtaaattcttggtcacaattgttcatgagtattgtttccaagtgagtgtaaatagatacagtgagtctggaagaaaagaattactaaagaatgctaagcatggatctaccactgtaaagtaagcagcagttctagagattgtagataggacagtatttgagtttgagataataggaaagcaggaaagtaaaattgtgttaatggcccttaaatcttgtacaaagtggcagtcatactaatttgtgtttgtaacagacagaacaaaaggatcacaagggctagtatagggataataactcttttctggaggtatgtagagataatggaccacagtctttcaacggactccatttttcagtggggattgggcagtttcaggaagaacatagctagatttattcaaacatttaagggtttagcctcttgtatatgcccgatatttgaaccatctttggtcaagaggctattatggacatacccaaagcctgggatgtccataaagaaggcatcagggagttgtaatcaagctgtggcgttattaggttgtaagccaaacatacttcctttctgagaatttcagcaatactctatctggaccacatttaataatagcaccgggggaggagccaagatggccgaataggaacagctccggtctacagctcccagcgtgagcgacgcagaagacgggtgatttctgcatttccatctgaggtaccgggttcatctcactagggagtgccagacagtgggcgcaggccagtgtgtgtgcgcaccgtgcgtgagccgaagcagggcgaggcattgcctcacctgggaagcgcaaggggtcaggg

SEQ ID NO: 20035 - DNA, 2300 bp, Homo sapien
ataccaagatgatactagaaataattctaattaatattaacaattcatacgtaagtctacggcagtcaatactacacatacacacacacatatatgtttctgttaaagagttttcatggaaggaaaaggaaatagcaaagtcatgcataagtatgctgcatgaaagaccagagagatggactttcaaacaaagtgcatcctccttatcctgacacacaaactgcatgcaggatttcaggaataaggaagctattacaattgagacaaaattttggtcaatgtcagacgattcaaaaatataacttgataatgtattccaaaatgagtaagggatccttaaattgtcactacgtaaggtcaagtttaaagtgaggctaagattcacgtgaaaatcaagcatgctgttctcgtaacacaggagaaatgcaaaatttgggcatcaagaagagtcttgaagtgatttcagaaatagattacttaatgggaatagcccttaaaagcatgcttgctatgtgtacaggtaaatgtacacatagcatttcccaggctaaataaccaaccttttaaagactaatacacaatgcaggcataccaccaatgtatctgaaagccttgttggtgtattgtgactctgaaaactatgaaaagagtggcattgaaaaaatctccattatctcaaacccatcatattacgtagttttcaatatttttggcaattcgtatactatgtaattttactggaatttatatgttgtccagttttcacactaaactgtaatttggataagagtaggaagtctattttccatataaggaaaaggaagtatcaggtttctaaaaaggctcattacgagtgtgtgtatttccctattatttcctagggaagaagggaaattacaacttaatatagcatttattcattaaaaaattaaatgataggaaaataacagagtattgagtaatattccatctgttttttttttattttggaagaaaccaaatgttacaaaaatattttattatttgcattatacttaacccataacatccattaaattaatcttcaagattacaagtacatgacctttgaaaatttacaactccccgccaggcatggtggctcagccagtaatcccagaactttgggaggcagagacagatggatcacttgtgatcaggagttccagaccagcttggccaacgtggtgaaaccccgtctctactagaagtataaaaattagccaggtgtggtggtgggcacctgtaatcctagctactcaggaggctgaggtgggaggatcccttgaacttctgaggcagacgttgcagtgagcccagatccagcatctatactccagcctgggtgacagagtgagactccatttcaaataaaataaaataaaatttatgattcccaattattgaattatttattttgactaacctctcagatagctaaaatcttcaagtaatattttgttactcttgttatctcagtacagtacatctggacccagtgaatattagaacaattaacctatgtacactttcttgtttaagattttgaaatttacatttcagtattttcccttattccaattcatagataacttttacaaaattcttattatctttgtactataattttgttttcaaaaagccatgtgtatacttttcccactcatttgcctggtattctgcaattctcttcagcttgtataacaaaggaaatcagtctttccttatatttttgtcagttgttttgtttcccctactgcgtattgtttttctttaataggaattattagttgcatggtcctagtacagtcatgtgtggttgtggaggaaaagttaaatattaaatctgaactcaattgaacatggacacaaacaatgatcaccaagtcccagaacaggttgtgtgagccccttgaggcgttcatccagctctgtttcagagaaatctctatttcaatctattcctatatgttagttattgaaaaacaatagacaatcacaaaaacaagttgacctatttgtgttccttgagcccagtagtgaagggccctcgtgaccgggcctcatgcacaacaacttgttacagaaagagccaggatcccagactgtgctgaagcttcatgagacctctcctcgtctgtgcacgaaagaggagccggacacagagtgtccagccgactctggagcccaggctgttgcttcccggtctggtggtgagtcctccattgtctggtaaggaggatgcacatatatatatatatatacacatacacacacacaca

SEQ ID NO: 20036 - DNA, 2300 bp, Homo sapien
gcagaaaagcagacaaaaattgttgaatacagatgaaaacgaccaaatacctggctataatttactatcatcttcctcataaatacaaattcaaaattgatagcataatcttctcaaattttatttacaatctggtgtatatcatcacattacattatctctaaagtaaaagtatatgattctcaacctagagtattttctagtagcagcacactgctgctataataaatacgtacctattttgtgattattagtttaatgcgtgtgtcttcaactagggtgtgttttgtgaggtcaaggtttatgttgattttgttcaccattaaatcttcagaatatatatgatttaacagacaatgtgatggttaatactgtcaacttgattagattgaaggatacaaagtattgaacctgggtgtgtctgtatgggtgttgccaaaagagattaacatttgagtcagtgggctagggatggcagatccacctttaatctggtgggcacaatctaatcagcttctagcaaatgtaaagcaggcagaaaaacgtgaaaaggcgagattggcctagcctcccagcctacatctttctcctgtgctggaggcttccagctctcaaacattggactcagttcttcagttttgggactgggacttgctcttcttgctcctctgcatgaggacagcctaatgtgggaccttgtgatcgtataagttaatacttaataaactctctctctctctctctctctttatatatatatatatatcctgtaagttctgtctctctaagagaaccctcgtacagtcagtaaatgtatgtttacagaaggaatgtgtgttagcatcgccagtaaatcttacattgttttaacagtttatgatagaagaagaataatttttggctgtctttataaattgaaatccagaaattaaaattttagcactaaaattaggccaatcgacttaagacccaactttatgaaattttgtttcaagaaatcattttttttctgctcatggcatgtcttacattagcattaccagtatttcagaataaattttaaactatatttgtctcaattaagttttaaaaatatacacacatatacaaacacacattcctggattttcagcttgggggttgtaacatgtgattatataaaactgagtttttatcaccaaagtaagttaaatttgaaataaatttatgaagaaactctcatatataaaccaccattaattagacaaaactaagtatgtcagttccagatgcctagttaattacttgacttttggatcccaaaaagtattagacacttgtataagcagcagaaaaaacatatggaggaaaccttagagatcatgtgctggcaacgttttttcccaatgcaattttcataattatttctaaggaaacaccatttgactaactgttacttggtaaaattataatgtataggggaaagatggattctggatgccgactgatctggctttgaaattattttcctatctaacattacattagacaaataacgtttgtctcattaggcatcaattgccaatatgttatatgaaaataatattctctaagctattgaaaatctaatgataacaatatatgagtaggttctagcatattctgtcgtatacaatagatggtcaacaaataccattcatttatttaatactacagcagtggttctcaaagtgttgtgtggggatgcctgatgatccatgccctcttttaaaggattgtactactttcatactaacctgcttgctatgtgaatttttctactctcttttttccacaggcacagtggagtttctttgaggctacatggtgagagaagatgtcaccgctctgactgacatacataatgatgtgtgtgtgtgtgtgtgtgtgtgtgtgtgtgtgtgtttagttttaatttcaagtatgggaaatataaagagatataatattttaaaaaccaatggtttggtggctgtcaatattctttaagactgcaaaagtgttcagagacagaattttgagactagaacactgtatcagaattttgagactgaaacagtgtcctgtacattcagagttgaagacactcccatgagcactagatatgaatgtgggtggataggccatgacagcaaatggccctgcctttattacctgactcacttgtaccacaatagtcccaacatcactcactcctcatttattctttagggaactatttgaactctttcagaagacggactcctcgataaagcagtagtactcctgtttccaacatttca

SEQ ID NO: 20037 - DNA, 2300 bp, Homo sapien
ctgctcccagtcccccttcttcccggtggctccacctcccggtgtaaggctttgggttctgtgccctgacaggttcacaggcgcctttcttctgagaacgaccctggccttgaacgtcagagccggggacgaaggcccccggaggctgctgcgagctccgcgcgttccttcgcgcccttccgcgccgctcgcgccggcgccggcctccacccccgcgcgccgcctcccaccagtcccgatgcaggcgcccggccgggggccactcgggctgcggctgatgatgcccgggcgccggggggcgctgcgcgagccgggcggctgcggatcctgcctgggggtggcgctggccctgctgttgctgctactgcccgcctgctgccccgtgcgggcgcagaacgacacggagcccatcgtgctggagggcaagtgcctggtggtgtgcgactccagcccgtcggcggacggcgccgtcacctcctccctaggcatctccgtgcgctccggcagcgccaaggtggccttctccgccacgcggagcaccaaccacgagccgtccgagatgagcaaccgcaccatgaccatctatttcgaccaggtcagccgtcggcctgcccaccccgcccccagcccggggagaggggcggggacctgcgcgcgcgggctggggttcaggcttcttggacgtggagttcccaggctctgtcctccccctctgccctgctagtctctttcctcccgtttcatagaacgcactcctactctttcccttttccacattttggctttttaaaaacttttaaatgatcagctaacttggcacttggatgactgagagtcccttaaggctgtctaagctttctaagagttccgtaaacctaaagatttgaaatatgtttcccaaaaggaagcattgcacgttttacttttcacggcggtgtggttgatggtcttcagtcacccaggtggccacctgaaggattgagtgcatttaaaactctccacgctcacgaaaggagtcttcccaagtctctgacagcatttggaaaatacattcctattgcttattttgaggaatggattggggaagggatgtttatcttaaaaaaaaaaaaagtgaggaagaacagggatggatatataaatacaaaacaaaatattgtgattgtgtaagtaaaatatatagtaaatgaaatatataccataagcaaatgcaatatatataatgtatacatgaacagtgtgttggtacaaattttttaaaagagcagtgacttacgtcaccttaagccacttaacttatgccatttggttcaatgcagaaggttcagagatatgatcaggcctttctaaacctttctctgggttattggtgctcagggttaaaggctatgaccttctttttgtgtcctgctcgcctggtttctgttgtttttcagaaaaataattaaaaacattatagaggtttccaagctttagctaattagctaattacctaatcattttaccaaagtgtttcccacggaatggggcgcctggcagtcactgacaacctaccagggcttactgtacgtgtttaattgactttcctttggtctgttaggcaactcttaaacttaataaccataaacctacagacacacacactcttgactctatttaagtcagcgtatttatttctcaattattgttaggcattaagtatttgaggtttttttttcttggcaggggaaggcatgtgtctctttaattcatttttatttacaaaatgtaaaattatttattttgattatgtccaaatgagacagcaatggaataggcatttgggaactaatactctattagtaaggtttcctttacgtgcagttattgttatattattattattcacttaccaatgtcttgcaaagttttcatagcatttttatatccacctttgcatttgtgtaacaagaaagctctgtgatgtagggcaggataagtagtagcaggattctaattttatacatgagcaaactatggcagggtgcgttcaacctttctctggctccccagttaatgaggagctgaggtctgcttttcaggatctggttgggtgttctttcatctacagcagggctaaattctacctgaatttatcagtttccagaatgtaaaattgaggtgaaggagttgaggtgaaaggaagaagcagctccagaggcttaaatggagaatgctttattcttttctaaaagctttgtaaggaagacagcgagcatagccttgtgagactgagaataggcatcccgaggtgtttgtct

SEQ ID NO: 20038 - DNA, 2300 bp, Homo sapien
ggggcttattttgacagtaagacactatcacatggatgaaatagtggaataaaataactatttgaaagtaagagtgcatttccactctgttaaactcacaaaaatggtaacaaaacatggcaaactgtggtggatttgaaaaagcatcctggcaaatgccagtacctatctccagcatggtacaaaagtgttgaagtatgacatttactttacagtgagtatagcttaggaggatgagagattttggaagtattgtatattttctactattttgcatgctaggttaaccaggaagcatttggctcagaggtacttttaatcacatccttacacccatactaaatattttgtctcacgcagcagtgtgcaatgactttctgcatatccattccagttgaactgatcgtgaatttcatctccagtgcttagagatgatgccttggcagttctgttctaaatggggagaatagcggtgagagggcctatgggaaaataaggccttcaaaaccccctacctgaaaagacctccgtttgttaaggtggaatcagacactgctgaaatcttcaaaggggagagggttcggtgtgaagtctggaggaataagaaatacagatgctctaatgaacagcactggctaactttattattattattattattattattattagcctatcagaaaagacgtataatgcatgtcaaaggacaaagtattttttaaccatgttttaaaaaaaaatcaggctatagagtgtagatttaaatattgattgttttttagaccagcataaactatacggcccagttgtctgtgcaaacgttgtgccgacgataataaccgatgataacctcaccgcagcatttatcatcttggcagagttgtttgttagatcagtgaagatccggaaaatcaggcggcgtgctgcttggttttgccaggagtaaaagtactgaaggataccgggaagactggtcattattgttcttcttgtggttgctatcattattattattattatattattattattgcagaggtcagcgctgcttttggggtgaaagaagaccatcagcaaacctcagccttgcggccaggactcccccgtcttctgtcggagtccgccggtccgcagcctgcggcagggaggcccgggcacccgcaggtggcgccccacgtccgtgtttgcgccctcagccgagctccaggcgcagctgggaaacccagcgcgtctccccgggtcctttgagcgagcgcggacaccgcaatttaataaataagcgcaagcgccagccgctccaccagtccgaggtccagaggagcagacacacagacccgggccggaggcccctcttctagccctgcgggaaccggacagttccccaactgggactctggaaccacagctcctaaatcatcaaattctcaagctttttttttccctctcttcgtcccagccatcccagtcttcttcttcttttttttttttttaacttattgtttttttcgctcctgtcattatgaaagtggtcacgccattcaatattaagacttggagggaattggggaaagaaaagaaagaatctaaaagaagagaagcgaccggtgcttttaagggtgtctaattttcaaaagagacgtctgggagtattttgctctgggcgtttgggtgagcaggaccggggcgttggagggtgcggcgggcttgggagcagggaaggttccgagtcctagggaggcggcagcgctcggctatgccctctggagactggcggggctgcggggccgaggggacccgcgagggagccgcgctgcggacgcgctgagcgcgggagctcgaggggccccaggcagcggtgcgggcgcgaagcccaggggttggaggcacctgggcgcacagcgcggggcgctgagccgggcgagacgcggggttcccggtcccgggcgcggcgcctaagcgggcgcgcggggcgtggtgcacccctgaagcggcgcaggctggcgcgggaaagcggcagggcggggcggcgcggttattggccacgcgctgggagcagggtcgcgctccgtgtcctcctcccgacagctcccactcgcctcattttctctaagcagagcaacttcgcggacagcggagctcgcccagcatggatgttccaggtaaccacccccgacctgccctcccctccgcatgcaagcgccttctgcgtggattttaacgaagactctccctggtccagatcgaggggtggaggaggtggagagagagaagggaaatcatgtaggatcggggctgcggac

SEQ ID NO: 20039 - DNA, 2300 bp, Homo sapien
cgctctgtcacccaggccggaggactgcagtggcccgatcttggctcactgcaagctccgcctcccaggttcacaccattctcctgcctcagcctcccgagtagctgggactacaggcgtccgccaccacgcccggctaattttttgtatttttagtagagacaaggtttcaccgtgttagccaggatggtctcaatctcctgacctcgtgatccgcccgcctcggcctcccaaagtgctgggattacaggcgtgaaccaccgcgcccggccgactttaatatcttcttatgtgaaacaactaattaatcaatgaataaataatctgcttctctgtcaatttgctatcttttatggtttcttctaaaataatctctagtctaaattaaacctaacctgtttattatataagaatgcttatagcttttttcaataacttagtccaataagtcacatagattaaaggtgtctctacatatatataatctaaacatttatgttgccacatagaaagtggttttcttttttcccccagtgttgatgacgatagttcatgtgtgcttgcatttatattagtcaaaaggaatgcttacagtattgaggaaagatgctgagtagagttgctatttaaggacttacagatgtgtgagaggtattgctataaattagcatccccagattggtctaattatgtctgtgtctcacatgtctttcaaatatctagtgttctttgctatctatgcttacacttaaatcagttctctctatggtggaatgatggatgggggcttattttgacagtaagacactatcacatggatgaaatagtggaataaaataactatttgaaagtaagagtgcatttccactctgttaaactcacaaaaatggtaacaaaacatggcaaactgtggtggatttgaaaaagcatcctggcaaatgccagtacctatctccagcatggtacaaaagtgttgaagtatgacatttactttacagtgagtatagcttaggaggatgagagattttggaagtattgtatattttctactattttgcatgctaggttaaccaggaagcatttggctcagaggtacttttaatcacatccttacacccatactaaatattttgtctcacgcagcagtgtgcaatgactttctgcatatccattccagttgaactgatcgtgaatttcatctccagtgcttagagatgatgccttggcagttctgttctaaatggggagaatagcggtgagagggcctatgggaaaataaggccttcaaaaccccctacctgaaaagacctccgtttgttaaggtggaatcagacactgctgaaatcttcaaaggggagagggttcggtgtgaagtctggaggaataagaaatacagatgctctaatgaacagcactggctaactttattattattattattattattattattagcctatcagaaaagacgtataatgcatgtcaaaggacaaagtattttttaaccatgttttaaaaaaaaatcaggctatagagtgtagatttaaatattgattgttttttagaccagcataaactatacggcccagttgtctgtgcaaacgttgtgccgacgataataaccgatgataacctcaccgcagcatttatcatcttggcagagttgtttgttagatcagtgaagatccggaaaatcaggcggcgtgctgcttggttttgccaggagtaaaagtactgaaggataccgggaagactggtcattattgttcttcttgtggttgctatcattattattattattatattattattattgcagaggtcagcgctgcttttggggtgaaagaagaccatcagcaaacctcagccttgcggccaggactcccccgtcttctgtcggagtccgccggtccgcagcctgcggcagggaggcccgggcacccgcaggtggcgccccacgtccgtgtttgcgccctcagccgagctccaggcgcagctgggaaacccagcgcgtctccccgggtcctttgagcgagcgcggacaccgcaatttaataaataagcgcaagcgccagccgctccaccagtccgaggtccagaggagcagacacacagacccgggccggaggcccctcttctagccctgcgggaaccggacagttccccaactgggactctggaaccacagctcctaaatcatcaaattctcaagctttttttttccctctcttcgtcccagccatcccagtcttcttcttcttttttttttttttaacttattgtttttttcgctcctgtca

SEQ ID NO: 20040 - DNA, 2300 bp, Homo sapien
ccgccggcgccgccgccgccgcccgctccgtcgctgccgtcggtctggactggcccccacctcgctgcgccctctccccggccccggccccggctcggggcgtcccggggctcgccctgcgaccgccgcctcccgcgcgccgcgtcctcccgaccccgcggcggcgacgatgcccgggaggagggtcctgacggcggcggcgcggatggtggcggccggcgcccgggtgtgatgcgagcgtcacggtggggatgctgctggctgcgcggcgctgagggccagcgagagcgagagcccgcccggggcggaggacggactcatccggatctggctgcagcgtgggctcggagctcccccttcctctcggtctccctctcggcccccctttatttccttcttgctttgcgtctttaacacctctcgaccctgtcctccccccgccactggaagtcttcccgtctctaaatggaattagtggagcccggagcctctggtgtaacgcacagacatgatccatgggcgcagcgtgcttcacagtgagtaccctccccgccgcgcccgtgcgctcccggagccagccctcccgcccctttcccggggccgaacgcgcaggaaaagcctctgcgccgcgctccggcggaccctgcagtcccgcgcgggtcggggccgacgtaaactttctgtattgcagcatcgtggaaccgggcgtgggggcggcgcgcggtcagccgtcgccggatcccaaaacctgccggagaacggtctttcagtgcgcaggaaccccccgggggtggaggatagcgtgcagttcagggatggacacgtgcggcagagattggcccaagcgagggcgcaggtggaaagcgggagagcgcggatgatacctagtggggccagaggagtcttcctcttctaggggctcccggagctcggcgggcccctgttcgcagtacaggaggtagcagaaggcacacctgaagccagcgctggagggaagggcgagggtcagcttccacccctttccgccctggagaccgctgatgtcgctttatgggtgtgtggtaacgcgggcagtgtagaggtgggaaggaatgagaggaaaatagtatcacgagtcatcgagtaaaaggcagtataagaaaatgtgtggtggaaatgtatcattactaagcaaagatgagagtgttgatcgcgggccacgcagttgagaggggtttgctgctgagttaaacacagtacgtggtctataatgtgatttcatcaaaacaggaagagcggagtaaacaaatacacatcctgatgctgaaggatgtgcatacctgtgtgttctgggtgtgagcagaatcatgacaaattaaattgattttttttttcctgtggaaacacacagtaacaacagcagccagtgccttaatttaaaatgcaaatgaactggctagagcataaagtaacacacaattgacaatattttaaatattaatatcaagacctagatacgtttcttagagtgatgtttaagtataaatgtataagcctgtggtgagctttaattcaggaaatatttgtgaattgttctctcccccgaattcattttaagtgaaaatgtgaaaacatagaccttttatgtcgttggatgacaaaatgaataagaaaaaatagaagaaaaatcaaattatgaagactagcttacttactattttgctagtgttttgtcttgtaaaaatgttgattagatcaagaatacggaagtaaaacaagtttagattataatggcattgcagatttactgttaagttacagatcacagtctctttgacactggaaacctgacccaatataatgctttcggaaatcacgtttctcaaattaataatcaatttctatatattgatttggtattaaatcaagttaaggttagaagagattaatttcacagcttagaaagtgctgagggacggggttacttggaggttcagaacatttttgtaggcaacattccaataatggtgcttaatgcccacaatccacattaatctgtttcttgcttattctcctcctccacagtctgtaggatttgtctaagtatttattttctaaaatacagccacactgcagtatgtcaggaacagtcatggagctgttctcattgtttgcctctccttttcctcctttttaccttctggcccctctcttcattcagagatgctggcagagccattccctaagggtagtttagatacagtgtgactcctgtagtcccactgtactgtgtgtgacatgagtaaattgacatgttgcct

SEQ ID NO: 20041 - DNA, 2300 bp, Homo sapien
tctactcccgggttgacccatgacccaactttcattacacggatgcacaacacgcgcgcgcgtatatgcgcgcgcacacacaaacacaccatcccctttgctcggtcactttaccccaccctggaaatcgaggaaccagcactttggtgtggtggtaggaggcttgggggcgcgtgtgagactctgaatcccttccagacttgggggtcacctcatcgtccctcatcccaacttactggcaggagacctccacccactcacagccgctgcgctaggcgtgggcaggactgcgacgagcacccaacgccccgcgcagccccgcgcgcacgtgggcgccccagcagcaggtgccgggaagcggaggccgggccagagccgggaggcagccccccggcctcgagcgctcgccagactcttctcatggccctttctcctttcctcggcctttcggggccaccctagtcttcacagctcagcgtctgctgctgaccccccgccccccggcgaccccgccattgccattagctcttcctaccccggcttcttcgccgccacagtccccaacccaagccccagccgcggcgcgggtgtgggtggccggacgggatggcttccgtagtcccggggtccggcgggctcggctgtggtctgcgtgggtcgcgtccgcagaggccgagggagggcgggacggagccgggaaagggaggaggtgccgttgcggcgcccagggagggactccctgcacccccgcgcgctccagcccttcccggcgctgcctcgcggttgcccttatttcgtattcattgattcgcattttacaagcccgggctcttccggtgctgtttccccgcaactcgtgtctcccagactttaacgcgccgcgcgagcctgtaggaggaagtggcgcgggggaacgggggtccgtgtgtgccttggggtggttttaaatacctcgaggtggggggctcaattgcaagaagcccgcgtctttgcaggagtaatttggtggggggactggacatcaggcccagtgctcaaccgcgaaacttttacggccgcctttccctggggcgcgcccctgccgtgtctcccaagctgagcgcggagtccgcggcgaaacctgcgccccagggagggagggagagggggcgcccagttcctttacgcggatggaaaagaaggggtgggaggcagagagcccgcaaggtctaacctttaaaaagtgaaacaccaaaccccacaagggattttcacacgaaggcccctcccgcttccacgccttccgtccggcacgaggatccggctcgggatttgcggctgcatcctctctctgcgccctggcgggccgagccgcggatcccagccgggtcctcaccccctccccgcccctcccccagatccgcgcggctgggatgtccttgctgccgccgccgcggccccattctgccgcgcaccagccccggggcgccggccgcgcgcagcctcgctatcccacccaggctccgggcttccaggagggtcgtggagccccaagccatgactaaggagcccatttggtaactctgccctcttccggctcctttctcctccctcccttccccgccccccggccccccccccggccgccccgctcccctgcaccgccctccagcccgcctcccagacgcccacccacccgctcctctttccgcaagatagcagaggtggcgcgcagcccggcgagccgatgacggaccccttcttcctgccttcaatgcctcagcggaagatccccaagggctggagcgaggagcgctgccgctggacatcctcccggggaggctgctccgacctgctgcgcggcgcgtctgagactggggactgagccaccccgccgccgccggcgccgccgccgccgcccgctccgtcgctgccgtcggtctggactggcccccacctcgctgcgccctctccccggccccggccccggctcggggcgtcccggggctcgccctgcgaccgccgcctcccgcgcgccgcgtcctcccgaccccgcggcggcgacgatgcccgggaggagggtcctgacggcggcggcgcggatggtggcggccggcgcccgggtgtgatgcgagcgtcacggtggggatgctgctggctgcgcggcgctgagggccagcgagagcgagagcccgcccggggcggaggacggactcatccggatctggctgcagcgtgggctcggagctcccccttcctctcggtctccctctcggcccccctttatttccttcttgctttgcgtctttaacacctctcga

SEQ ID NO: 20042 - DNA, 2300 bp, Homo sapien
taaaagccaaagccttcttctgtatatattcaattatttaaccattcagtcctgtaaaattgacatgactctactaaatacattaaaagattgttcattggtattgagataattttaagagaaaaatattttaatgattgcttcattagatatcctgatacttgtgtttgaaggaatctagtggaatagtaattgccatgcaaatacattttgaaaatgatcctcaaatgtttgttttaaacaattaatatattataagaaatccactgtattcttgtacagaataacatacacccttgagttcattagctacacgaagtgaaaccatttaagctactaattagcaaacaggtaaatgcacaatgaataaatcaatttccatcactgaaagatgtttctcaatgcatctgttgatattaaaaccttttgggccttcaaaacattctgtttctttttaatccaagtgaaaaattttattaatttctagaatgtgatgcttaaaggttacatctgaatatcaaataactttctaattcctaagaactaacatttgtaaggctgatcacgcttgggaaaaataaaatcactagatgatagtatgtccaattttgaaccatgacaatagcaaacttaatctttttaatatctaaagcagattatttgactatcttttgctctacatgatgaaagtgtttcagtaataattataaaacgtgtaacatatttcgaaagataggcattgctttaattttctccacttttgccttatttattaattaatctatttattgattgagcttcacaaggtcaatgctttgtgacattgttggcaagggcaactcctttaaaattcttatagaattcagaataattaaatgctagtggctggttttgtaaatatatttaaattactacaaattcctccaaattcctgcaggatacaaaaagtataagtctttacgcaatagtttctatatctgccaaaaaatttgaacattcatcactataaccaaaggctattctattagtttacagaaataattatcaaggaattaataattttatttaataaagttaatgaaaccaaaacatctgcactagtgataacttgaaacctgcatcagattggccatgctgggaatttaatttctatgctcttgaatcactcttttgttttaaaactagcaactcagaattcaaaaacaaatgtcaaaactgaaaacattagttaagtcaaattttgtatgaattgtaccaattacaaattatcatacctcatatactgtttgaaattttaaactcaaataaaaaggggccacacaaagtttgaactctacaatgaacccttttttgatcttcacctcgtatcaattccactcaccgccacacctttggcatgaaaagggaatagatatttatgatattgtgtctttggagaagaagagaaacattttgagttagttacttttatttcagtatggaactggcttacagtccccagtgcagccttttccaatttgttcctgcactacatataaacatattttaaaaagatgtcagaatttctaaggaagtcatcctaatttaaggtgaatgaactaaaatgagaatatctacaattttcatcacccaatatattaagatttgtctttataaaatagtaactgaaaatcagaagaatgatgttttctacctctttctcccatgtagtccctcacctaaaacatagcaattgttccctgagcgcttcctttactagccttccctgcagcgccccaggaagcctgtggatcaagcagacgagttaattggcctttctgcaggaactgagaacaccaccttgtgaggctcatggttttagggtttgggggtacagattcaaataattgacagtgagtctttcaaatgaggagcatgaacttgaaaacatgatccacaatagtctgggatttgtggacacagcaatatgaagttcttttttttttttttttttttgagtcggagtctcactctgtcgcccaggctgcagtgcggtggcgcgatcttcgctcactgcaggctccgcctcccgggttcacgccattctcctgcctcagcctcccgagtagctggaactacaggcgcccgccatgatgcccggctcattttctgtgttttcagtagagacggggtttcactgtgttagccaggaaagtcttgatctcctgacctcgtgatcctgacctcggcctcccaaagtgctgggattacaggcgcgagccaccgcgcccgacagcagttatgaagttctaaaagcaagt

SEQ ID NO: 20043 - DNA, 2300 bp, Homo sapien
gtttcaacagaaaacaggaaccagcttggagagtctcacattggccaaatttgggtacacttgaatatcagaaagaatattgatgacactgatttatttctttctaaatgtctgagttcacactgactcataagaagtccagagaggggaagaggtaggaaagaatgtgttacacagaaaaatttcacctaactacatgtaaaaaagaaaaaaaaggagtattgtaccatcacttttacaactattaatggagtaattgataaagaaagggattgctaataaccatcagttgaaggtatgttaaggaacaggatctcaaagtatcaccttatcattacaaagtaccagcctgataattacaaaggaactttgcaatgtaaatgtctgatggacaacatattagccaagtgatcaacatatcatcaatttactgggacaaactgacattaaaaccctccagatggtacgaattgagatgctctccatattacatatgaagaatattttcacaaaaataatatctttaacctttggttttgttttttttttttcatgagaaaacagttataaaagatgcaaattgtgcagcagtcggtactagtctaggcacctcaaaaatatcaatgtaatgaaacatttttttaaatgtaggtttgtgttccaggataaaaattgaagaaatttgacaacaaaatgtcatgtgtgatccttgatttttgaaaaatataacgtttaaagatatttccaattgtgaaaaaatatgagcagtgtaatagtattgctaaatcaaggttaaacatttagtgttgataatgttattgtggttatattggaaaatgtcatttttagttgatacttgctgaagttttaggaatgtaatgtcacaatgtctacaatttattttcaaatggttcagaaagcacatacacaatggaaatatatttttaaatgcctacagttgaagaatctaggtgaaggcaattgtacattttcctgctcatccaactcacatttaagttctcaattgttcaatataagaagttgggggaaaacagaaatgaaaagcctgaatactcctacagccactaattaaatttattctacttctccaaacctcaaacatgcaaaacatgcaacaggtataaaggcaaattctttcagattttctgtaagcaaatacatttgacccttgaacaacacaggtctgaactgtgtaagtccacttttgcgcagattttcttctgcctctggcactcatgagatagaaagaccaatccttcctcttcctccttctcagtctactcaacatgaggacaataaggatgaagaccttcataataatccacttctacttaataaatagtaaacatatatattttattttgcttatattttcttaatgacattttcttttctctagcttactttattgaaagaatacagtatataatacacataacatacaacatacgtgttaactgtttatgttattggtaaggcttccagtcaacagttggctattagtcattaagtgtttaggaattcaaagcttacacagggattttcaactgtagaagaggtcagagctcccctaaacttcacgttgtttaagggtcaattttacttccaaatccatatacttcaagagaatagaaaaagagaaatgttgcttctcaacaatttttatgttacttaaattcttaatggaaaaacttaagaaatagtatgacattttaaattaggctctaccactcatgaatataaatgtaaatattgtcaggcctctgagcccaagccaagccatcgcatcccctgtgacttgcatgtatacgcccagatgtcctgaagtaactgaagaatcacaaaagaagtgaaaaggccctgccccgccttaactgatgacattccaccattgtgatttgttcctgccccaccttaactgagtgattaaccctgtgaatttccttctcctggctcagaagctcccccactgagcaccttgtgacccccacccctgcccaccagagaacaacctcctttgactgtaattttccattaacttcccaaatcctataaaacggccccaccccatctcccttcgctgactctcttttcggactcagcccgcctgcacccaggtgaaataaacagccatgttgctcacacaaagcctgtttggtggtctcttcacagggacacggatgaaatttggtgccgtgactcggatcggggaacctcccttaggagatcaatcccctgtactccttttctttgccctgtgagaaagatccacctatgac

SEQ ID NO: 20044 - DNA, 2300 bp, Homo sapien
tgtttactaactgttcttttgccgtgaaaaagctctttagtttaattaagtcccagctatttatctttatttttattgcatttccttttgggttcttggtcatgaaatccttgactaagccaatgtctagaagggtttttccagtgttatcttctagagtttttatagtttcacgccttaggtttaagtctttgattcatcttgagttgatttttgtgtatggcaggagatgaggatcccatttcattctcctacatgtgacttgccaattatcccagcacatttgttgaatagggtatcctttccccactgtatgtttttgtttgctttgttcaagatcaattgactgtaagtatttgggtttgtttctggattctctattctgttccactggtctatgtgcctatttttataccagtaccatgctgttttggtgactgtggccttatagtatagtttgaaatcaggttaatgtgttgccaccagatttgttctttttgcttagtcttgctttggctatgcaggctcttttttgtttccatatgaattttgggattgttttttctagttttgtgaagaattatggtggtattttgatgggaattgtattgaatttatagatcgcttttggcaatatggtcattttcacaatatcaattctacccatccatgagcatgggatgtgttttcatttgtttgtgtcatctgtgatttctttcagcagtgttttgtagttttccttgtaggcttttattacattgaggtatgtgctttgtatgccaattttgctgagagctctaatcataaagccatgctgcattttgtcaaatgcttttacagcatctactgagatgatcatgtgatttttgtttgtaattctgtttatgtggtgtatcacatttattggcttgcattatgtaaaaccatccttgcatccctggtatgaaacccacttgatcatggtggattatctttttgatatgttgttggattcagttagttagtattttgttaaggatttttgcatctgtgttcatcagggatattggtctttagttttcttttttggttatgtcctatcctggttttagtatgagggtgatactggcttcatagaatgatctggggaggattctttctttctctatcttgtggaatagtgtcaataggattggtaccaattctttgagtgtctggtagaattcagctgtgaatccatctgtccctggacttttttgttggtggtaatttttaaattaccatttcaatctcactgcttgttactggtctgttcagagtatctaattctttctgatttaagctaggagggttgtatctttccgggaatttatccatctcacctaggttttctagtttatgtgcataaaggtgttcatagtagccttgaatgatcttttctatttctgtggtatcagttgtaatatctcccatttcatttctaattgttcttatttgggttttctctcttcttgattaatcttgctaatggtctatcaattttatttattttttcaaagaaccaccattttgtttcatttatcttttgtattttttttgtttcaatttcatttagttctcctctgatcttggttatttcctttattctgccgagtttgggtttggtttgttcttttttctctagttccttgaggtatgaccttagattgtctatttgtgcttttccagactttttgatgtagggatttagggctatgaactttcctcttagcaccacttttgctgtatcctagaggtttgataggttgtctcattttgtcattcagttcaaataatttttaaatttccatcttgatcttattgttgacccagtgctcactcaggagcaggttatttaatttccatgtatttgtgtggctttgaaggtttcttttggagttgatttccgtttttattccactgtagtctgagagagtacctgatataatttcagttttcttaaattcattgagacttgttttgtggcttatcatatggcctatcttggagaaagttccatgcactgatgaatagaatgtatattctgtggttgctgggtataatgttctgtaagtatctgttatgtccatttgttccagggtatagtttaaatccattgtttctttgttgactttctgtcttgatgacctgtctagagctgtcagtggagtattgaagtttcccactgttattgtgttgctgtgtatctcatttcttaggtctagtagtaattgttttataaatttgggagctccagtgttaggtgcatatatttttaggac

SEQ ID NO: 20045 - DNA, 2300 bp, Homo sapien
ctaattatatcaatccaggaagttcactcaacttacaaaggataaaagattcatcatataaaaatcattctgcttccccctaatagagcactatgtaaagactaattttagtaatagcagcaaattgattaaaagttcaagtttcctatttaaattcctgctttttctcctacataaaagaatttttgcaggcattgtcaccattctatttgtgacaaggcttgtggtatgtctagcattataggtattcaattaagaactattatcacagcactaagcaacagggctgggcttctgaaaacaggtaagtggaagtaatggagacctagagaggacacaggacatagttctggagattcagggggaaaaaacaagtagttcaactagtatgtaatagactccctttgtgtgcttaaacatagaccattggtttattagaaggcaaaatatgcatgactttccctatttataaatcaaggagtcttacaagcagaaagataatcctcaagaatgtaaaccattcttggcattatccctccatctgtaaactaactgcagtgatgggtacacagctagggaacagctcacgatataatgagagggatttcataaggtaccattatgcatgctgatacttctgatgcactggctcattttacttcttcacgctgaagatgcttctggaaagcagatgagcaagacctggcaatgtagatggcaacttagccttgacgttggaggtgcagaaagtgctgccccccacccgccagaccaacctgcctgcccgaggtatctgcttgggggatgagggtgtcaactgataaggttttgatgaacagactctacttccctaagttgtaaggtcatgaaaaacacgaagggagattcttggttacagaagagcgaaaatacgaaggcaggggcggagcacacgtgaatttagggcacgcatcccggagaaacgacctcttggacctgcacctgtcctggcaggtgcgcgcatccccggccacaggcgccgcaagaaaaaatatttccccgagaggctactctatttgtgtcataacttagggtaccccacgttgcagggtagaaaggatttcctccggtcgttcttccatacccttctcacgttgaagacggccacgggccttgcgccaagctggacgaataaaatacacggtgaagagagcggggccgcgcagtgacgggcttcccgccaggggaccccacccgcaggccctacagtcacctgcacccaaaggccctggcgcgcccccgggccgcgccaccgcccctgctgggcccgcgcagcgtctggaggccgagccagtgctgctgcaagatccgaccgcgtccagtcgccatagagacaaggagttcaccacaggaccgcgccagggctgaaacgaagagtgcacgcaccgcccccacgcccgcacgtcgccacaccccttatgcgcatgcgcgcgtgagcaaaagtaacggtatgcccacccttgcgcagacggcaccgcgccagacacccgctcacagagcgggcttctagaaacttccgggcctcggcttccttacccacccctaacattctgccgcctagggcgccaagccaagttcgcggcttaaccatttaggaaaccggtgcctgctttgcagcggcctcgttcatccccacttgctgactctttattgtccagtttttctgaaaacacagtaaaacgcaaaaactaaatcatttgcccacgcggaattggcaagaccacagtccaagggggtatttcccactgtgcacagtcctctctataaggatcaggaaaacacgtagattgtaactgctaatttggcttttgcaagtcccgcctgaaccacgtagggtgggtggtaccaattcccccaccaacaccccactttccgccgctccagggacgcgcagcgtctgcgccgacgctgggcgcggaggcgtctgggggcgcgggaaggacctgcgccgtgctctggccgccttgaattgtgggagatgtagtctcttttgcgcgcctctttgccgtatcccagttaagagcgaggttttcaaactactattcccaggaagacgggggtttcccaggtgactttgcgaaggcatggcggggacactgtgaatgtcagcccagaaggtgatcagagcctgttaattaaaatggaaagaagacagaagggaaggtagacatcaggttctccctggagacttttcgttttcatttacgctgcggaaactgacgtttttgcctaacaccccatgtaatgtaaacgtataggct

SEQ ID NO: 20046 - DNA, 2300 bp, Homo sapien
gggaaggggtccctaagcaggcctggtgtgcagtgcaagcatgagcactgttgcctgagccagatgacctgatgcacatgctgtttgccacttctatgcctttcacctctgcatacaggttgttccttcgtgctgaactagtatgaatgaaaagctaggtttttggcatagtcagcagactctaaaacaattggtatgatccaattttttgggttaaaaattattaaaaggtatgtgtatgaaagtgcaaaatgttaaaaatagtcatcttcgtgtggtataatcatggcggtctaaattgctttgtctttttttttcctacaaatcacatgcgaaatgaagacattaaaaaaaaatcttaaaatatctgtgaatacatctctgactttccctgacaacttacattccatcctccctattttatgtttttctattactgcaggtaacatgtgaaagttttccctaccagttatgagtcaataatctctctctctctctttttatcctatccaattactctttattatatgtaacagagccaatataacttgagaaaaatttcccaaacataatgaaaaaaagttatatcaaattcaagatcaactttcacatctgagttccaatctgtgaagaaaactgtagatctatatgttctagttctaaattatgtttaaacggtttttaaaaattcatgtgaattgctttttcacctttagcagtgaacttggtataaaagggcattggcagctcttgtcatgtctgttgaaagcccaatcattaaagtactcctttttacctttttgtgatgttgggacggcggttccccctctctgactcctgtgcacagacacttgtttgctgccatcctcctttgcttttcgggggctcggtccctgcgtccagatggttttctgggtgactccaagaatacatctaggtcgcagcgttttcttttgatattgaagcccacatctcaaactgggctcagtcttcaagcacgctttgttaagcacgatgtatggcaaaagcaatcgctttgccgaggacctgtgcagcttctccgtatactgtacggctcgtagaaaagtacaaatcatgttcacggaaaatcgttccgcttagggacgatgctaactacaattaggaaagctttagggttcactacacatgcggccggacacgtactcaagcctatacgtttacattacatggggtgttaggcaaaaacgtcagtttccgcagcgtaaatgaaaacgaaaagtctccagggagaacctgatgtctaccttcccttctgtcttctttccattttaattaacaggctctgatcaccttctgggctgacattcacagtgtccccgccatgccttcgcaaagtcacctgggaaacccccgtcttcctgggaatagtagtttgaaaacctcgctcttaactgggatacggcaaagaggcgcgcaaaagagactacatctcccacaattcaaggcggccagagcacggcgcaggtccttcccgcgcccccagacgcctccgcgcccagcgtcggcgcagacgctgcgcgtccctggagcggcggaaagtggggtgttggtgggggaattggtaccacccaccctacgtggttcaggcgggacttgcaaaagccaaattagcagttacaatctacgtgttttcctgatccttatagagaggactgtgcacagtgggaaatacccccttggactgtggtcttgccaattccgcgtgggcaaatgatttagtttttgcgttttactgtgttttcagaaaaactggacaataaagagtcagcaagtggggatgaacgaggccgctgcaaagcaggcaccggtttcctaaatggttaagccgcgaacttggcttggcgccctaggcggcagaatgttaggggtgggtaaggaagccgaggcccggaagtttctagaagcccgctctgtgagcgggtgtctggcgcggtgccgtctgcgcaagggtgggcataccgttacttttgctcacgcgcgcatgcgcataaggggtgtggcgacgtgcgggcgtgggggcggtgcgtgcactcttcgtttcagccctggcgcggtcctgtggtgaactccttgtctctatggcgactggacgcggtcggatcttgcagcagcactggctcggcctccagacgctgcgcgggcccagcaggggcggtggcgcggcccgggggcgcgccagggcctttgggtgcaggtgactgtagggcctgcgggtggggtcccctggcgggaagcccgtcactgcgcggccccgctct

SEQ ID NO: 20047 - DNA, 2300 bp, Homo sapien
gaggattcaaagtactcagagcttggggtggagaccgaaggaacacacaggagagaaagaagaaagatttgggatgagtcgcattgggagcagagactagggcgggactgatgtgtagaagaatgcctggatgtcaggaacctcagaccatttgcccattttacgacaagaattatctagatcttgtagggtggagaaattgaaagtgccattttctggctatttggaaccactgtcaagtttgtattggggtcaggtggtattgcagaagaaaataaggtgtttaggttttaggtcaggcgagagttgaagaggttttaagttcttgagaacacaggctaagggagaagaaggaggaatggagggtggaaggttgcccatagtgaaggaggcaagcccagagaaaagagagggcagagacacagggggggtcggtacttgacaccaaggtgaaggatcaaggcaggtgtccctgtggtgatcagacacctctgaaatgtgggtgaataatcaggcaggcatccctgcagtgattaaacaccaagggaagactgtcttctcgagtccgtgaccagtgccggagttttgggttcacggataaaacacatctcctctgtctctatcagaaaaggaaaggaactgaaattaagggaagggatagattgaagggtggtgccaaaattgaaaggagaaagaggttgagagatagtgagagaggttggagaagagagtaaaaagaagctgcttacccaatttaaaattggtgagatgttcctggagctggttggtctgaggacccgaggttgtaggtggatctttctcacagagcaaagagcaggaggacaggtgactgtcttatcagttaaggcaggaaccggccattttcacttcttttgtgattcttcagttgcttcagcattttcacttcttttgtgattcttcagttgcttcaggccatctggatgtatatgtgcaggcttgggctcagaggcctgacatgcgtgtgttttgtgtttttctggataggcatgcattcctatggaggaggtaagcagggggaagggagctcacattcatcagacacctagtatgtgtaggaaccttctgcatccctggaaggatggatgaccccacatgtgaaacctctcgtgtggttctttttggaattaactaccattgctgaaaagggcctacataaaatatcaaattttaacatgctggaatttttctttattttttttctccttcaaacatttgtagctctttatatgtggtatttcctctgtgtcagaagggaaagagggtgccctttggggaagttctcttccagactcctagaagagaatctgatttaccttaaatgcacaaacaaggccttgccatgtcactggccaaccgcagacaaactacttcagtcacagaaataatttggacacttttgctttttaaggaaaagatgatttccctggatttttttcctgtgaggacgaggcattccaaaaccccagcggggtcaggcacagttcgccaactttatgttttggggggcagcgcatttgcttcccgaagtgagttgcgaaaccgttttctagcgcgcacggggctttcatctcttccgtgcatgcgaacggctttccgagatgccccctttatgggcttggccatcgctacttttgttacaaattaacgtctgggactcggactgctgccaataggaaactcccgcgattcgctgcctagttcgccgccctcacaagactggactctgcacaggccatccatgcccgctggtgcacctcgctctctcgcacgcttaacccgcggggacgcccccgacctcccacctcagccctcgccacagttagtcccgcccttccgcgcagactccgtggagtcctgtcacgctctccgcgcgctgcggcagccgggagattgtgaagggcacctccggcagccaattaacacccgcatactgggcgggaccacgcttgggcaggcggagggggtcgaccgaaggcggggacttttgagtgacaaggatgatggccaaccgtcggaggcccttctactgcgccccgcccctgagccggccgcccagcccccagtggggttcccggcgcggggaatgtcccgggtggagctggctgagtcgcgcgctctgctccacccgacggggctgtgtgtgctgggcctggctcgcggcgaaccgagatggcagagcagtcggacgaggccgtgaagtactacaccctagaggagattcagaagcacaaccacagcaagagcacctggctgatcct

SEQ ID NO: 20048 - DNA, 2300 bp, Homo sapien
acagttatcacaaaatttaaattgaatctatatttactttttacctgtcttcataaaacagaggggtttctttccccatgtgtacataccaagtaggacaaagagattttctgtaatatcgaaaggtttgttttaataattgcaaggactgtgacataaaaccttcagaccgcaggtgttaaatttgagacattacatttgttagactatttcagaagattgtgttttgttcaattaatgtaaagtgtctttgtcttaggaggctgatttgtctcaacaacgttgtgataatcacttactataatctcacatctggggtcataagtaaccaaacaattgtaaacattgaacacattcttattgctaggaagatatgtaaaaatgttcctctttgccaaaaattattttgcaaataaaataggtaaatgactttaactgattagacattaaacacaatataaaatctcattctttcacaataccacttctgggagctggcaagatgtgggattgaaaagtagcaaatctctgacttaatgaaaatttcctgacattccacccatgaagttccttgtcatctccctgacctcatattggggtgtcccaggatccagtgtgagggttccttttcttcctaaatgcactctcatggagatccaatctggcctcaggttttaaatagcatctattatatgcagatctttccccagaactcttattgttcctcttcatttctcaatgtcaacaagtccaaaactgacatgaaccctcctgatcttcagccccaaacttgctcctcttagtcttcccctttgtaattaatggcaacccaatccttctgaattcttagtataaaaaccttggagtgatgcttgattcctctccctctctctcagatcccacatcaatccatatccaaatcctattaaatctaatttcaaaatatatccagaatccaatcccatcccatcccattccctccactgccactgctctgatccaagccacctctctccttattgccattgcctcctaactgcttttcttcctttccctgtccccttcagtccattccagcacagcaggctggatgcacctttaatacttccatggcttatcgggcctaaccctgtctggctctctgtaactcctcctgcctcacggagccacttctttcctgctctactgcagccagctggcgtccctcctgccctggccttttgtaggattccctctctcgtaacaaacattctcccccgagacatgcacgaggctgcccactctcaccgccttcatgtctttctcaaacgtcccgttctccacgaggccttcctgaccacgctattaaacctaacgacttctcctcggcactccccgcctccctaccctacttaatttttctccaatgcacctatcaccatctgccacactaagattttgcacatttatcttgcgtatctgttttcccccaactaccaagtaaaatgtgcatcccacaaggaccgggaatgctgtttgcttagtgctctatcagcagaccttagaaacgcatctgcacacagtaggcgcttcgtggatttactcccacgagcttgcaccacgcttcccctccacaccaggcatgaagatgttccagtcatggagattcccaccactaaaggaactgcagaagctgtaaattcgggcatgagaatctgaggagaaacgtgccgaggcaagaggctgggtagcccctgtgcagcacgcagttagccggggcttcagcgccggagctccccgttggacgtgttgcgctgacccagctttcccgccttcgagggcggccagaaccttgtgtcccggccccacccacaccagctcaggctgagagaatctcacagggcttcactgggtcatccgtgaccagctttggtcggttcctgccttggcgggaaaagttgacctacattgcgtgccaggagcgcaaggcttgcagggcatgctgggagagcgcagggaacgctgggagagcgcgggaaatactgggattggctcccgagggctgtgaggagggcacgaggggacactccgatgaaggcagggcacgcggggcgagccgggagcgtctcctgagggcagcgaggagggagctgaggcacgcgggctctcaatcgacgccccacagagaccaagaggcctggccttggggggcagctgcttgaaggaggcagagcggaagcgagggagactgctggaggccctgccgcccacccgccctttcctccccctgaggagacgcctgacgcatctgcagtgcagga

SEQ ID NO: 20049 - DNA, 2300 bp, Homo sapien
gcctcccaaaatgctgggattacaggtgtgagctacctggctcctttctatccttttttaaaattatgtaattttctgcagaaaggatatacacaccttatgttaaatttattgctactttattttgttcttgttgttactgttataaatggcaactctttcaattacattttctaaccacttgttgcttccagcaaaactgctgcatttaatacaattaattggttctttttgttttttaatttggggttttgttttaaatgtatccatcctaattgaaactatgtactctttgaccagtatctccccatacccccagccctcataaccaccactttattctctgcttctcagagtttgacttctttagattccacatgaaagcgaggtcgtgcagtatttgtctttctgtgtctggcttatttcacttagtgtaatgtcttccaggttcatccagtgagttttctgaaaacaaattctttttgttttccacttagacaatcatatgatccaaaaaataatgacagttttctttctttcttctcgtacttaaactttgatttctttttcttatgttgctgcattggctaggactttcatccagggtggtgaggatttctccccactgtggcatttttgttttctatttgctttgcttcgtatttggctcctttcttcatcatttccttttttaaaattgaatttatcaaggtttctttagttttcctctttctctctttgttagacagttacagtttcgatttctattttaacacacatacctaatcttaaaacctctaaatgttaaccccatacttacctgcccctatgggcaggctcaacattccagaatattctgtccagatagctctggatcaaactgctctggatgaaaagacatcaggaatagcagccttttccagttcagaggttctggtttctggggcttcttcccaagctgtcatgctaaaaaaaaggcttaagacaatttagcatatattaattattgtatgtgattcattattcaacactgattccacccaggattattgataaggtgtatgtcacacctgtttctctctttcctactcaatggtcacaacacctgcctacacctgggtggcaggtattggcgcctagtgagtcgccgccagattcccagcttcaaatggcatctagcaagcagcccacgacccatcttccaattttccactacaatcctggggagtatgagcactcctattgccaatctccttagctaaacttaaataaacacaactcacatttccctaaaatggcatccaagtggtcagaaccatttgcatatttcttgatgaaacagaagacatacaagccgtgaaaaggatggaattttaattttgataatgggtgacagcttggcttctctcccaatgtggtctagtttacttagattttcctagttaagctaaaagtctttccctccctttggagaataggtctcccttgaatactctggaattcatttcctctcactcaaaattaaagctaatgaaaatttctattattttctttaaaaaagaaaaaaaaaacccactccctcagaatgtcttcactccacattccctcctacttcccacatcattttttattatcttagttccattcttgtttccctaaatcagtcatttttaagagctaaaacttatctaggtttcctaccttatgctattgacttcttttcttcctgtgtgcctctctcactcactgctcccagaaaccaatcccattcttggatatacccgttggtcattctttcacagagggcatggcctggcaaacatcttagactgcaaatgtctttatttcaccctcactcttgaaggataagctagctgagtacacaattcgaggatgaaagctattttgtctcattaaaaaaaaatgttatttgctggtgtttaatataggttgagcatctttaagccaagaatctgaaatgctccaaaacctgaaacttatgtgtgcagacatgatgctcaaagaaaccctcactggaggattttggctttttttttttttttgagacggagtctcgctctgtcgcccagactgggttgcagtggcatgatctcggctcactgtaagctctgcctcccgggttcacgccattctcctgcctcagcgtcctgagtagctgggaccacaggtgcccgccaccacgcctgctcaatgcgtaagtataatgcaaatattccaaaatccaaaaaaagtcaggatctgaaaccattctggtgccaagcattgtgggtaagggatac

SEQ ID NO: 20050 - DNA, 2300 bp, Homo sapien
tttataaaatgccaaaagaagtgggcttcataacggatttttaaaacccacaaaagtaaaacaccatgtagatctgaatgtggttaattttgatttcaagttctgctttcccccctgtaatttctgttcctatgttttaaaagataagtagtcacactgcttcatctcattcttcccattcctgcactcccctccccacaccaaatacaattcttgggaaaggaaaacaacttcacatcaggttgagatttctttttctccttttaggtacagggtctcgttctgttgtccgggctagagtgcagtggtgtgataacagtcattgcagcttcaaattcctgggctcaagcaggtcccctgcctctacccccagagcagctaggactacaagcccacatcaccatgcctgctaacttttttttttttttgcccaggttggtttcaaactgttggcctcaagcaatccttctgccttggcctcccaaaacactgggattgcaggcatgagccagcaggcttggccttgaattgagagtttaatgcagtattttactaggatgctttctatgctccacacctattttgaaatgaaacaacacagtttccatacagccagcctgtgaaaatatggtacttctggttgggcgtgtgctgggatggatggaggtggggggaagcttcacacagagagagcttcacctggccttaccgctgttgattgagtgacacccaaaccctgctgttgattgagtgacacccaaaccccaagggtctgttgcattcggggcatatttgtgatgtgcccgaagtgcttcttggggctcagggtttgttcatctgatgtttggtcattcctggggactcctaccaccgagccagccataaaacaaagttaaagcagcgagttgcagaagagacaagggcaagaagccagctcctgtgggacaatcacagcacgcagtgatcagggcatgtttctattatctctaaactcgggaacgggtcatgtgaaattcaggcgcagggcaggcgggagagcgatccgggatgggctggcacgtactgggcactgaataagcttttgttcagtgaatgcaggagccccgggcgtggcggctttcacagcccctcagctgtgacagttcccctggggtggcgccgcctccccctatcctggggaaaggcgttcagggagtgagaagcatccctgggtggggtgggggatgctggtgagaaccagggacgccctgtgggcccagggccagcctgctttacagaacaattgggatgggaacacggatgcctgctctcccagatgatactgcgaatctataaatatagacttagacacacgtggtggacgtgttctcctccccggggtaacggagatgtttccagagagcagatctttgcagccctgagaaggacgcccgagagtttgtgcagcctgggagacggcggggggtttgattcaggggtgcccgtgggaaggggagggctgggtcgtcccagaacctactgactgtcctcgacccccgactctctgcatgctccggatctcactcccgggagggcccggagaaaacccaagttggggtgagactcagaggggggcggttctagtggagaggtaaacggggggggacaacgctgcagccccctggggcgagggtgcgctctacagagcgctgggggcaagggcacctggcctctcagagaagttggtgggggagggcaatgtgacaattaaagatatgtagtcttgaggaatcagtccccaaagagagaggcgattgaatctacccggatttcgtttaagtggggagctggtcttcttgggggaaaaaagtgcaaaaagaaaagtagagagggtggagcaggggatgcggcgagtggacccccagtgggtgctcggggcgcgcggggtgttgctgctgctggacgccctccccgcacctccgccccaggcgcggggcctgccccaaccctcgcgcggcccctcccccgttccccctccccgccgagcgggcctgagccgcggagcagctacgcgagtgcggaactcggggcgcgggcggcggtggggcccgggcgcgggcagggctggccatggcgcgggcggcgggcgcgcggggccctgccgggtggtgcaggaggcgcgggcgctgcgggcggggcacgctcctcgccttcgccgcgtggaccgcgggctgggtgctggcggccgcgctgctgctccgcgcgcacccgggtgtcctctccgagcgctgcaccgacgagaagagccggcgcatcctggc

SEQ ID NO: 20051 - DNA, 2300 bp, Homo sapien
cttctctttcccaactgttcagaaaaagcctgagaagcctgcgtgcttggctgggattggcgtgttggggcctgggctgcctgactggcccctgtgactggggaatgagtagctgatctcagcccagggatcgggagcccaccctgggctggcgctgcagatggggtcagagcttgagagggtgtgatttcccaaggaagctctgtgcaaggaggaggggaagaggcgcaggacaaggagaaacggcaaatttctcctgtaatatctttcctgcccacatacacctcacatcacagtttttatgccagcatcattttcccaccagcggaggactaaggcttatttcaccagtcctcatggcacacagtaggttacttccaatgttgctattacaaactgtgttctaaagaacatcttgatgctaaatatctgcctatatcctacaaaaattcctaattaccttaaatcagtgcaaaacagttcataagctttacaaactaggcagcttcagggccctaggcaaaactgcaaaataaacaaaacttcctgtggtatcaacctaagctgcactctccaccttgtgctagagagcaccatcacttccgtgttaaaacagtgctgaatatgaaaaggatttctttactgtgggattataagtttattttcttctgaatactttataaaatgccaaaagaagtgggcttcataacggatttttaaaacccacaaaagtaaaacaccatgtagatctgaatgtggttaattttgatttcaagttctgctttcccccctgtaatttctgttcctatgttttaaaagataagtagtcacactgcttcatctcattcttcccattcctgcactcccctccccacaccaaatacaattcttgggaaaggaaaacaacttcacatcaggttgagatttctttttctccttttaggtacagggtctcgttctgttgtccgggctagagtgcagtggtgtgataacagtcattgcagcttcaaattcctgggctcaagcaggtcccctgcctctacccccagagcagctaggactacaagcccacatcaccatgcctgctaacttttttttttttttgcccaggttggtttcaaactgttggcctcaagcaatccttctgccttggcctcccaaaacactgggattgcaggcatgagccagcaggcttggccttgaattgagagtttaatgcagtattttactaggatgctttctatgctccacacctattttgaaatgaaacaacacagtttccatacagccagcctgtgaaaatatggtacttctggttgggcgtgtgctgggatggatggaggtggggggaagcttcacacagagagagcttcacctggccttaccgctgttgattgagtgacacccaaaccctgctgttgattgagtgacacccaaaccccaagggtctgttgcattcggggcatatttgtgatgtgcccgaagtgcttcttggggctcagggtttgttcatctgatgtttggtcattcctggggactcctaccaccgagccagccataaaacaaagttaaagcagcgagttgcagaagagacaagggcaagaagccagctcctgtgggacaatcacagcacgcagtgatcagggcatgtttctattatctctaaactcgggaacgggtcatgtgaaattcaggcgcagggcaggcgggagagcgatccgggatgggctggcacgtactgggcactgaataagcttttgttcagtgaatgcaggagccccgggcgtggcggctttcacagcccctcagctgtgacagttcccctggggtggcgccgcctccccctatcctggggaaaggcgttcagggagtgagaagcatccctgggtggggtgggggatgctggtgagaaccagggacgccctgtgggcccagggccagcctgctttacagaacaattgggatgggaacacggatgcctgctctcccagatgatactgcgaatctataaatatagacttagacacacgtggtggacgtgttctcctccccggggtaacggagatgtttccagagagcagatctttgcagccctgagaaggacgcccgagagtttgtgcagcctgggagacggcggggggtttgattcaggggtgcccgtgggaaggggagggctgggtcgtcccagaacctactgactgtcctcgacccccgactctctgcatgctccggatctcactcccgggagggcccggagaaaacccaagttggggtgagactcagaggggggcggttctagt

SEQ ID NO: 20052 - DNA, 2300 bp, Homo sapien
ataatgacaattaacatatttccaggtaacagggttctatattaagggtaaatgttgtgttttgtattttcttaacatttattcagattcataggagaaacatgttcaccaacttcttcaacactgagtactgcaaatgcattttcatgttttcacttggactgaagcatctgattgctctaaagttctcaactacttctttgctcattatttattcttaccttgagcctattaaattttggtaacagtagtgtgttatggcttctactctaaatcacttctttttgctatatacatatgtgtgtgtgtgtgtgtgtgtgttttgtttttttttttaaccaaaccctcttttcagcaataatctcatttatggatacctgaacgaatttatttaaaagcccagtagatatgattaaaggatgtatcttccaccaatgtttactttttgcaatgtttgcaaaatgtgtaatatagttttttctttttatcattcatgtacaataattattatgagaatttaatccagaagaaaaaatgttaatacttaaagctttttggttatagcaaagtgtctatggccataccaccctgaacatgcctaatctcatctggttatagcaaagtaaatattaatttaaatttttatcatagtctgttgtagagaaatgattaggatatgagtaagactattaagtataaaaatgttacatttaacaaaattctatgagggatgtggaatagaaataaaaaataaaagaggaggcagggatgggggggacggggtggctcacgcctgtaatcccagcactttaggaggctgaggcgggtggatcagtaggtcaagaaatcgagaccatcttgaccaatatggtgaaaccctgtctctactaaaaatacaaaaattagctgggtgcggtggtgcgcacctgcagtcccagctactcgggaggctgaggcagaatggcttgaacctgggaggcggagcttgcagtgagctgagactgggctactgcattccagcatggcaacagagcaagactctgtctctaaataaataaataaataaataaataaataaatataaaaagaggaaacaaaccatgtaaattttaagggaggagacaattttaacattttactttatgtgggaacgtatacatctcttacaactattaaattcatttttaaaaaataataactcccgagccatcactccttaaagaatgtggtagtggtacaagtttaaagaaagtcttttgagaacactctattggaaaagtgagcagactagggaataacaattttacccccaagaattgttgttaagattaaaaaggaaagcgctgtcgcagacgctcaaacacggtgctggctctgcttccttcatcagttcctagggtcatgggacacaaatactaaaatatttccactactggtaacgatgctggcgaacgctttcctaatccagttcagaccgacctctcattggagcttgtgtgacccgcaggagtccgtgccccgactccgccgggactgaaacgcaacggaaagtgcagtgctggatgcgcaagggaatgggagcgtcgtgggacctccggagcctgggagatcagagggtggagtcagggccccctagttttggactccattgccgcactgcaggcgacttctcggaccccaccgttgaagcaccaggccccccgcccacccaagagcaaccgggaagcacagcacaagcccacagctccggacacgcgctcccgtgtgccctgcctcccctgaatcccaacccacgaaatctccgccccctcgccacgcccacatccccgtctaccgtcggggaggggcgacgaggcgaaagccttgtggaccaggccgggattggtgggcgggacggaaatggagctgggagaggtgacgtcaccttccgcacctggctcagggcggaaatggggcggggagagagtgacaccacccctctgcctgtggctggattggtgggcgtggcgggggcgtggcgatgcctgccctccggacaaggcggggttggtggccagggcgaccgcggggcgggccagcgccgggggtcgtggccgggacacgtggtacggaaccggcgccgcgcttgctgctggtaacagggccttgcctagtgggccttccttcccaggtgggtcttcctgatggaccttccttcccgggtgggcgccctgagctgggaacgggctgggcggggaggacccgggtcagcggcgagagtcacgcctcattcgtgggggagcgtggggcgcccggccgca

SEQ ID NO: 20053 - DNA, 2300 bp, Homo sapien
gggatcaagttctagcttgggcagattggagattcttttattggttcttaatcagacatgaaggtgtgattcagttatttgtgttatatatgccttcaattatcaagggacagggactgagattctcagaactagaagactcatttgtgtgtactactgacggttccaggtgccacagcaatttctcctgccctccactagtctcaacatttaaatcatgttactcccttgccaggcatggtggctcatgtgtgtaacctcggcactttgggagaccaaggcggacagatcgcttgagtccaggagttcgagaccagcctgagtaacacgagcaaaccccgtctctacaaaaaatacaaaaattagctgggtgtggtggtgcgcacctgcagtcccagctacttgggaagctgaggcaggaggatcatttgagcctgggagacagaggttgcagtgagccaaaatcacagcaatgcactcctgcctgggtgacagaatgacaacctgtctctaaataaataaataaagttactccgtatgaactttagatttttagaggggagtgaggtgtcatttaaaaggataatgcttttgcttaaatcagcatactgcttttaccttaattagtggtgttctccagagcatataaaaatggttccatttaatggctttgtaacgggggaggtggggggaagtgaaacaggagtaacccagaagtgtgaatgggaggagaaactggaacctggcctagcctggtttgactggatgagtgattaacaggagttgctttttagcccatctctgatggtggaacaatctgatccctgtttcctctcttttagtgaaagtcgtaacttagataattacagtcatatgttgcttaaggatggggatacattccaagaaaatgcattgttaggcgattcgttgttgtgtgcacatcctgagctgcgctcacacaaacctggatggtacagcctcctacatacctaggctatatggtgtagcctattgctcctaggctacaaacccgtacatgtacctttactggatgctgtaggcagttgtaacacagtggtaggtatttgtgtatctaaacatatctagacagaaaatgaattttttagctccattataatcttttgggaccaccgctgttgttgatggaaatgttatgtggcacgtgactatatttttgagtgactttagctacaatgccactggttaatttgactacaagagaataatattaatgagaatgtaccacagtgagcttgggatttgtggcatttaataaccaggaacccagatgaaaatcaccacatgtagcatattgtcctgctaaataggatttcctttaatgtgaacaggtagcttccctgcgtacatttttggcaacaggtggatgacagtgttatttattaacactgataaacgcctctccagcgtgctcatgggctccatcttacttgaggctcctccaaatgagtgcctcagcagaaagatccgagctggctgggaggtatataaccattccatgctctgtggctagtgtttgaagaggaggaagagggcacttgagaaggcagtggttggatgtcccacccacatagaaatcacatttgcaacttgcagtgccctgcgatttcatcaccctgcacagcaacagccacttttgaacagttgccacgcttggtgtcgtggtggataaagtcacctctctgttgagaaatcactttgaaagcctataccaaggaaacaatgctctttacctgcagcatgtcaatgcacaggcgtttgtctggcatgtagacacgaggctgtagtagggtcctgtcactccacagctgtgactctgaggcacttcatgtccccgcagttttgaatttgctccgtacagctgtgtgctttctgctgcggaaagccaattataaaagtcccaataccagaatcaattttccattgtattcattgtgactaacaaaaagagtctgaggatgtgttttcacctctatctgtgagtggggcggaagttgctgggtgtcacacatggaagtggggtgagagcatgcgcgctggagcctgtgtggcctcttggtcaggtgcttgtggaggtttagctgatgccctttggctgtttctggactaagatcatcaactttcttaaactgaatctggttttccttgggctctgtcgtctgtgttgtgggtttgtggtggtggacacaggatgtgacattcttgctgggatccctgaagtgactatatcctctgcaataacagaaagtgaaacttatctt

SEQ ID NO: 20054 - DNA, 2300 bp, Homo sapien
ttagatttttagaggggagtgaggtgtcatttaaaaggataatgcttttgcttaaatcagcatactgcttttaccttaattagtggtgttctccagagcatataaaaatggttccatttaatggctttgtaacgggggaggtggggggaagtgaaacaggagtaacccagaagtgtgaatgggaggagaaactggaacctggcctagcctggtttgactggatgagtgattaacaggagttgctttttagcccatctctgatggtggaacaatctgatccctgtttcctctcttttagtgaaagtcgtaacttagataattacagtcatatgttgcttaaggatggggatacattccaagaaaatgcattgttaggcgattcgttgttgtgtgcacatcctgagctgcgctcacacaaacctggatggtacagcctcctacatacctaggctatatggtgtagcctattgctcctaggctacaaacccgtacatgtacctttactggatgctgtaggcagttgtaacacagtggtaggtatttgtgtatctaaacatatctagacagaaaatgaattttttagctccattataatcttttgggaccaccgctgttgttgatggaaatgttatgtggcacgtgactatatttttgagtgactttagctacaatgccactggttaatttgactacaagagaataatattaatgagaatgtaccacagtgagcttgggatttgtggcatttaataaccaggaacccagatgaaaatcaccacatgtagcatattgtcctgctaaataggatttcctttaatgtgaacaggtagcttccctgcgtacatttttggcaacaggtggatgacagtgttatttattaacactgataaacgcctctccagcgtgctcatgggctccatcttacttgaggctcctccaaatgagtgcctcagcagaaagatccgagctggctgggaggtatataaccattccatgctctgtggctagtgtttgaagaggaggaagagggcacttgagaaggcagtggttggatgtcccacccacatagaaatcacatttgcaacttgcagtgccctgcgatttcatcaccctgcacagcaacagccacttttgaacagttgccacgcttggtgtcgtggtggataaagtcacctctctgttgagaaatcactttgaaagcctataccaaggaaacaatgctctttacctgcagcatgtcaatgcacaggcgtttgtctggcatgtagacacgaggctgtagtagggtcctgtcactccacagctgtgactctgaggcacttcatgtccccgcagttttgaatttgctccgtacagctgtgtgctttctgctgcggaaagccaattataaaagtcccaataccagaatcaattttccattgtattcattgtgactaacaaaaagagtctgaggatgtgttttcacctctatctgtgagtggggcggaagttgctgggtgtcacacatggaagtggggtgagagcatgcgcgctggagcctgtgtggcctcttggtcaggtgcttgtggaggtttagctgatgccctttggctgtttctggactaagatcatcaactttcttaaactgaatctggttttccttgggctctgtcgtctgtgttgtgggtttgtggtggtggacacaggatgtgacattcttgctgggatccctgaagtgactatatcctctgcaataacagaaagtgaaacttatctttgtgctttaagagtgtaaaaatttttattaaagtaccagtaaaactaaaagtgcctacttttagttttcactgtattttcttcaactcaggccctccctctgttgttacctgccatctgacacggaattttgtgtaattttccttccaagtaaagaagggaagtttagccccagcctctaactggttcccaaagtttttgtctctgaagccgcagtcacttcctggagcgtctctggctgggtgttgcagtgctggctgggagggtggggcaacaatttacaattctgaacacgtgctttctgggcaggtcgcccctcagtctccactagagacaggactgaccagttgctcttccttccaagaaccttcgagatctgcggtctggggtctggttgaaagatggcggccctcactaccctgtttaagtacatagatgaaaatcaggatcgctacattaaggtaagggaatattcattttaggaaacagtaaaatctgatttaatcccatggggcccagagaagttgtcaagagctaatatgaat

SEQ ID NO: 20055 - DNA, 2300 bp, Homo sapien
cttccgtgggcctggcacctgcaggccttttgaggcccgtgctatgagggaccccgcaggccagcctcttttcttcctgttccttctggtgtaaaggccttctgctttcatttctgaatttccacatgtgcctgcacgggaggctttgaccagatgaggaatcctcccaccctcatgctgggcccctctgggctaagttccaggctcttctcatcgaagcccttccaactggatcattgcatctgtgttcaaacctttcctggcccagtgtcagttgtgttcattactgtgcaaaactgaaactgactttacttaaagcaacattttttatgagatgtaattccatgtcattgtccttgtcacggtggaattactaacttgcggtggattgtaggattaaccctctctgtgcacttgggcgcccctccagcgtcagacccacctgtctgcttggccgtgccctcactcctggaactcgctctctctggacagaagtctttgtctttgctccttgtccgctgtcttacagtctccgcggatggcaccatctctctgccacctgcactgggaactgggtccccatccctgccaggctctcctctgggaccactgcccttcccacgttgaaagctccctgtccccctcacccactccgtggctgggtcctgctctccacttctgggccttcacggtgccactccttttctgggctgctcccagagtgacctcaacatgccacttctcttcttgactcctcttgggggactcaggatggcacagagggtccctcccctcacctgccttctgcctgccccttctcccacctgtacccagccacacgggaccacgtgcagcccccaggagcctgtgctgctcaaaactgcacctgggcacctgcgcgggcgtcagccccatcaccgctgcctcgtcctctgtgaggcctgcctccagccatcctcttagccctccctgtcccagtctcagtaggctcctgactgtcaaggaacctagaagagcacctgtactgtgggaaaacttcactcactgccagccgcccggcctccctctccttgtcagggagccctggagggtgggggcaggtcacatttgtcggcagctctgagccagcaccgtgccagccgctgtagttgttcagtgtttgttgtagggataaggattgttgttttagaaaagcttatatttgatcttcagtttttgtgaaaagttgggtttcattcgtcaaaggaaattccccaggtggtgatgactttcagcctcatactaccttgggctggggcctgctgaggctgcgggacctgggaagcaggctgagccccgggaggtcaggagactggccacgcagacccaggcccacgagaaggccacgccttgaggacggctccctcctctggttccatgaggccgggactgcgtggcagaggatggaggaggcgtggggccttgtcttcaagttgtcgcttgtgttgtcagcttccccagaagcaattgtggtgaggggccgctgtgactgatgacgctgattagaagcagcgtcttgtctgtagttttcagagtgataactacagaaagaaagaagcagaggttaaatgataaacatgttctttgtttttttatcaaattaggtgtcacaattgggtgggggtgagattatggttcttttttgacaacggtgccttgaggttcctaagtgactgggcttcctgtccccattgctccccgctgcttctggtaaatgggttttaatgaactaagcagctggctgcgactccctggagttagactggaggtctccaccctgacccagcaggaagccatgcccccacctgaccaccgtgaccacggtgggagaaggaaggggttcttgggagcatccacgtggcttatctctttgatgatgccaaattctctgacaaatttaacgatagtgttgggtggaaattgggggctcctgatcggaaggggaagcctctctcgtgtttgcttggctaaggggttatcagatgtgcacctgagacacgctgcttctgggttccttgtaatcatcactttatgaatttgtggattgctgttctaggcaagctgtatgggagaggttcgactgatgataagggcccggtggccggctggataaacgccctggaagcgtatcagaaaacaggccaggtatgccccccacgctgacttctgcctgagtcctgggttccatctgagccatacaaagacaggctctctgttcacacaacagcttataaagctcacaggaaaagataagacaagcg

SEQ ID NO: 20056 - DNA, 2300 bp, Homo sapien
tctctcgtgtttgcttggctaaggggttatcagatgtgcacctgagacacgctgcttctgggttccttgtaatcatcactttatgaatttgtggattgctgttctaggcaagctgtatgggagaggttcgactgatgataagggcccggtggccggctggataaacgccctggaagcgtatcagaaaacaggccaggtatgccccccacgctgacttctgcctgagtcctgggttccatctgagccatacaaagacaggctctctgttcacacaacagcttataaagctcacaggaaaagataagacaagcgtcccccagcccttatcagcacagatgactcggatgtaagagtataggtttgttttccagctttaggaaacattcaaagtgtaattgttttacagctgcttaaaggtcacaatattggcgactcagcgtgatttttgccaccgcatgaaatgtgacttttcagtccctgcctgtctctgtgagtgtggtcccttgccagaacatagtgcaggctctgtcacatcacacaggcccctcactgtctctgtgtggtttacgtcctcctaaaaataaattctgatttttaaaatgtattctctggctgggtgcagtggctcacacctgtaattcctttgggaggaattactttgggaggctgaggtgggtggatcacttggggtcaggagttcaagaccagcctggccaacatggtgaaaccccgtctctactcaaactacaaaattaaccgggcatggtggtgggcacctgtaatcccagctcctgggaggctgaggcaagaaaatcgcctgaaccagggaggcagaggttgcagtgagccgagatcatgccactgcactccagcctgggtgacagggcgagactctgtctcaaaaaaaaaaaaaaagcattctcctacctgtgaaatatctgttcgttgttcaaagtttgctaaaaaacggacaagtagagagaaaaatacttgcctagaatccaaagacagttagtattttgaaatctaccaagattttctgttgcttttttcctagttgtgatcatgctgtatagacatctttgcatcttgcttttatcttgtatcatggtgacataagaataagataagcatttttgtcaaagcatggaatgttaggtctgaaaagggtcttagccctgctggtccgggggattactttacatggtggggaggtgacacccagaaccacctggcctggtgcggccgagcctgcatgctgggcgggaactaggaagcctccccaacctctggccccgtggagccctcagcctcagctgcagtggaggcacctcgggctctggggcaaccaagtgtgacaggtggctgtgcacgggcagaggtcctgtggaagatttcatgtgacgggcagaagaggaggaggaggcaggggaggaagcacatccatgaacagggctgtctgggggcagcctgggtggtcgtgaaataggactcagtagccttgagtcctcatttaggccctgatgttctttagcctgcctggcctttggcaaatcgccagcttcacgcacaacctcatttttcacctttgggtgtgggggtcagagtcgggagagcacctgcaaagccacaatgatccagacacacggcaaggtgggcacattcccatcaggctcctcggggagagcagcgcttctgtgcccgggagcagcgaaggtcacacaggaggacccgcacctcctcgtgtcggtggctccgctggtataatcaggactcacgtggtgttcctcgtgtcgtggcccttattgcagagggagcagcacaggctttcctggaagctcccctcggtcatgtggggtgactccagagagccccaccttgcgagactggaccagtccaagtggcctggagccacagcggcctggcagtacctggggagggggtgatgacaggtgcacacggaggcccatgtggtctgtctggagaatgccggagatgtgaaatatgtaatcctgagtgtggcttctagaaggaaggttcgcaaagctgaatatccactcgtgctgttcccttctcacaggagattcctgtcaacgtccgattctgcctcgaaggcatggaggagtcaggctctgagggcctagacgagctgatttttgcccggaaagacacattctttaaggatgtggactatgtctgcatttctgacaattactggctgggaaagaagaagccctgcatcacctacggcctcaggggcatttgctactttttcatcgaggtacagtgccaagctgtac

SEQ ID NO: 20057 - DNA, 2300 bp, Homo sapien
gccagctctgttttcctcttttctagaaaaaaaattattgtgaggaacactcatatctcacatattttctgcaaggaaagagtaaagtgcatttgacagaggctgagaaagaggaattctctgatctgaattacatgggcttttgaagccctgggctcgcccgtgcgctatgctcttgccagaggtgactttggctgggtaggggcaaggttttccactgatgactgcaggcagcagggcccccaccctcctaggatcacagcccacacctgggcccagcctcaccctctccttcctttccagccctcggaattctgagtatgatcccagcaacttggccttcggaagaagggccaggcccacttcctgggagctgctgtgctgggcctggagctcaaggagcccggcctggcaagtgtcagggaaagggtgtgaggatggggaggaggtgcagagacgcagctggtggagacgctgcccctctgcaagggagaggggcccggccctgatagccacagctagccttaactagcagggataatgagttccaactctgcctttccagagatttctttgttggtaaaaattatttgattatttgtcctttcattcagcaaacagttagagtaagtctccagtgtgccaatccctgcaagagttattcagagagaaatgatgcaaaagaatcccagtcccccagaaaagccccgggacccctcaacccaaggctctggcctgtgccctgctgcctccttttctctactgtcccctgaccttcccaccaaaatttatatgttgacatcctaacccccaagacctcagaatgtgaccttctatggagatagggtcattgcagattgaattacttatctttagataaggtcacatgggcataggatggacccctgattacacacaactgtgtccttatgagaagggacaatctggacacacacacatacacagggagaacatcataagaagatgagggcagagatcgggtgatgcttgtacaagacaagggacaccaaggacggccagcagccacgcgggtcaaggcctggagcacgcccttcccgctcagcctcaggagaaacctgccctgcccataccttcatctcagacttccagtctccagaattgagaccgatttctgttgcttaagccacccagtgtagggtacttttgttagagcagatgttggggctcagaagccaataccccaaaatatggtgctttgttcaagctgaactgaaaaggaacttcaaggcctctcggctcccccacccccaccatctctcccagagttcctgaagtgtccttatctccttcaagtctgacccaccaaagaagaaaggaatgacctctagtcccttccctgagttttcgttaactgaacccatatctcaggaaggaaggctgacaccgaacacgctggacagacttgtcaagaccattgtctgctccggggcccagcagacttgaacgaagaccgtggcgtgctcttcaagcccactgaatcctccctcgtgagcgctgattgccctcagctgaagtcctcttttctcctcccataacctgttgcgcgagaatctaagccgccactccttgtggaacctcaagagggtgtctcagcttcccaaccccattagggattggtccttccttctgaaggctcccatgtcacttaaaactaggagcaaatcaatctgttatgcctcttctccaattcaactgccctttgcaagctgattttgcagcgaaccttcagagagctgggaaaactctaccctcggcccctgcacagccctaggaagctaatcctcggccgtaacattccatcacaagggcccacagccacagtgtgtgggggcctgtcatgtgagggggctgtcacctgagggggctgtgccgctggctcagctctgcctgctggccggggccctactccctctcagagatgacacacaagtgcccccaaagaagaacccgaggagtcgcaggctgggccaggctgctggcttccagtgacatcacatgactttggggccactgcctcatcccgtatctgcgcgtatgagatgcattgtctcttcctctgcagttgagctgaatgaatacctccgaagccgctttgttctccagatgtgaatagctccactataccagcctcgtcttccttccgggggacaacgtgggtcagggcacagagagatatttaatgtcaccctcttggggctttcatgggactccctctgccacattttttggaggttgggaaagttgctagaggcttcaga

SEQ ID NO: 20058 - DNA, 2300 bp, Homo sapien
cacactgtaatcagttctaataagtgggcttgactcaccacagattaacaaatgcaacatgagcacgggattatgtatgagagaataataagttatgtggtaattaaaatgagaaaattagaaaatcagtcattcagttggataagagcttttgggggatagtaatttgttcctatgttatcccttgtgtttctgtgtgtcttaggaagtccatctgaagttctgaaatcttaatatctgaaggttctgtgtgaacattgaactagcaaacaattgctgaggagtagttggaaatcctaagaattttctggcaagtcatgtttaataaaatacaaacccatagcactcagtgtgcaggccgcatgcattagcagctgggtctgccaagcctccccttggcagtttactgctctacctgtgaaatatggatattagtgctcactctgcctcctagaaaataacccagggagggaatgtgtcctaagagctctgtaggcaaggcaggcagagaagaagggagggagggaggaagaaaggaacactctcgaaggacctcgcgcaccatcccccatggagatgtttcttcactgaatccctgcgagcttgtgaggtagaaactatcattcctgcttcacagatgaggcaagtcaggctcagagattaactgacttgtccagggcagtgaatatttcttctgttttctttgtgattatgtaattttcagagttgaaatttaaaaagcaaaacagattttggcctttttatcagaacaatcttataaatattgctatcccttagaaggagagatagaggaagaaagagaaggagagggagagagaaagaaaggagagagggagacagagatagaaaccaaggccacatcgaatgctcagggcgtatgtgatgcgagcttcagggataagaagacacctttgcagtggtcagcaggagcccgctgagacctgtgctgatttcctgaggtgtcttctgtgagactcaggagtgaagtcagagtacttaactcccctcccatctgcttatgtctcaggagaaaataaacttctgagagggaagcccctggcacctgatgaaataaccttcaggaaaagacaccccagaagcccaggtctgctctgcaggacagggtgccagggaggcccctcagccctcagagccttgcagccttggacagggctgaggcggcgtccaggacaggggagatgaaaccagaccccagggctgacctggaggagtgcacacattttcacagaacagattccgaggcccagagaggtcaagttgcttgcccaaggccacacagctagatccaatcctctgctggtgtctaagcacattcatcaggagaggggagaagagtggcttgagataaaaccatccttgtgttgaaacacgagagagttaaaggtgcaaacctgggtccaccaacaatgtcctctggaggccggaaagaggggacccacctcctcaaatatgtacccctgcctctgctccagagcccttatttggacttctaaagagagccactgtgctctcagggaagagatccaaggattcctgcagaatgtcatggagattcctatcttgatcatttgcaaagtagctgatacattttaaaaatgtgtgtgtgtctctactaacaaatcatactttgtgataagaagaaaaagaaggcttaaaaagacaagataagataaaataaggattaaagaaaaaaagaccagtcccatcagatagcagcttggccacaggcttgttgtgtctttggctgtgtcttgttttttaacatggttaacagtgcaggctggaatccatcctcgaagtatcagccttgccaccagcttcactgctctgggtaagttctctgaccttcccaagacttactgtccttatctgcaaaatggataccattgtcgcacacacctccaaagattgttggggcgagtaagtgacctaaggcagtttgctcagaacacagcaaacaactcaaagaaagttgtcgttaccatcctcctcctcctctctcccaaacacagctgccacctacttgctccagggctctgaaggcgctcacagcattgatccaagccaagacagggcctttgttgtcggtcgctcctcgtccataaagtttccctttaaaaaggggagaagaatgttcagagaagtgtggacacctctgccatgtgagttaaaaaccaatgtcgtttcatgggtactgatgttaacagtgctttctataataatattgcaggctcaaatcttgcatgaaattgcaaagt

SEQ ID NO: 20059 - DNA, 2300 bp, Homo sapien
tcttacatggcagcagcaagagtaaatgaggaaaaagcaaaagctgaaacccctgataaacccattagatctcatgagacttattcactatcacgagaatagcatgggaaagacctgcctccatgattcaattacctccccgtgggtccctcccacaacatgtaggaattctgggagctacagttcaagttgagatttggtggggatacagccaaaccatatcattccacccctggcccctccaaatctcatgtcctcacatttcaaaaccagccataatttcccaatagtcccccaaagtcttaactcatttcagcattaacctgaaagtccacagtccaaagtctcatctgagacaaggcaagtcccttccacctatgagcctgtaaaatcaaaagcaagctagttacttcctagatacaatgtcagtacaggtgttgggtaaatatagctgttccaaatgggagaaattggccaaaacaaaggggttacagtgtccatgcaagtctgaaatccaggggtcaaactttaaagctccaaaattatctcctttgaatccaggtctcatgtccaggttacactgatgctagaggtgggttcccatggtctcgggtggctctgcccctgtggctttgcagggtacagcctccctcctggctgctttcatgggctggcattgagtgtctgcggtttttccaggtgcacggttcaagctgtcagtggatctaccattctggggtctggaggacagtggccctcttctcacagctccactagggagtgccccactagggacttcatgtgggggttccaacgccacatttcccttccacactgccctagcagaggctctccatgagggtcccacctctgcagcaaacttttgcctgggcatccaagcatttccatacattttctgaaatctagttagaggttcccacacctcaattcttgacttctgtgcacccgcaggctcaacaccacatggaagctgccagggcttggggcttccaccctctgaagccacagcccgagctgtacattggccccttttagctacagctggggaagctggcacacagggcaccaagtctctaggctgtacacaatacagggaccctgggcctggcccatgaaaccattttctcctcctgggcctccaggcctgtgatgggtggggctgccgtgaaggtctctgacatgacctggagacattttcccagtggtcttggggattaacattaggctccttactacttatgcaaatttctgcagctggcttgaatttctccccagaaaatgggtttttcttttctatcacatagtcaggctgcaaattttctgaactcttaaggtctgtttccctttaaaaactgaatccctttaacagtacccaagtcacctcttgaatgctttgttgctttgacatttcttttaccagataccctaaatcatctctctcaagttcaaagttccacaaatctctggggcaggggcaaaatgccatgagtctctttgctaaaacaaaacaagagtcaccttttctccagttccaaaaaagttccacatctctacctgaggccacctcagcctggattttattgtccatattgctatcagcattttgggcaaagccattcaataagtctctaggaagttccaaactttccacatttttgtgtcttcttctgagcccttcagactgttccagtctctgcctgttacccagttccaaagttgcttccaaatttttgggtatcttttcagcaacaacccactctactggtaccaatttactgtattagtccattttcatgctgttgataaagacatacccaagactgggaagaaaaagaggtttaataggacttacagttccacatggctggggaggcctcagaatcacgacaggaggcaaaaggcacttcttaggtggtggcagcaagagaaaatgcggaagaagcaaacccctgataaacccatcagatctcatgagacttactcactatcacgagaatagcacaggaaagactggcccccatgattcaattacctccccctgggtccctccacaacacgtgggaattctgggagatacaattcaagttgagatttggtggggacacagccaaaccacatcaggcaacttgtgcaatttttttcttctgttgttacttaggatcttcctgtgaatatcaaattcatcattgaggggatggaagaggctggctctgttgccctggaggaacttgtggaaaaagaaaaggaccgattcttctctggtgtggactacattgtaa

SEQ ID NO: 20060 - DNA, 2300 bp, Homo sapien
tttctgaaccagctctgaacaagggtgtagatgcttagattttcctccccttggcaaactgttccctccacttataagtaagtctgcattatttcttttcatggactgaaactcttcttcagttcatccattttgttttattggacattgtgacacatagccatacttaaggacaagagggcagagactcaaaggatacaaaagactgacaggccaccctgactcccttactggtgctcctagaatgccgggccgggtggaggtgtggtattcccaagcagctgaaccacaagttcaacttcagtagacctggcatgactttttgactgaagataaatcaacaaagggatgatcaaaagggaaaggaactaagcgacacaccaggtgaggcccttcacccactttctcaagagcatcttgtttttcacgacagactggcccttccgcagaccagcctgcaccttgtagcatgtgggttctgggtgtgggtgaccaggtatgtccttgctctgccacagaccacctgtacgaccttggtaagttacttgagttctctagtctttggtttctcatttgtaaaggggcacaatcgtctgttcacctagtattgcttttaggatgcaaaaaggtgatgtgtgcagaacgcttgtcacggtggctggaatgcagcatgtccatcagtgagtaatggcctgccctggcctgactccagaaatggtgtcaaatatgtcagcaccacttggcttcatttttcaaggttgctgtggccccgagtggcacagcgacgccgacgagttccccgattgtcctggtgctgtccttgatttcccatggattgctggtgtgtgcaagaggaagttgtatgtttttctcggggagcctgtttgctcaggctcaattcacctacagctcttctaggcatcagagctgcccatagtgggttccctgggaagctaaggaagtttaaactccaggggcctcacttacaggagctccttccacagtcctggaagggacactcatcattttatattcataatttggtgttcttttaaaaaagaggttcacacattacctatgctttagaccctgcaacacctcgctgtgctccacttggcatgtatagctcctttatgcaaatttcacaacatggccaggcatggtcactcacgcctgcaatcccagcactttgggaggccaaggtgggtggatcagttgagctcaggactttgagaccagcctgggcaacatggtgaaaccctgtctgtacaaaaaatacaaaagttagccaggcatgatggtgtaggcctgtagtcccagctatttaaggggctgaggcaggagggtcgcttgagcccggaaggcagaggttgcagtgagctgagataatcgtgccactgtactgcagcctgggcaaaagaacaagaccctgtatcaaaaaaaaaaaaaaaaaaaaagaaagaaagaaagaaagaaaaataatagaaaaagcaaaaaaaaaatgtttaataatgtgccccttttgggcagacaaattgccagaaagcatttactcccttggcctcagtagtccaggccatggtacaatcagcccagatggcccaggtgttgggaggatcttctcaaggtcttcagcatcatttttagttgcacagctttctccttcattctcccaaactgaataatgaaatttacctatatttctaccatctatctagctatccatctatccatctattatctatccatctatctttctattcatccatccaactatccatccatccatctattatctatccatctatcatctttctatgcatctatccatccattatctatctatccatctacctatcatctatccatccatccatccaactatctgtctatccatccattatctatccatctatcatctttctatccatccatccatctatccattcatccatctattatctatccatgtatcatttttctatccatccatccattcattatctatccatctatcatctttctatccattcatccatccatctatccacccattatcatctatccatccatccaactatctatctatgtatctatgtatctatctatctatctatctaatctatctattcttctatggccttctagttttcctgaaatatagctcttggatgatatttcccatgcttgacaattcagacggaatacacccagccattttcccttaaagagtttaaatggtttccagaagaatcagatggtatgcaactcacaattttggggagtggaggttaattttc

SEQ ID NO: 20061 - DNA, 2300 bp, Homo sapien
tcctaaaaaaccaatctcaactacagtcgaaagagtcacaactatcaattagaaacatacagcttaatttattcgcctattcatagatttagaaactaggcttcttctcactatctgggatacaaaccaccttcttaaaggagatgagaaagagaagaatcaaactaggagagtatattttattaagattagcgagttctactctaataaaacaaacctaatcggaatgaatgttggggaaaatgtcccttcaaccaggtgaatacccactagtccttgagacctatctcaaatcacatatcctgcaagaagctttcaccactccccaccatcaatcagccgtaacttccactgtgctcccacatctctattttagtaagcagaaaaaggtattatatatatttatttatgtgtctattcaaccagatctcaaaatcctctagggaagtatattactatttccaacacctagaagggtgtttggcataaagcaagaaccagtgtttttgaagtggagccactttgctctgcttaaaaggtaccaatggaactgtcctattgtttgcaacttttctgtaaatcttaatttattccgaaataaagtttaaaaaaaaatgcaccagtagcaactgtgttgtgagcaattatcacacctgccttacatgtcacgcaagaagaaagctttaccttgtaccagtagcagtaattttgtatatagcaaagtgagtctcagtttgtaaaaagggaataattcctactacacaagattgctgtactaaatgaagcacagtgagtatgccaaatgacatataagctcttcttaataaggttctgatgagtatatgttagggcccctgtctacagtgttctaaatggaccagcacttcaccacaaaacagatacatactacgactaggatgtcaccaggcatagactgcaaagctgtaactcaaatcactattaagactgtaattacttataaaagtattctacatgtgtgtccacggatgtgggatgtcctattccaaaactccccaatgaaataaatggctactcaaaacccagcgcaaccgacagaggtcagcggccactgcaccccgcctccaccagcttaaactccagaaggaggccaagcacccagggcgtgctagctggctggaaagaggtgagcatctactgagaaacccactgctgcccgcagcggtgtcaggcagccgcgggtctccccgcagtggcgcaaagcgagctgaagtcgggaatggctaggacccttcgctgccaccgcggtgctttcggccaccgcacttgtgtgccctccgcccgcccacaccagcgtcgcttaacggaagaaggcgcgagtagcagcggcgcagccagggcacctgggggtgacacgagagtgggcgggcggtccagggagcccctgctggaaaccagacgctaaagcttgcagctgtgcagctaggggagcatctgttttccacttgagagcaacccgggcacgcgagaacggcccgatttcggtgcaggggtgcgtcccgaaggaacgggggactgtttctgcgcggacaggcgaacccggcaggggaaaccgaggccacgctaggtccgcagccccgaggtgtccacaagagctccgctcgcgcaagggcgcggagcgaggctgcccgcgggaccggcctgcggagcgagcgggtgagagggcagggcggcagctggggcctgggggaggagggcggcgaggcagcgtgagcgaacgagcgagggtgtgtgtccgggcgtgagtctgggcgggtgtcgggaaggaaggcgacagggaggggcggaggcggggggaggggggaggagaaagagcgaagggcccagacggggctctgggcgcccagccgcccggcttcgagccctcaagccaccgcccccaggccccgcgctgacgctggacggtccccgcctccaaaccccccgccccggccagagaataacttacctgtttggcgacggaatcgctcctgctcgcccctctgactgactcctccggctcaccgtcttccctttgggaggaagaggcgggacatcctgtttctccgtcgaaggacttccggtggcttccaaggcgactccgtagtggatgcagcgccggacgccacagccgaaaaacagaatcttggaactggtttagtacaatccaggtcgagttccttgttttttatccgagtggccggcaggcccatgtgctgtcttgtttttaacacatcagctcttgccggaagccgctaagagataaaataggaagtcccacc

SEQ ID NO: 20062 - DNA, 2300 bp, Homo sapien
agctaccgtgcctggccgatacttcattcttttttatgactgaatactatttcattgtgtggataccgcattttcttgattcattcatccattgacaaacatttgggttgtttccaccttttggctgttatgaataagtactgcagtcagcatttgcatacaagtttttgggtggatatatgtttttgcttctcttggttgtgtatacctccaagtagaattactgtgctatatgctagcaccatgtttaattgtttaaagaactggtagactgttttccaaagtggctgcaccattttacattccccttagtagtgttatgagggttccagtttttccacattcttgccaacgcttgttatctgattttttgagtatagctatcttagtgggtttgaaatggtatctccttgtgggtttgatttgcatttctttagtgactactgatgtagagtatcttttcatatgtgtattatgtatattttctatgaagaaatgtatttcatattctgtgctcattttaaattgatttatcttactattgagaataaaagttttaaaaatatattttagatgcaagtcccttatcagatatctgatttgcaaaaatgtgttcccattctgtgggctctgttttcactttcttgatagtggcttttgaagcatagtgtcttttgaagtttttaattttgatgaagtccaatttacttgtttttttctcgtattgttcgcgcttccagtgtcctgcattataagcatatttttgttgcctgattttagctgagtcaaagcaataggctccatttgatttgtcaacgttatggaaaaaatagctaaaatagtttaaaatagttgtcattagccttgagactataatacgttgatgcctttttattaacgtggaatcaagtggcatttggctgaacattcccatcatggtgtaaagtaaatggaaaatgatatgttttaattgaattaaatagcataatgaaaaataaaatcaatattattgatttcaaggcattttattcaataaaattcttttttttctcaaaatttactccattaattctactctaccactgacatttccctttgccattaaccttcagacaatataaaatgacaattagatgaggaaattaatgattgacagctggactagaagtggcttttcattggtaaaagagcttgagcacgaatggtgatatgtaatgagattatacgtgttgttcattggaatatatttagaaaaatcatggtaaagctctttgctttaggagaaaaggatgaaacagtggtgtctttttttttttttttttttttgagacggagtctcgctctgtcgcccaggctggggtgcagtggtgcaatctcggctcactgcaagctccgcctcccgggttcacgccattctcctgcctcagcctaccgagtagctgggactacaggcgcctgccaccatacctggctaatttttttgtatttttagtagcgacagggtttcactgtgttagccaggatggtctcgatctcctgacctcgtgatccgcctgcctcggcctcccaaaatcctggcactacaggtgtgagccaccacgcctggccgaaacagttgttttaaaattatgtttcttttacataggacttgggcttctgttagaggttaaggaggggaaggcctcacttctagacttgcatcacagcagttttgttttaatatattttacagagtaggagctcattgaaatgttttttgaaaggagagcttctctttttgttttttttttaaaagggtagtaaattgaagtatgctggtacagagaattgaaatatgggagtttttctgcaagcttgttgagaaatcactttttctaccaaagataccatagtatttcttctggagtcaacaatagggtgacatggtgttcctaaaatcctacttcatactttttgataaaagactttagacatgtaatcaaattcatctcagtataaagggtgtttcattggggctaacttcatgatactttttcatctagttttagactaatacgtgtgtctttatattcaagatttaataccatgtttgtttacttcacaggttatgagtgccagtgagccgccttagatagaagcatcgtcagcactttattaatgatggatagtgagaataaacccgaaaatgatgaggatgaaaagataaacaaagaagcacaagacttgacaaagctttcatcccataatgaagacggtgggcctgtatctgatgtgatagcaagtttccctgagaattctat

SEQ ID NO: 20063 - DNA, 2300 bp, Homo sapien
caaacgcaggaaattagatgaggcagagccccttaaatctggaaagcaaggtatttgtagattagaaacttctgagagctcagtcacagaagggggtattgcattagatgaaacagggaaggagacctttctgagtgactgcacagttggaggcacatgtctcccaaatgccctctccccttcttgcaattttagcactattgatgttgtttctctgaaaacagacactgaaaaaacatctgctcaggaaatggtttcccttgatctggaaagagaatctcctttccccccgaaagaaattagtgttagttgtaccattgggaatgtagatacagttctcaaatgcagcatctgtgggcatttgttttcttcttgctctgacttggaaaaacatgctgagtctcacatgcagcagcctaaggaacatacctgttgtcactgcagccacaaagcagagagcagctcagcactacatatgcatatcaaacaagcacatgggccacagaaggtcttttcctgtgatctttgtggttttcagtgttcagaagaaaacttgttgaatgcacattatcttggcaaaacacatctccgtcgtcagaatctggctgctcgtggaggatttgtacagatcttaacaaaacaaccttttcctaaaaaatcacgtacaatggcaacaaaaaatgttcactcaaaaccaagaacttctaaatcaatagcaaagaatagtgattcaaaaggattacgaaatgtgggaagcacgtttaaagatttcagaggaagtatttctaaacaaagtggtagtagcagtgagcttcttgttgaaatgatgccttccagaaatactttgtcacaggaagtagagattgttgaagaacatgttacttcccttggtctagctcagaatcctgaaaaccagagtagaaagctagacaccttagtaacctcagagggtctcttagagaaattggaatctacaaaaaatacccttcaggcagcacacggtaacagtgtaacctcgaggccaagacctgagcgaaatattctcgtgttgggtaatagctttcgtcgacgaagcagcactttcaccttgaagggccaggcaaagaaaaggtttaatcttttaggaattaaaagaggtacaagtgaaactcagaggatgtatatgaaacacttgagaacacagatgaaaacacacgatgcagaatcagtgctgaaacacctggaagcgtgcagcagtgtgcagagagtgtgtgtgactacctcagaaacccaggaggcagagcagggccaggggagtgcccgtcctccggactccgggctgcattccctgacagtgaagccagcttctggctctcagacgttgtgtgcttgtacagactgtgggcaagtagctacaaataggacagatttggaaatccatgtgaaaaggtgccatgccagagagatgaaattttactgccgtacttgtgacttctctagtatgtcaagaagggacttagatgaacatttgcacagtaaccagcatcagcaaactgcttctgtcctgagttgtcagtgttgttcatttatatccttggatgaaataaatcttagagaccacatgaaggaaaagcacaatatgcattttctttgcaccccttgtaatctgttctttttgtctgaaaaagatgtggaagaacacaaagccaccgagaagcatattaattcattggttcaaccaaagactttgcaatcatctaacagtgatttggttttacagactttacctttgagtactttagaatcagaaaacgcaaaagagtctatggatgactcaggaaaagcatctcaggaagaacctctgaagtccagggtaagccatggtaatgaagtgaggcattccagtaagcctcagtttcagtgtaagaagtgtttttataaaacaagatcttctactgttctcacgagacatataaagcttcggcatggtcaagactatcattttctttgtaaagcttgtaatctttattcattgagcaaagaaggaatggagaaacacattaaaagaagcaagcatcttgaaaatgctaagaaaaataatattggcttaagctttgaagaatgtattgaaagggtatgtataggtgcaaatgataaaaaagaagagtttgatgtttccggaaatggaaggattgaaggccatataggtgtgcaattacaagagcattcctatcttgagaagggcatgctggcgtctgaggaactgtcacagtctggtggtagcaccaaagatgatgaattagcttcaaccactactccaa

SEQ ID NO: 20064 - DNA, 2300 bp, Homo sapien
gggtaatagctttcgtcgacgaagcagcactttcaccttgaagggccaggcaaagaaaaggtttaatcttttaggaattaaaagaggtacaagtgaaactcagaggatgtatatgaaacacttgagaacacagatgaaaacacacgatgcagaatcagtgctgaaacacctggaagcgtgcagcagtgtgcagagagtgtgtgtgactacctcagaaacccaggaggcagagcagggccaggggagtgcccgtcctccggactccgggctgcattccctgacagtgaagccagcttctggctctcagacgttgtgtgcttgtacagactgtgggcaagtagctacaaataggacagatttggaaatccatgtgaaaaggtgccatgccagagagatgaaattttactgccgtacttgtgacttctctagtatgtcaagaagggacttagatgaacatttgcacagtaaccagcatcagcaaactgcttctgtcctgagttgtcagtgttgttcatttatatccttggatgaaataaatcttagagaccacatgaaggaaaagcacaatatgcattttctttgcaccccttgtaatctgttctttttgtctgaaaaagatgtggaagaacacaaagccaccgagaagcatattaattcattggttcaaccaaagactttgcaatcatctaacagtgatttggttttacagactttacctttgagtactttagaatcagaaaacgcaaaagagtctatggatgactcaggaaaagcatctcaggaagaacctctgaagtccagggtaagccatggtaatgaagtgaggcattccagtaagcctcagtttcagtgtaagaagtgtttttataaaacaagatcttctactgttctcacgagacatataaagcttcggcatggtcaagactatcattttctttgtaaagcttgtaatctttattcattgagcaaagaaggaatggagaaacacattaaaagaagcaagcatcttgaaaatgctaagaaaaataatattggcttaagctttgaagaatgtattgaaagggtatgtataggtgcaaatgataaaaaagaagagtttgatgtttccggaaatggaaggattgaaggccatataggtgtgcaattacaagagcattcctatcttgagaagggcatgctggcgtctgaggaactgtcacagtctggtggtagcaccaaagatgatgaattagcttcaaccactactccaaagagagggagacctaaaggtaacatctcacggacgtgttcacactgtggccttttggcctctagtattacaaacttgactgttcacattagacgaaaacacagtcaccagtatagttatttatgcaaagtgtgtaagtattacactgtaactaagggagatatggaacgtcattgtgccaccaagaaacataaaggacgggtagaaatagaagcaagtggaaaacacagttcagatatcattgttggccctgaagggggtagccttgaagctggtaaaaagaatgctggctcagcagtgaccatgtcagatgaacatgctaacaaaccagctgagtcacccacctccgttttagagaagccagatcgtggaaactcaattgaagctgaagttgaaaatgtatttcattctctagatggagaagttaacagccatcttcttgataaaaaggagcaaatatcttcagagccagaggacttcgcccagccgggggatgtgtactcccagagagatgttacaggcacaggtgagaataagtgtttgcactgtgagtttagtgctcactcctctgcttctctagagctgcatgtaaaacggaaacatacaaaagagtttgagttttattgcatggcatgcgattactacgcggtgactcgtcgcgagatgaccaggcatgcagcaacagagaagcacaaaatgaaaaggcagtcttatctcaactctgctaatgtagaagctggttctgcagacatgtccaaaaacatcattatgcctgaagaagagcatcaacaaaattctgaggaatttcaaataatttcaggtcaaccatctgatactcttaaatctagaaatgctgcagattgctctattttaaatgagaatactaatttagatatgtctaaagtgctctgcgctgctgactctgtagaagttgagactgaagaagaatctaatttcaatgaagaccattccttttgtgagactttccaacaggctcctgtcaaggataaagttaggaaacctgaggagatgatgtcacttactatgtcct

SEQ ID NO: 20065 - DNA, 2300 bp, Homo sapien
ggggggctggtctggaatggcttaaaggggagtgtgtagggatccttgaaaatgtttgcattggctgtggacacagcagaggattgattcattatgggatgaaatgccagtgctgttgagagtaagagcgtgcacccagcccagctaaaaagaagggcttgagtatgtgttcacgtggagcacacagaacgcatgagtgatttgctagaagttgagatgacaccagactgaaaagatttccaaacaaactttaacgggcaagaagttccacacagggtttttccctttttctccttctgataaagtgtactcttgattgcaaacactagtataaacacacacaaaagtttgtgaataaaattccttttggaaatggtgtgatatggggaggaggcgactgagcgaggaagggcagggggaaggtgaggcgttagagaactataagccacagcctggtgggaccacctgcctttggtggagaggtggagagggctcccgccgggctgcgctgggtctcctgggcctctctacctgcgagtgttaataaactctgtggggttttttttcctcctgtgattcctctcccttcaggcttactgctgccctgggacccctccctttccccttccccaaagggcaagttctcccctggggagagaggcacagccagggtgcctaggcactgcctgccctgggtcaccagggttggtcctggggcgggagacaggtggatccctgaattttgtggtcagaacgcgggagtgcagactcccatgtttggagctccccaatgtgctccactttaaaatccatgcctcttttttccctgcacacacgccaagaatccttttaatataaatagtatctccatatgaacaacctaacccctagtttcttccttgaatccttaagggaaaagaatggggacagttttcttttgagttgggaggggacagaatctttgcctcccgctttccctactctgttggaaaatctgctcccaccaccacgttgtaggaagatcctgtgttcttgcaaacagtgtcagtggatgtgacattttaccgaattttttaagaatagaggcttaataattcactgcaggttagttcattttaatcctagaccaaatctcccctaagcaatgttaattgctttaaattttatgcaagtgcctctcatttttatcatcttaaaatccgctctagaatgaattgagtaagcctaaattcccttgttgggaaagatgtttggtggttttaattgtgctctgattttttttctttcagtgaacaatttgcacatttcattgcatcttagcacaaaatacaaattcttcattcacagggagggatgtgcttgtaagctagacattgatttaggataataaagtttactatttagaaaagatgtaagaaggggcatataaaatccctatagaatgtataattgatggtcctttatccagttcttaccttactgttttatgtatccgagaacaacttcccatctccccctctatgctcagtccttagaaaagaaaaagagagagagagacatccccaggttaaatcagtttatgcactattttcagcttttttcgtaagaaggtgacagattatttcgtttccaaatatttctaacgattttctgctcaagtgtaagataatggagcaaagagtttgtaggaatggctaagggacggtgggggatggggaaggcgtttttgataaacggtttgttgcttacggaaggggaacagtgttttctgctgactctccaggccgagattcccaccccctcccccccgctttttttcttgtctttctttcttgtctttccttctttgtttctttctttctttttcttttctttctttcttttttcttttttttcttaaggcaggtctggtttggacgactttgttttgtctcccagtattgaaggcttttactctggacttgaatcctcgcctttggtttttgttcagaggaaagcgttcctctcccctgcgcaggatcgctctgtttctcagtaaacatgacgagggggtttagcactttttaagtacatataagctggtgactctagaagggtacagatttggagaatgcctgcgccggtcctattcttttttcctggggtttctggattttagtcttttaagtggatcctcccgtcggattactagaatcctgcgctcactgcatgcacacagtttcaattaaagggggggtgggggtacaaggagggtctccaaatgcgcgaatccttcccagtgtgtctttcttgtctttctg

SEQ ID NO: 20066 - DNA, 2300 bp, Homo sapien
tcaacttcccgggatctcgcaaactcaggctgtgcgcccgagcgcgcgccggagtgtgggcacgcgggcgggctggggactgcgggagcggcgcggcgcggcgcgagcccggggcgagaacgggggcgtggggttggggggcgccgggctcaccggttccggacgaggaggtctccgtccccggggagcggcaccgggcagtcccggctcagggtgacggcctcgcggaagttggggctcagccgggtcaccaccagcttctgcatggcttggggaatggcggagccctggaagtccaggaagtggcgggcgtacgacatgtccacgatggcccgggccccggtgggcaccagccgcagcatggcctgcgcctccgcccgctctctgcgccgacgctggccggggtcggcccccgcccgggccgctcggctcggctgtgctctgctcggctagggcgggcgggtccgcccctcctccggccggcgccctccccctggctccccccttccccgcgtcgcccgctcccgctccccccgcctccccggcgccggcgcagcccccgcgaacccgggcgcaccaccccgggtgtcccggcctggggaccgctgccgccccggccgctgctcctttaatctttttgttttggtttgaatctgctcggcgcagactggccaaggatcctctccgccctcccccttcctcctggcgcgggagaggcaccggatatccccaccctccccgagctctaaaagccggatttgactcctctcgggcaagggtggcgggggggacggcgggcaaggggggacgggggactcgcgcgtcccgcggtcgtctgcggccccgagccggcggcagccccgggcgtccccggagctgcgcggcggccggcgcaggcgcctccccttcccgtgcgaagcgttcacttccttgcaaggtggtacgaatcaaccccgagcgcggcccgggcggcggggcacgaccggggaccccgggcagggcggggagcccctgccgccgctgccgcacgcgcacccgtaccgaccgcggggcggggaaatgtccagtgcctcccgctccccaggctggtggcttcctgtccccggaaccccttgcgcgtgctttctgtccacggtctgtcccatgcaagttgcaggaactaagccattttatttattttggcctagatttcatgtttttccatgaatgttttaagtagatctacaagactgttacaggtttcccattgggagagaacacacatatagaaaaccagaaggccaaattcccagagcacagacacattttaaagttctacgtggggatgccgagggacttaactgaattggagacgttgcactgctgtgtgaggacctcattttcgaacccagctagaaagatctgtcgttccatcgtgtccgttttctccctactggcgtgcatggaccaaatgtcaattcactttttatagaggggccaaattaaatatttccacacttttctgtgatgaactaagtccatctttacatttttatttaaattgtaaaatttaattttaaaaatatcttgcttttcagttacccacgaattaccaaaatataaaagctactctgggctcctccccagccaaatctaaccccccaacctgagattgcaaaagcgacacagatatttttccccccaaatgtaggacatgcttcacccaagggtagtttggatgcacgtggttgcgtgtgtatgaatgtgcaagtgtgtgtatgtgtatgtgtgtgtgttgggggggaactaacaggtttaaaaatctgcaggaactaatgtctacttaacttagagcatatgggttttacccggtatcagccagtgggttacaataacaacactgaatgaattcctccaatgtacaatcttttatgttatgctgtattaagatttcttttttttgtcatattgtttagctccgaaaaaaagaaaacaaagcaattaaaaagattgacaggtatggtttgtgagagacctatttgtaattgtcagggtgacgttggcgagaggaggaggagtaaaaactgaagcaggaaaagcagctcgatgtgtctgtctatcagttgagactgtctgaaagctctgcgatccgaatgtgtgttatatttcactgaaaagaggagagagcgagagtgcatctccctctctcccaggagtttgagggggggggggacagtccacgctcatctcgcccacccagtgaatgtctgctcttcaccccctttgcacacactctccgggttgttgttgccttttttttt

SEQ ID NO: 20067 - DNA, 2300 bp, Homo sapien
tccgcgagccgagagtcgccgagcgcaactttctctccccctctctcctcgctgtttgggggtcgcggcgagtgtttttagtgcgcgggtcgcagctttctcattgtgcgccagcgaggccgatgcaggctgtccttttcctccccgcacttagtctaagaggaagaaagcaaacaagacagaggagtgaagcccccgtacatacatgcgccggggggagatgtcaggcgctgctccaccttccaaacagtcacagatcaaacagtgtcaccccgccggagcgccacttggtgccccgcgcttccacccggggggcttggccgccaggatcgccgcttcttccaatgcgaaatctaatgcaaacacattttgatcatggatttttggccggtcttgatcttccaacagaaaaaaatttgaaaaatacacaaaaagcacccccccctccaagaaaaaaaaaaggcaacaacaacccggagagtgtgtgcaaagggggtgaagagcagacattcactgggtgggcgagatgagcgtggactgtccccccccccctcaaactcctgggagagagggagatgcactctcgctctctcctcttttcagtgaaatataacacacattcggatcgcagagctttcagacagtctcaactgatagacagacacatcgagctgcttttcctgcttcagtttttactcctcctcctctcgccaacgtcaccctgacaattacaaataggtctctcacaaaccatacctgtcaatctttttaattgctttgttttctttttttcggagctaaacaatatgacaaaaaaaagaaatcttaatacagcataacataaaagattgtacattggaggaattcattcagtgttgttattgtaacccactggctgataccgggtaaaacccatatgctctaagttaagtagacattagttcctgcagatttttaaacctgttagttcccccccaacacacacacatacacatacacacacttgcacattcatacacacgcaaccacgtgcatccaaactacccttgggtgaagcatgtcctacatttggggggaaaaatatctgtgtcgcttttgcaatctcaggttggggggttagatttggctggggaggagcccagagtagcttttatattttggtaattcgtgggtaactgaaaagcaagatatttttaaaattaaattttacaatttaaataaaaatgtaaagatggacttagttcatcacagaaaagtgtggaaatatttaatttggcccctctataaaaagtgaattgacatttggtccatgcacgccagtagggagaaaacggacacgatggaacgacagatctttctagctgggttcgaaaatgaggtcctcacacagcagtgcaacgtctccaattcagttaagtccctcggcatccccacgtagaactttaaaatgtgtctgtgctctgggaatttggccttctggttttctatatgtgtgttctctcccaatgggaaacctgtaacagtcttgtagatctacttaaaacattcatggaaaaacatgaaatctaggccaaaataaataaaatggcttagttcctgcaacttgcatgggacagaccgtggacagaaagcacgcgcaaggggttccggggacaggaagccaccagcctggggagcgggaggcactggacatttccccgccccgcggtcggtacgggtgcgcgtgcggcagcggcggcaggggctccccgccctgcccggggtccccggtcgtgccccgccgcccgggccgcgctcggggttgattcgtaccaccttgcaaggaagtgaacgcttcgcacgggaaggggaggcgcctgcgccggccgccgcgcagctccggggacgcccggggctgccgccggctcggggccgcagacgaccgcgggacgcgcgagtcccccgtccccccttgcccgccgtcccccccgccacccttgcccgagaggagtcaaatccggcttttagagctcggggagggtggggatatccggtgcctctcccgcgccaggaggaagggggagggcggagaggatccttggccagtctgcgccgagcagattcaaaccaaaacaaaaagattaaaggagcagcggccggggcggcagcggtccccaggccgggacacccggggtggtgcgcccgggttcgcgggggctgcgccggcgccggggaggcggggggagcgggagcgggcgacgcggggaaggggggagccagggggagggcgccggccggaggaggggcggacccgcccgccc

SEQ ID NO: 20068 - DNA, 2300 bp, Homo sapien
ggtttaatctactacagggtttaagttttcaaaaagaattttcagcagatgcactagatatggtcaaatatttcagtgttgttcctaattatttgaagttaaccacctaacatccacagactatagattaccctcacccaggtcttcagccccagttgattcagagggctgtttagaattaacacccagttttccttccttaatccacagacaaccacacttaaaggacagctaagaagccgcaatcccttcccagcaaatagtgcttattatcttacagagcaggttcacatcttgtcacttcactttgacctcctggttatcctgcctattttgtaggaaaggaaactgaggcctacaaaggttgggtcaattgtcctaggtcatgtggagggcaatcggttcagccaggatttaaaccgcctttgctctgtttctggtcctcataggttctctaccagaactacagaaggacaggaagagctagaaaaaccattccagagctcaactataactgggcataaactctgagctcattagaaaactagaaaactatatccttttgctcttgttcacaacttttaagttgaacttatccataaagaggaattaccatgtttacagattgtagtggcctgatttgcatatgcttatcatgaaaataaacatgattatggttgttttttcccctaagtctagttggcagagagcaacttcgtccctccttggcacctgtctcaactgtcatagaccaagctgtccctcctagatgaggtctctttccaccccctacaccccactgtcttttagcagctggaagtttaaggcctgtgggaaattgaagattaatttttagtcagtgttttttttttctcttttctttaaatcaccaactctgagaattctagatgttactctgcatatgtgtgctccacaactatcaactttcacaatttgggatctgctacaaaacgggcttccgagctcccttcctgtccctccacacaggtctcaagcctcctctgtctctgctccctctgcacgtttctgcctttcccttgtccatggccttggtgggacccaccattttttgctcttctttctagagaatgagtcttgtctccaactagatgggaaaaaccactcaggacaagaccatcagaacagcactgggctactgatttgtatgctgtgcatatggtcactgttcacataataacaggtattttcttagtcatactgtgcgtcaagcacagtgcatactgtcctgggcatttttactcaacaccaacactgtggagcacccatcatgagcttctgtaggctgggactcacaactatgtgcatctctcttcatcaggcaccttgtcaaaagccatccacactatggggataacgctgcaagtatttggtgaacgtgtgtgtgttaagtaccacttaattttccgctcattgggcaccatttacaaacagtggaagatctgtgaaaattcccatgaggcagcacagcagcatccagaggccaccacacacgtctcatggctactctccaccctgcgatgatggtctgcacagcgcttcttcctggggtagctcccaagtaacctccattcagctttcctcctgctgttccatggtgcttgtcttccagcagaatctctctcactttaacaattaaatggacaacccaggaaacctacacttggaattcagcgaaagaaatgttagtctcctgtggagtgtctcattaggttaaaagaaagttactgaaaagtctgatgggaaaatgaatttctacattttgcttagggcccaaaaagaatcccagattttatttccattgaagtgcatatagtagtatttattttgattcagggagatgcggttcatttttaatattcacaaaagcttcttgacatcagatccaaagcttgtgctgtggagatatggttgaacattctcacacagcatcactgagccagagagcaacctgagaaacctcagaactccatgtgcgggaagattccatccgacttcataaaataatacctggacctgagaactctacatgtgggaagattccatccagcttcataaaataatacccagatcttcaaggttggcaaagaagagaaaagctccttgggaacttagttaccaggtcttatagcaccagctctgtgtcctcagagtcgctgtcatcaaggagacctctcactggtcaccgccgcagcccccacatggaccagtatgtgtccacagctcctccccgattccctatagcacagctgggaacattt

SEQ ID NO: 20069 - DNA, 2300 bp, Homo sapien
tttctttgttgtcctgaaattgcagctgagatgcaaggctaaagccaaggtgcccattatcctcaaattctaaaaagctatcaacaagccccatttacatctccacagaattatgaagaagtgggagaaggagtcctattcccaccaggccccacctctaaagccaaggtgcccattatcctcaaattctaaaaagctatcaacaagccccatttacatctccacagaattatgaagatgtaggagaaggagtcctattcccaccaggccccacctccccaggcccagtggaagaactgggagaacagtttacaaagcagtcttggggctgcagcactttcagtgagaggcagccacatcctcacagtggaaaagggaagtgtttttctttatccccagaaattcataagagggttaagagaatacttcattgaacttgagggttcctgaaaggtgaggagacagattgtcactcactggacagacacctagtgagctgcagaacaagcaggtccaccttgtgctgtcactgggaacaactgaaagtggaagttcttgggacgcatattcaggcagtcacagaagaagatctaggccttcttcaaccagcttccacaacccagctctcaacacctcgatttgggtttgtttgatgttctcaccatggttgcactgcagacatgccttttggagaggaagtccacatcatttcaagggacgcatattcaggcagtcacagaagaagatctaggccttctccaatcagcttctatgacccagctcccaacacctcgatttgggtttgtttgatgttcttaccatggttgcactgcagacatgccttttggagagaaagaccacatcatttcaaggctacatactgtcaacatcatttatcactgttgatattgacttatgatgacttggttgaggttttagggctcttcgtattatttatttcttattgatggtgtttgggtagtttttgattttcaaggagttggtccatttcttttaaattgtgagtttataagcatttgacatcatatttccttattttttggaaggatctgctttttgtttcattgattttaaagtttattaaattccactttgatctttatcttttctctccttcttgttgctttgagtttattttgctcttatttgtctagtttcttcagggagagatgaagatgattgatttgagatcttttctcatgtccaacatatgcacttaggctatgtgctatggtttcacacagtccatgttaatatatgatggctagctaaatatatagagtagcctttctttcttgatcaaatacctatagaaaatacagaagatgtatgtgtgtatatatgcacacatacacacacacacataattgcactatatatgtggagtcttcagaagatcagagaccacaaagagtctttgaagataaataacagtggggtttcccattgatgaaatcatatataaccccttaaaatgtaggactcatatataaggtggaagaggtcccaagggtgttctatacttgagagaagcaggaggagaccaggacgactaataaagggactatttataaggaaacaaccattcagtttggcctgttcacatccctcttcccttccttcaggtgaaagcagtgaatgttggttcttggtttgttgaaaagggtactgcctagacacaggaagtccccagatctgagagtcggctatgcagcagccatttcagatccgagagtcagccatgcagcagccatttcagatccgagagtcggccatgcactagccatttcggatctgagagagtcgggcatgcagcagccattttggatctgagagagtcggccatgcagcagccattttggatctgagagagtccgccatgcagcagccattttggatctgagagagtcggccatgcagcagccattttggatctgagagtcagccatgcagctgccattttggatctgagagagtcggccatgcagcagccatttcggatccgagagtcggccatgcagcagccattttggatctgagagagtcggccatgcagcagccattttggatctgagagtcagccatgcagctgccattttggatctgagagagttggccatgcagcagcgtttcggatccgagagctggccatgcagcagccattaaggatccaagagtcggtcatgtagcagccatttcggatctgagagagtcggccatgcagcagccgtttgggatctgagagtcggccatgcagcagccgtttgggatctgagaga

SEQ ID NO: 20070 - DNA, 2300 bp, Homo sapien
gactttatgcttaggtcaatggtttagccaactgcatcttgtccattcacagtttttccactgcctatagaattcagttgaaaatcattctttggttgtttttgtagccatctgttgtttctgagtgcccaggtaccttcctcccatcttctcataagagaacccctttttagggggataattcccttctcttcatgaggtcctgatgaggctgccaatccaagtacctagatgccctggccacaggtgggagagtgagtctgttacatgagtctgtcatgtggggtgatgtggggtccatccccaagaacatcatcattatctcaggatggacacagcatctgttaggtctatcagagtcctcatctgggaaaacaggagacagaagcgctgcgtttactctgggatgacacaagtccagagtggtataaacccccctcactttcttcctctccatcgagcaagccattgactattggaggaaatactgactgctccagtggaagaaagaagaggatgatagatggaaagaggaaggagggagacagaaaagacagggcgggagagggagtgagagggggaagaaagtagaaacaaagggaaggaaagtggataactggaggaaactaacattggtccaatcctcggagctcctgaggccacttccactgctaactttgaaggatccaggtcaatagatgtcccctttagcttaagctgccttttgtactctgtgtcttctccatgtccaggggcacctaactagattcattcaccagtctctttgcagttcagggtagcctgtgactggatctggtgattacgatgttgacacaagtcgggcctggctttgtcctctcccatctcccccatggtcccatctcccctatggtatccccctggcccttttctctttctgagcagctggaatgaaacaccttgaggaaggccttggaagccaagtgtgcaagagacagcaagttctctgaatgactacagccaagaggaaggccccactgactgttcagctgacactgtctcagctatctcaaagtttggccattttttaatagcagtaagtagttctgtgactaatatattgggtttctgtcacgtgaaacaaatcctaagaacatagggattgttaagaacattttgacaccaagaatggcataagaatggtatacatgcattgacaaaaatgatttgggaagacattactcactactcagaaagcagctcctccacagagcagaaggcttgctccactgggtagggcaggtgcaacaaaagaagccagcatgtctgatatcctcacctctgcctgacaccacatcccagcccatccacaggtgaagaaaaaaaggtgaatctggtccttctctctttaagttgcccaactttgctgctggagaaactccactcactggggtaccgtacttagtttagactgtcattttctaagtggccagggtaacctgacagtgttcccataaggttcaaattttatttaatttctaaaataaaatatgttccatctaggtgagcaggaagtcaagtctgtcctcaggagcttcctcatggaaaatctccaagggactcaatgtgatgcactctgacccatgagccacgtgctccctgcctgccaggagggcaggagcccagattctctctgcctccacctccatagcccagacctccagacagccccgccctgggcttcgtccatccatccccactggctgccccagcagacacctatagctgcaggggaacttgagaatgagggcatctggaagaaagtctgccccacctcaacaatgtccacagcttgcatcagctggtctgagtattctgcagtttttaaataacaagatgcctgataaaacagatcctggccacatactcactgggcaaaccaagcattctacacacttgctacttcagtggcgaccaaaaaggaggtggtggtggtggctgctgctgtacaagggaggactacattggctgctgtcaacacattgattgactgccatcaagaatgagcaggggcaggtgccagttaagattaaaatgtcgaggaggaggagccaagatgtccgaataggaacagctccggtctacagctcccagcgtgagcgacgcagaagacgggtgatttctgcatttccatctgaggtaccgggttcatctcactagggagtgccagacagtgggcgcaggccagtgtgtgtgcgcaccgtgcgcgagccgaagcagggcgaggcattgcctcacctgggaagcgcaaggggtcaggg

SEQ ID NO: 20071 - DNA, 2300 bp, Homo sapien
aactgtgagtcaattaaacctctttccttcacaaattacccagtcttgggtatttctttatagcagtgtgaaaatggactaatgcagagtgcatgaacaagcacaagctgatgctcaaagctgctgctggaagtgacatttccactcacgtgtcatcggccacagcaaaacacatggccacaccccagcataatagcacagggaaggatcatctcccttcacgaagaaagaggcctcaaatactgtgaacagctatacaccatctgcagtgcacacctgtctccagaggctttaatgctacaccagccactcactgcctccaccaccctcttctctcatagcggggtcagatttcacacaaatataagatgtgcttgtctgatggatattttaaggcactgatggagttctttgcctgtcacccagagattactgagtcacgcagggattggagtggaaatagagcaggggtgagaacaaagttataaattctactaggtgacttcaaagaaagccctgtgtgttagtcgtggttctccagaaaaactgaactgatagtagtgtgtgtgtgtgtgtgtgtgtgtgtgtgtgtgtgtgtgtataggataatacattgatcctaacaaggatcaatataggatcctattattgatcctaaataaggaattgctttatgcaattatggagactattgaattccacatctgaagagtgggccagtgggcagagacccaggagtgcgacggtgcaggtggacccagccatctgctggggagtcccccttgctcggagaggccagtctttttgttccatttagaccttcagctgattagatgaggcccaccaccctttgaagggcaatctgcttgacccacagttcactgatttgaaggttaatctcatctaaaggcatgctctaaattgatacaggaaatgaaccactacatcctggtacaggcaggaaatctctgttgctgggccgagtggcccaaactgttccagtcagcctgaccaccaggagatatggaaataaagcctctctgctttggggaggaggagctaaaaagggagacttttccctccccaatttttctcctttaaagaactggagggggacactcacttggatcgcctcaccaaaaagtgaaagaggggacttcaaagagtctatggtgaagcctaggggcacatgtaagacgggagactcacattccacctccctgcggggaccacgtttggccacaaagctcaccactggcattcccgcagggcacaggaagagagggtgtgcgggtgcttcgccgtggacggtgcagtccaccctcgtgatcctcatttctaagatagagaaggagaatcccagggcagaggctgcagaggccagatccaagctcaccagagatgcgccacgaggaaaagaaggccgcctgctcagaagatgggtgcaaggccatcccagcagggacacagaggctctagcagagccgcggggcagaccacctgtgacgacggagtggcttacggttgcatcccttgtaagctgattcttgaggactttcctctcctgtgtgagccatcagtcatgatctggaaaagtgaaggtgacctaagaaagatgagcttctcaccatggctgtgtgctctggggaaacctctctccgctctgcttgtgttagtttcacagggccgccatagcaaagtatcacaaattgggtggcttaaaacaaaagaaggtggttctctcacagtcttggaggccagaaaatgagatcaaggattcggcagggcccggctccctcgaaggctggaggagagaagctgccccctgcctttctctgaacatccagtgtcgccagcagtctttgctgctccttggctttcaggatgtaactccaatccctgcctccatctccacatggctgtctccttcctgtgtgtgtctgtacccaaatgttcctcttctactgaggacatgggctacattgtgttagagtccactcgaacgaccgaccgcatcttcgctttattacatctacaaagactctatttccaaataaggtcacatgcacaggtacaggggttaggacatcaacttctctcttggaagaacagaattcaactgatacaacactggaggggtgaaaacaagacagagagagagagagagagagagagagagatgaggggcccgcacatgccctgctcatctcaaaacttctcgagaagcaaatctaacttgcaggaactttgagaaaggcaggagaagcaaaaaagcaaaatgagattgttttcataactta

SEQ ID NO: 20072 - DNA, 2300 bp, Homo sapien
acttatttattaacacttttattttttaagttggttttaggaatgagatcgtcttgcttgcctctcattttaaaaagtaaaaagccatttttgaaaaaaggaagctacttgagcacctggggttgcactgcactcaacacaataacgttaatttaaattatgcttggtgttactcaaagggacaaattatcatcattatgctaatggtcatgctaaagacatgaaaagctttgaaatgattaatctaaatctggggggaatatgattatcaatgtgaatgatggtattttctcaaactggcataaaaatgttctgtctgtgtcactgataatgtcaatataaatgatgcatcaccaaaggcaacgtgcactcacacgctcttcgctcacgttctcgaagcaaagccccagcccacctttcagtccacatatgccttgctttggggacacacgtgtggatgaatagaaatttgtttacttctttcgtaaaacagagaaaacaggatgattaaagccaacaagactgagacaacgagagagaggtgtctggagacacatttgctttggtgtcgactcgacagccatacagaatgttaaaaatggaggtggaatcttctgtggggttccatactaataaattcctgcaacatggcataagagccaccctgtgaattcaacacaggtctacccaaaaacccaaaccagcatgtgtaaacaaaacacagcctaagtgaaaacatctcagttctgcctgtagataattccagggccgcaccacagaagctcaggggaactattaaataggattgtccatttgttcattaactcatttctttaaaaaaaaaaaaaaaagatggggacaaaagctgagtctttttgacaaaaataataataataataaacatacttttttgctctaggttaaaatcaccagaataatcaggaactaaacagtgaatcttctctttctgacctgcccaactcttagccttatttgtgacccccagaagtcttaactacttatattcaagtctgtgttttcctgaattaacagtcactcagcattgaatggcaaactatttctcacaaaaattgtatcggtggaaaaaaagtgaaacttgttcactacacccttaagtatcaactgagaaagaatctgctaaagccacaaacgaccattctgtacaactttcaatgcatcatttactgtactaaatttcaaagaacattctcgaatgctaaaataaatcaatgcccaaacacagtgtcttgtcagctcatgcaatataggttaaatagtaccatatggcaaagacagacacatgttgcccttttctgaaacaaaaaaattcctaaacaaatgtcctttactttcacatgggaagagtgggggattagagagttcttcaagtgttaatagcgctgaaaaatttttaattcttagccattaacaagaaattatagttttaatagagaaccttgattttttaagcctgtctttaactgtgtcctgaaaactaacaccacatcttcctctacgcacaccatctcctaaaaaagcaagaaaataacaggacagctgtatcctggaggctgagccagcaccagcaactccccagggcggtgagagacgttgtctacctggttttgaaggaaaaaaaaaaaaaaacaccagattccctctgccttgaagataacaaaacacactaagatttcatcccattttcaccactcagttgaggaactgtctggatttcacaattacatacgatatacatctcttctcggcccagtaaattctgagattctatagactttacttacttcctgaccaaggttcggggggaaggtacagaaacaggaatacgaagtaaatctaccagaattaacacagagttaaaatacagtatatggtaagatgtatctaaacctactatagttgtcttttaaataatttttcctactctcctgcttgtgttttagtcatcacttaacatatatttacatgtttgctttctaaaaatagttgcatttctaattactcctgctttgtaattttcagtaccatttgaattaaagattaaatgccagatcttttttggaaatgacttttaaggcatgttgagagccacaaattacactgctttacaattcgaatgtataccatcggaaaacatctcaggctagacataaatacgatgatggctctagctttggaaagagaagcttcagctgttcaagtcacgtgtggccagatgcagagcataaggaatgcaaaacagacagttgcaactgctggtt

SEQ ID NO: 20073 - DNA, 2300 bp, Homo sapien
acgtttcttcacaggtcagattgtaacaaacactcgttcctaatttatgaactcgccgttttgattttattatttaagcatgcgccagcaatcgtgtttccttaagaaagaactgacctatttttggctggagataaacgatcatgttaacagatgttaatcttgtaatctgtttttcctgtaagcactttacctagccgggtttcagaccttaaaaataacatcttttccaaaaagacctgacgtcacaattcactccctgaaaaatcacactccccctccagtttcttcccctgcaatgatttcaaagacattaaatcttttccactttataaatgctgatctgttctgcctctactcccacaggctcttatttgcatttcaaattccacaggttacaccagtcgccttttcaaaaaatgtaaaccaacaatgcagcagcaaatggctttttgtgcatctggattaaataaagcacagaatgaatatatttaaaaagagggctgcgcaagttgatctttgcacacccggagacccggtgactctttatcagcggaatgagtaagacacacacacagcccccagagctcccggtctgctgcgggaagcttattaacgctgataatagatgaggctgacttacagacccacatttttcgggtaaaaggctggttccctctggtccctaattgcgggggtccactggctttcctcaccacacacataaactgctgcttttaaataccccactcggctgccatttaacaaacttattcatacaaagtttcgttaaaacttgaggcggtttaatctaaatactgatcgtaactattcagtctgttagttctccctggaaatggcagcggaggcgcctccccccacctcccgcccaaccacacacaccccaccgcattcttccttcatacacccgggttcatctcgccaccgaggcctcccccacccgcacccggcggggcgcagctccgaggagtccctgcccacccctctccgagtcggtgccagaccctcgcccccacccccacccccgcccgaacttcccttccaggacctctcacttctttaacgttagggtcacttagaagctcccagcagactggcaagcagccggggagggggccgtaaaaaacaaggccacccccacctccacgcaaacacgtcccctaggcagcagcgcgcggtgcccacaggcatcgatcccatccgccaaacccttaataattgaagcggctcctcgggcccgcagccccatcacccaccttcattagccggagcgttttactttaaagtaaggcaatttgctctttgtctcctaatggatggagagcgcatccgagctcccctcctcccgcgtcgcctttgacaaagtgtacaaagccagagcctcttccgcgctcccaccccggcccccaccccgcccctccactgcggtaaaaaccacctcccgggcgctcgccccgccgcccgaagttgcatcttcccctatcctggaattgacgagcagagcaactacccaccgggaaagccaagtagccctccccgcgcccggggggcccctccccggcgcacccccctccccagcgcctccccccctacccccagcggcgcacaccagagtacggggcacgtcggggctccgggccccgcgcccaccgcccgcccgcggcccctgcggcgcagccctccccccgcccgcggcccctaccttggcagggaggcggcgggcctggggaggaggacgcgcacgccccgcgcatctgaaggtgaagccgagcgcccgcggcgcggagccgagcgctgcactagaccgaccgcgccagctgcgcccgggcgcgggggacgcgcgagggcgcgcggggcccgccacgcgcccggccccctcctcgcgccgcccgcgcgcgccccggacgcgtccgccccgcgggggccccggcgcgagccgggctcggggggctgcgcggcacggggagggggccgggcgctcacggcccggcgcaggccggaggcttcccccagcctggaaatggtctgccctgtaggaaacgcacactccactattgtctcatcagcacaaagttctgccacactgaggggacagtctggaggcttgcagtgactcagacacagccaattcctcccctaatagcactgaatcacggttccagcggccagtggtcgcccctcgtcaaggtctaaggctgctgcagccccggctcccggaggccgtttccgcgcgcacacgcgcatccatacgtacagacgtgctcgggatgcgggtcccg

SEQ ID NO: 20074 - DNA, 2300 bp, Homo sapien
tcagatttcgcatgcactgtagataaacgtgtaagaaaggaaatggtttaaaagcacaatattattgtagacagacaatgccctgagtgaaatcacatgtgggtgacttaagacagggccctaaaccggctagaaaaaggaagcaagtcatgaacagttttatgtggaggggtttggaagtcttgatcaccattcaatgatctaccttgtccattttcaacacatggaaattgttagcgcaagtttgtactttaaaatagacccaagaatgcagatgaacgtaggtttacaggactgatattcattccaaaatcctaccaaaaagctattaaagtgtcttcaaattttaatctttgttgttacctacatgtatgtaataatatgtgtatacaaggacatttacggctttgtaattaactgaatttggggatactttctttgtgcattttcacagtgtactgaaatgaatggtgggcacgtcaatacttttcggtgaatcagacttaaacatgattgctgaagaatacatcccacttaggcattcatgctgaagccagcaacaattgtccgtgacctttaacatgcccgctctccaaatcagtgcaggtcgttagtcacacggagcttacatttgaggactcgcggatccttcatagcggaggttgtccctgtccttctgcctgactcccccccgccccccgaccccgacacacactccccaccgcccccagaaacatcacacatgcagaatgcccccccccgtctgatcgccagctttcgggcacatgcgcctccctttgcagcgcgtctggagtagtttcttttgtaaacgccctaagttggggagggccgcgggctgcgagtgtgaggcgcagagagagacgccgccgctgaggtaaccgccaggattgcagcgctgattgctacgcggagccacgttgggcgtcttggacggaatccacctccactgcggagttatcacgaggagaaggagaacaatacggccaggagcctggtgggagaagatagtgttacccctccgcaggccgcagctccccgggtctacgtcaccggccgtgaaggggcgctcgccctcgctagctccgacccgcccctcccccgcccccgcgcgcccgccctcccctcccccaccccggccatccctgccctgtaacaggagagcgttttggagtcaaattaggatttctagtcccagactcaacttattacaactaactactgctcgtggggagtaggtgaggtgaagaaatgaagttttaagaacagaaaaataagagttgaactttcgaggctaccggtaaacaaccccttcatttttaaatggccgggtggcagagccgctgtttgaagtctttccagcgggacctctgtgacccttgattcaggacttaatgtattgatcctgcatctgaacacccccagaggcatttaccaggaagttgagtgacacgcacacgctacgccgtgtgtaatgcacacgcacctgggacccccgaaggggtgtccccatttcagtccagatggggcgcagtgcccaggtacccgccggcgggacccgcatcccgagcacgtctgtacgtatggatgcgcgtgtgcgcgcggaaacggcctccgggagccggggctgcagcagccttagaccttgacgaggggcgaccactggccgctggaaccgtgattcagtgctattaggggaggaattggctgtgtctgagtcactgcaagcctccagactgtcccctcagtgtggcagaactttgtgctgatgagacaatagtggagtgtgcgtttcctacagggcagaccatttccaggctgggggaagcctccggcctgcgccgggccgtgagcgcccggccccctccccgtgccgcgcagccccccgagcccggctcgcgccggggcccccgcggggcggacgcgtccggggcgcgcgcgggcggcgcgaggagggggccgggcgcgtggcgggccccgcgcgccctcgcgcgtcccccgcgcccgggcgcagctggcgcggtcggtctagtgcagcgctcggctccgcgccgcgggcgctcggcttcaccttcagatgcgcggggcgtgcgcgtcctcctccccaggcccgccgcctccctgccaaggtaggggccgcgggcggggggagggctgcgccgcaggggccgcgggcgggcggtgggcgcggggcccggagccccgacgtgccccgtactctggtgtgcgccgctgggggtagggggggaggcgctggggaggggggtgcgccggggaggggc

SEQ ID NO: 20075 - DNA, 2300 bp, Homo sapien
tttctcatagaacaaagcgtcgattggggtagggtaccaaggtagcacacagaggtcagccagtaacccaatgacactggaaatatatttaagattctcagctccttagtcaagttcttttgaatcctaaatccttaccctcccacccctaaatctctctgagccttcaatctatttttttaactgaagtaaaactcacatagcctaaaatcaaaagtgtacaactcagtggcatttagtgtagtcacggtgttatgccaccatcacctccagtttcaaaacactgtcctcatgcagaaaggaaagcccccttggacccattagcaatcattccccatccccgactccttcagaccctggcgacctcggatctgctttctgtctctatggatttgcctcttctggacatttcatacaactgggctcataacaatctgtggtattttgtgcctgacgtcctccactcagcataaggcttttaaggttcatccacgttgtggcatgtgccagtgtttcactccttctcatgagtgaataatattccatcgtggggatacagcacactttacttatccattccccctcttggaggggtgcttgagttgtttccattttgtggctactgcgaatgctgctgctattaaacctgattttgaccctgtggtggcataaggagctcatcagggtgaactggaaggggtgtgccccactgctggtgtctggtcaagcaaaccctcaccccttgagagaggagtcagtgggagacaccactcaagtctccataatgagggacaatttcaggctgggacaacatggtggaggaaggacctcttcagagaggaagtgcacgtaaggggcaaggaccctagaaagacctgtgggacctgtggagagtatgcacgtccttcagattgaggctggtttgaggccgggtgccatggctcacgcctgtaatcccagcactttgggagaccaaggcaggcggatcacctgaggtcaggagttcgagaccagcctggctgacaaggtgaaaccccgtctctactaaaaatacaaaaattagccgggcgcgggggcacacaccaaaaaaaaaaaaaaacaaacctgggctgagtgcagaaatcagtccaatccagggagaaatctggcaaatactcttggccagctcctgtttttctgaaaacataggtgccagaagagcatccggtagcagctgccaagttcaatactaggactccactccacagacaattctgtcaccccattgtgggtgtcctggatgcccagaaaacccacatctcttgataaagtcctcctgtggtaagtctgcaacccctctgcacccagcccctctgctgacaccccctctgcaccctgcatctttgccaagtggggagagatgcattccagaactccagtggcaggatctgcccttgccgggatcatgcagacttggcattttccagtacctactgttgcttgaggtttcttataatagagcaggatgagcaacacgacttctcgttttgtaatttggcacatatgtatatgttttatacatacatgctatgtgtctatatgtacacacggcaatacatacgtgtatatgtatacgtatatatgtatgtcaacgaatacctaaatatataatcatatgaaacaaactgtttatccctgttccataaacttcatatcaattcaataaataaaatttattcaaaatccaatcatcccaacacattaacatttaatttttccctattttctgtctgtgtttgtcattgaatattaaaagttttgcttttttttactatttcacctcttttctaggtagtccataattttaaaacaatatatatggcaccacttggtcttcacagctttcaagacaggactgtcaaggcaaggacactccttaggggaccctgtcccataaagtcaaattatgcgggatgagtcagtgacgcaggagctaaaaacagtgtccctttaaaaatgtgcatgcctttgaaatggaataagtaaagtacttgcagatgcaaatggtttcaagtttcactggagacccagcgaaagcggctgttctcaaagttgccaggcagtgtggaaacgcccactgaggggcacacagtgaggcggccactggctctgtgtccttggggaagccccttctgcggtcccctccattgtctgcgtgacaaagtggacgtagaactcccccatttcctgcccagggcgggtgaggaccctgcacacacacggtgtgtttgtgagctgtgcagagtggggtctccctggca

SEQ ID NO: 20076 - DNA, 2300 bp, Homo sapien
gactcaatagggaacaccaaggcaatgcagggctccacatggagagggggctgagcatgttaacatggcaatgtgctagctcaagcctcttcctcctcttctaaagccacctgttcccctcccgttataacccattaatccatgaacccaccagtccatgaagggattcatccattcatgaggggggtgccctcttaaaggcgccacttctcagtgctgccacattggggattaagtttcaacatgagttttggaggggacatttaagcaggaacgcctctctccctgccttgctcctgccaaacttgtaaaacattgcaatcaactctgagaaaagggatggaggcaggggacacgaagatgtttctaaatgagacgtctttcacagtggagggaggtagagcagaagggttaggactcgggccctgggccaggcggtctcgtgcaagccccgcctctcccttactagcaaagttgtgaggacagcgcctgcacgcaacacttgcttactaacttgtaactgttattacagaaagcgtggagccaaacagatggcagaggcccaaggaagagcgcgctaaacccgaagtagatctgatttcacatcttgacttggcgattgtttagctgggtcagggtaaatgcctcactgttcctcgtctgtaaatgaacacgggtgctgaggttggggtgagcgcctcaccgagcctcagtttctcatctgtaaaatggacacctgtgcgcgcctcgcggcaggggctgctgagcacgcggatgggtcctctggaggctgggccgccaagaggcggcggctgcaccatctgatgctagagaacgagaaccgcagtgcgtgcccgacacaaagggaaggacaggggacactggaacaggggagacgacatggaagaaatctgggggagccaaaagccgccatgccgagaagggggtcggaggaggcgcgggagagaaaagcccagggctgtacactcgcatccctctgctgccggcccttcgggtacattcaaatactgggcatgagtcccgcagacaaggctttgaaaggatattgttctcccataaatagaagtgaaggtgctggaagaggcacgagcaggaaaattatggctgggctgtggacatctatggagaagacagacttgtgtgtcactgttgagcaaaggagagccctgcacacctgcccagggagaaagcaccctgccttgggctacttctggctgcagagccagcctggcacatcctgcagttcctcccgtccagactcagtagcaattttgacgcctcctttttttttttttttttttttttttgagacggagtctcgcatgcccggctaatgttttgtatttttagtagagatggggtttcacggtgttagccaggatggtctcgatatcctgaccccgtgatccgcccgtctcggcctcccaaagtgctgggattacaggagtgagccaccgcgcccggccgacgcctccatttttataggcacctgagccccctgttttctttgcttcctttcgctctagaaaaaaatgtaagcaatttgaaggcagtcatcgtccctcacccagctacacattcatatacgtagatgcagaaacaggtgtaactttaggttataggagaaagtaccttctaaatttgcagcaagaggcagaagcagtcttaaaaagggggtttgagaagccagcagctcagtctcaggttgtctagggatcccttcctgccatggtagaagcctgaattttcagattttctccaagtataaagataaaaaagtaaatgaaccaaaacagttcaaaattaagttgatattatttaaacacttcattatatattctggtttctcttctgattgcataaaatccaaagggaaattctttgccttctggaaatgaatttgtccaaaggaatctctagccttgaatttgtaccaaaaaaaaacaccctaaaaacatatgagtgatcagctggccctgttggggtctttctggctggaagatgaataaggaaaggcacatctgacatttcatttcactgacattttattttgttctcagtctttttttctgtttcctcaagtacattttctgctatgatgctgcaaacaggcaccaggatgagtcagacccatttaagattgttgagcctcacaggtttagcgatttaattacgtgttttgtgggatttgcaagctgcgtgcaatctccccgcgtgcctcaggtccacaagtggcagtggcccttgtctctctctggttttgtttggtggtacatcag

SEQ ID NO: 20077 - DNA, 2300 bp, Homo sapien
tgattgttgtctaagcctctaaaggccggatgagtgttaggcaacaatggataactagtagacctggacttgtgtggttcggggtcctagatgctaaaaatctggttttatgcttggatttaaacctacctctgcctctgccccgtcggaggtccttggcatttcctcccgggttaggacacctagccccaggcatctcctctcatgacctttaccaatgtggtgacagttcagatgaaggtccttggcatgaacaggagttgtaaggatggatatagtgactcggtgattgaatactaaacccaaatttaaaataaacgtgggtcatttggtcctataatctttgaaaaagcaattatgtataacggcagaaggtttcagctggatgtcagattatacggatctaagagtcagtaggaggccagaagagtgggaactattcttttcaatgtgatggtgggaagcgaaaacagagggctctttttttgtttcttggttggtttgtttactaaggcatggagaggtgagcttgtgttgtgggaataagagaagggattcgtgggaggagattgaaaatgcaatctagagagggtcatgggtggagaggggtgcagaaagatgggggtcagcttgactcttgtggtttccctgaactctgcctcattctagagataactggggtgaactggtgtctcagtgggactgtggaatccacaggtgcagaatgaggtgcttgtccagctgaggtgggtcttcctggagttggaagcatggatgtacaggaagccctgtcaccaaggctggcaattccacctgaggatcaactcgagaagtggccatcagaaacctgtgacgatgaacccgtggctctccttttgcctgctgcaccccaagtgtggggactgtacttggcacacaataggcatttaatgcacattgaatggatgaagtctgaatgtggttgctcagagttggtgattaccgaagtcagaatggagggaggtcaaggggctgtgtcttgagggaagaaggaagaacctcgtggcaatggctgaactgggaatccagaggtaaactgatccagcatgggggagggaggcttagggtctggagatgatttaataagagtagcagggcccgagagggaggcagcaggaatgtggctggaggagcctccaggagccctctgccagggtcgtgagaacccatgggctggggccagggagatgagaggtggaggctgggaccatggtgtcctcttcttaatcaaaagctgatgcattttgtttcctcttgaaggtctcagagtccccacaaatccctgccttgttcacaacagttggggctttgtgcttctctctgaaataaaacttttatcttaaaaaaagaaaagagaatgtatccaatatagtatatcataatcacagtattgggaactttcccaaccctggtgggaaggaggaggaagtcgtgggttcactggggcacaggaaaaaaatgccagagatgtccacccctaatttttttcctctcctcttctgggtttctgttgtaatggattgaaaatacacaggagatgtaatgcaaaacttggctttgatttttttttcccacctaactctttaaaggtttggaaagatttgattacatggcagggaaagtaaaaatgtggatgagatatcctgacgctcaggccacatgaccaggtgataaggcgttcagagactgccagcggcagctgctggctcaggtgcggcctgtgtgggaggactcgtgtctcggtggttacagagaagctggcttccacggtgtgaacccgactgaatcacaggccgcttttttgttctccctcggccttggagggcctgggacgttcctgttgcccaacatcctggtgagctgagaacattctgtagattaattaggttctctcctctggctcagcaggtctgttctagccatttgaccaaaggctctctgatattttctaccagccttagaacgacagtctgcagatgtgtgcacataaatgtctgggaggagcacacagatactgtgggaggagtgggtccggcgtagctattgggagatctcgctcgtacacatggcgctacatagaaagaatgccctgaggtgaaggtgacagctcggcagtttcttaataccctgaacttgagcgtggcctgcgctagagaaaatacacggtgcttcttaaaaacaaaagccagcagcctgcaagagggctgtgcctgcgagttcctgggagcaggagggggctgttcctccgcccctggctccag

SEQ ID NO: 20078 - DNA, 2300 bp, Homo sapien
ccgcatgacacacaggaggaggcacggatggcattacacaaacggcccaacaggccgggcgcggtggctcacgcctgtaatcccagcactttgggaggccatggggggcggaagacctgagcctgggcaatatagcaaaacaccgtctctataaaaaatacaaaaattagccaggtgtggggatgtgtgcctgtagtctcagctgcttgggaggctaaggtgggaggatcacctgagcccgggagattgaggctgcagtgagccaagatcatgccactgcactctagcctgggcaacagagcaagaccctgtctcaaaaaaaagcagcccagcaggtgacagggtgagcatggtgggatttatcatgagcagtaccctgacctgtccgagggcacagcataccattatctaaatgaccaaggtccggaaactctttcgttcctgacttttcagtggttagaaggtgccagagaccagctacctaagaagggaactggccaattcccaggaggaaaatactgcctgccactgcactcaattggggcagccatggctgaacaaagcaggaaggagctgatgggcgtgaaaaaggactggactggaagtgaggaccccagctgtccagcacatttctcagggaagactcacatggcacagcccaatgctggtgttcttgtcaagtgaagagtgggagtgtcccgcagccccgggagaataatctacttgagtccctgttttaaggggcattactgaggggattctgctccctgagctcctagaggtctgagagcaaaaccatgcagtgttgtgtttgcattcacagagagcagggaatagaaatgtctgtctgccttcccctcaccccaaaaccagaatgccatcctcctagtgtgtctgctgcactcatggcagcaggaggagcagaagcagccgggggtgctgctgagcccccactcctccccacctccccgcacccgtccacctgcagcagggatggcatggaaaacccgacatttcataaagattcagcaaggtcctgtcaaagcccaggggaagccatattcagggagggggtcaatgtctgggaggaatacaattcccaaaagagactgagagtgaagcctgtgggtcggagggtgaatgagagaggctggcgtatttgggaatcaaaggtgtcaaggtttcttgaggctcctgtccctgtctgtctgcttcctttctctccgttccacctcttagcccctgtgagcagagacagctggggccccaggctggtatgatgagcaagggtatagttcccttccctgggtgccttgtccattcatgtgtgtgcgtgcactccggagctcctcaccacccaaccctctctcctcgtggttttcccagtgtggagattagccctcgccactgacacgctgaataatgccttcctgcccaccctctccaggtcgcctcctccccacgtgaagccactccccaagggctcatctttgaaagactttttaaggtgcacgtgtcattttcacatttgctcacattgcacaaagacctagttgaggaaacgaaaactgctatgatttatgctaatgagatgaattgcattccaaatgtatctcaaccagaacacacttcgcagtaacacgcatgaaaaggaaacgtgttctatctaggaatccctgtgttatttcactgatctgcatgttgtacccgagggcatctagcaatgtgctaatacctaattcaggaaatctggattgaacatgggcacctgtgaagaagtggaaacggcagtggagctaagacatacagcaaagagagcctgttttgttataaacagctaaatctggaagtcaatgttttgtgtttcttgcagaagtcatacttttatcctgtcattatgcaaaagtgctgattcatgtttagtgccacaaaatctacctttaaagtggaatattttgaaaggttgtgttaaaatgactctcaaatctcttccaaaaactagctgctaagcaggagttctcaaggtagaagttggaattacccaaccaccaccctgatgggatgctctctgaatgcagatggaaacgatgacttaactgcagcttcggatgcatcagacacaaacgctggataaagctgctcattcacataaagcaccacctgctgccgctacctggaatatccacactggataactcgaagcttggtggaaacagaggttggaaaaagcagaaaataaaacaaagggatggaagatgggtgctctgaattccatttccttagaaaccaacaagagctcc

SEQ ID NO: 20079 - DNA, 2300 bp, Homo sapien
ttctttttttgagacggagtctcgctctgtcgcccaggctggagtgcagtggcgggatctcggctcactgcaagctccgcctcccgggttcacgccattctcctgcctcagcctcccgagtagctgggaatacagacgcccgccaccacgcccggccaagttttttttttttttttttttgtatttttagtagggatggggtttcaccgtgttagccaggatggtctcaatctcctgacctcgtaatccgcccgcctcggcctctcaaagtgctggcattacaggcgtgagccaccgcgcccggccacacacacacttcttaaactcacttaactctaaaggtacacacaggaaagaaagctggtggtgttatttacatatgaggcaaagttgacaatagcaagcattattagaaataaagaggaacatttcacaattggaaatattcaaaagagctggaatacatttgtcttatttaaggcatagagagaagactcgcatggctgtagacaaaactgattggaggatgaccaggtactaggctgtatctgtaatctaggtgagagagcatggctcaggggtaatatacgtgggaatggcttggatttggtttatatattggagctagatctttgatgagattgagtgaaggctgcagtgggaaagggtaagcaagaatgactcctagacaccgctcagcaataaaaagcacttaaaatatttatcaatatatagatgaattccaacataattatgctcaatgaacagcccccacttccctaaagattacgtgcgatacaattccatttatataaaacaccaagaaaaacaggttgggcacagtggctcacatctgcaatcccaacactttgggaggctgaggcagagggtcaattgaagctaggagttccagagcaggctgggcaacacagagagaccccatatgtttaaaaaaaaacaaaaagctagacatggcggtcctcacctgcagtctcagctactcgggaggctgaagcagttggattgcttaagggcaggagtttgaggctacagtgggtcccgatcgtgtcactgcactcccgcctgggtgacagagcaagcgagacccagtctgtataaaaagatatttaaaaactccaggaaattcaaactatagtgacaaaaagcagatgggtgggagggggaggagggaaggagggagagaggaaagggttacagagagacgggaggaacatcttcactgttgattgtgatgatggtttcacagtgtatacatgtgtcaagatgtatcaaactgcacactttaatttgcgccactgcactccagcccaggtgacagagtaaggtcgctttccccgggctcggccggcctctccacccggcgctcgggtgctgcgctgcctgttcctgttgccacttcgtgtaagttagcgcaggcaacaacacacaagaccagcacacgtgaaatggtccattttaatgcactgcccccagggaaaggaacattaccggcttctggccatgtcgtcttcccagtcccagatggcggttccgggtttgggctccgaggcccttcgcagcactagggcggcgcgagtagggccgccctccgagccatgctgcggtccgaggtgacgcgcgcacgcgagttcgcggacacgcacgagacgcccgggccacggaggcgcggggctggcccagggtccccgccaggccgagctctagggctgccggcccggcccggtgacccccgcgctcccctccgtccgctaaggccccgcggcgccgcgcatgcgccccgccgccgcccccgcccccaccgcgcccgcgcccgcgcccaacgcccccaccgcggcccgcgggccatggaacctgccaaggccggcgcggttcgagcgctccggtgcgcgcgttcaggcgcctttcccccgtgagcccggcggcgctcggaccgggccgcccgccgccgggcagctccgcccgcctctagcgccggctgggcgcgcccccgccccggtgcccgcgcgtgcgcgcccccgccgccgcgtgtgagtgtgagtgtgagtgtgagtgggtgtgggtgcgagccgggccgccgacgatgccgcggggccgccccccgaagcccagggagagcaaggcgcgcggcgactccggtaaggcccgcggccgcgccctcgcgccccgccggcggccggtgcggggcccgcgccctgccagtccccggatgcggcgcggggggcgccgggagcggcggggcgggggcgggggccgcgcagacccgggccgccgccgccgcc

SEQ ID NO: 20080 - DNA, 2300 bp, Homo sapien
gggtttgggctccgaggcccttcgcagcactagggcggcgcgagtagggccgccctccgagccatgctgcggtccgaggtgacgcgcgcacgcgagttcgcggacacgcacgagacgcccgggccacggaggcgcggggctggcccagggtccccgccaggccgagctctagggctgccggcccggcccggtgacccccgcgctcccctccgtccgctaaggccccgcggcgccgcgcatgcgccccgccgccgcccccgcccccaccgcgcccgcgcccgcgcccaacgcccccaccgcggcccgcgggccatggaacctgccaaggccggcgcggttcgagcgctccggtgcgcgcgttcaggcgcctttcccccgtgagcccggcggcgctcggaccgggccgcccgccgccgggcagctccgcccgcctctagcgccggctgggcgcgcccccgccccggtgcccgcgcgtgcgcgcccccgccgccgcgtgtgagtgtgagtgtgagtgtgagtgggtgtgggtgcgagccgggccgccgacgatgccgcggggccgccccccgaagcccagggagagcaaggcgcgcggcgactccggtaaggcccgcggccgcgccctcgcgccccgccggcggccggtgcggggcccgcgccctgccagtccccggatgcggcgcggggggcgccgggagcggcggggcgggggcgggggccgcgcagacccgggccgccgccgccgccgactggccgggcgggccgcagcgcgggcggaatgatacgggcgagtcgccgcccggcccctccgcgcgctgggcctactttcctgggccgggcggcggctgaggcgggaggcgggaggcgggtgagggagcaggcggccgcctcctgcgcgcgccctgcccccgctggccctgccgcggcccgcgctgaacttgagggaaagtggccgccccgtgttccgtcccggggccggagggccgcggggcgcgctggggaggcggcctggccagagcccgggcctgcggataccgcgccccgggctcctcccggacggcgcccccgcccgaccctgcgcggcgccggctgccccggggacgttgggctcggcccacagggaggccgtggagcgcggggtcgtgcacacagtaggcgccagcgttgtccgggaagcgcagggtcgtgcacacagtgtgctccagtgttatctggggcgcgctgtggggcgtgcatacagtaggcgccattgtgatccgggaacttgaaccctgagcctctgcagacgctgtgggtagtgcatacagtaggcgccattgtgatccggggggctggaaccctgggcatctggagagcgctgtgggtcgtgcaaacagtaggcaccattgtgatccgggtagcttgaacctggagcttctggagagcgctgtgggtcgtgcatacagtaggcatcagtgttatgtggggagcgctagatcgtgcacacagtaggcgtcaggaagtgttttccccagtaatttattctccatggtactttgctaaagtcatgaaataactcagattttgttttccaaggaaggagaaaggcccagaatttaagagcaggcagacacacaaccgggcacccccagaccctggcccttccagcagtcaggaattgacttgccttccaaagccccagcccggagcttgaggaacggactttcctgcgcagggggatcggggcgcactcgccggtgccgcggttcccaggtcgagggcagtggggtagggggcgccgcgctttttctcgcgggcgccgtggttcccgtgcggccttggacgcgagtctccccctgcaggcctggtccctggtcctggtcacccgtgcaactggagcggcgctccgcgtttggaaagggttttgaagggggttctaagggggagtgggcgcctaggactccctatgggagtcggtgggttataccttgactgccgttgatttttatttaactgtttagcttagtgactcaagtgttccccttttcttggggatgagtaaactgaggctcattaaagagcttgtgaccaaacaacacaggtgccccagagaaaggtcgggcctggaaactacaaaggattgtgttaattttgtgtttaggaagaaagaggtaatgggtaggaatcaatgtaaacttattcataggccacaccaaaccaggaattcttgtcgtgattgcacttggtagagttaacacacgtgcacattacggaaacgttggtgaccaacaggcgtttcagcgagctttcgcacacctcat

SEQ ID NO: 20081 - DNA, 2300 bp, Homo sapien
tgcagccaacatctctccagcagcccacaaaggcccatgaggtgtgcgaaagctcgctgaaacgcctgttggtcaccaacgtttccgtaatgtgcacgtgtgttaactctaccaagtgcaatcacgacaagaattcctggtttggtgtggcctatgaataagtttacattgattcctacccattacctctttcttcctaaacacaaaattaacacaatcctttgtagtttccaggcccgacctttctctggggcacctgtgttgtttggtcacaagctctttaatgagcctcagtttactcatccccaagaaaaggggaacacttgagtcactaagctaaacagttaaataaaaatcaacggcagtcaaggtataacccaccgactcccatagggagtcctaggcgcccactcccccttagaacccccttcaaaaccctttccaaacgcggagcgccgctccagttgcacgggtgaccaggaccagggaccaggcctgcagggggagactcgcgtccaaggccgcacgggaaccacggcgcccgcgagaaaaagcgcggcgccccctaccccactgccctcgacctgggaaccgcggcaccggcgagtgcgccccgatccccctgcgcaggaaagtccgttcctcaagctccgggctggggctttggaaggcaagtcaattcctgactgctggaagggccagggtctgggggtgcccggttgtgtgtctgcctgctcttaaattctgggcctttctccttccttggaaaacaaaatctgagttatttcatgactttagcaaagtaccatggagaataaattactggggaaaacacttcctgacgcctactgtgtgcacgatctagcgctccccacataacactgatgcctactgtatgcacgacccacagcgctctccagaagctccaggttcaagctacccggatcacaatggtgcctactgtttgcacgacccacagcgctctccagatgcccagggttccagccccccggatcacaatggcgcctactgtatgcactacccacagcgtctgcagaggctcagggttcaagttcccggatcacaatggcgcctactgtatgcacgccccacagcgcgccccagataacactggagcacactgtgtgcacgaccctgcgcttcccggacaacgctggcgcctactgtgtgcacgaccccgcgctccacggcctccctgtgggccgagcccaacgtccccggggcagccggcgccgcgcagggtcgggcgggggcgccgtccgggaggagcccggggcgcggtatccgcaggcccgggctctggccaggccgcctccccagcgcgccccgcggccctccggccccgggacggaacacggggcggccactttccctcaagttcagcgcgggccgcggcagggccagcgggggcagggcgcgcgcaggaggcggccgcctgctccctcacccgcctcccgcctcccgcctcagccgccgcccggcccaggaaagtaggcccagcgcgcggaggggccgggcggcgactcgcccgtatcattccgcccgcgctgcggcccgcccggccagtcggcggcggcggcggcccgggtctgcgcggcccccgcccccgccccgccgctcccggcgccccccgcgccgcatccggggactggcagggcgcgggccccgcaccggccgccggcggggcgcgagggcgcggccgcgggccttaccggagtcgccgcgcgccttgctctccctgggcttcggggggcggccccgcggcatcgtcggcggcccggctcgcacccacacccactcacactcacactcacactcacacgcggcggcgggggcgcgcacgcgcgggcaccggggcgggggcgcgcccagccggcgctagaggcgggcggagctgcccggcggcgggcggcccggtccgagcgccgccgggctcacgggggaaaggcgcctgaacgcgcgcaccggagcgctcgaaccgcgccggccttggcaggttccatggcccgcgggccgcggtgggggcgttgggcgcgggcgcgggcgcggtgggggcgggggcggcggcggggcgcatgcgcggcgccgcggggccttagcggacggaggggagcgcgggggtcaccgggccgggccggcagccctagagctcggcctggcggggaccctgggccagccccgcgcctccgtggcccgggcgtctcgtgcgtgtccgcgaactcgcgtgcgcgcgtcacctcggaccgcagcatggctcggagggcggccctactcgcgcc

SEQ ID NO: 20082 - DNA, 2300 bp, Homo sapien
tcatttttcaattttaaatgtatagtccgtatctcctagggttttatctatcaatttcagttaattccttctcatttttgggcaacatattaagtagtttcaacatagaggctgtgaaaattgttttatcatcctgagatagctttttaattttgcatttcagaaattaagttgagctcttttattaatgtactcagcctttaggttaaaacacttgtaactgtgttctgaaaacccaattttcaacagacattttatttgtctcttcctaacctcgaagctgtttcttaccatactacacagttttccaagggaattgtatatcaattgctagggtcccaacaatcattttattttatttatttttatttatttattttttttttaggcagagtctcactctttcacccaggctggagtgcagtggcgcgatctcagctcactgcaagctcggcctcccaggttcacgcctttctcctgtgtcagcctcccgagtagctggggctacaggcgcccaccaccacgcccggctgattttttctgtgtgtctttagtagagacagggtttcaccgtgttagccaggatggtcttgatctcctgacttcgtgttccacccgccttggcctcctgcctcccaaagtgctgggactacaggcgtgagcccctccgcccggccccagcaatcatttgatttgggcctgggaagtcataaaacatttgctgttagttttagtgtagaaattttggaagtatggtctttgaacaggatgtgaatatagttaagaataaatagaataaaaattatgcatatctttttcttagtagactcactttttatgtatgaagttgcagtcttttgaattgcattgtatttcttgaagccggaatttgccttttctcaaggttctgcggaataatgtttgcagctgttgctgacttcctccaccctgtctctgtgcccctcccatgtgggcttcacctacctcctgtcttttggaatctccaggtccttgctacaaggcagattcaactttcagccaggagacttttggcagaaatgggaactgcaggctgttttctcaaaacaaagatttcaaggtctatagaacatttcaagtgcctgtgtttatcacacaaactcttgagaacaaggggctttcttgagctacttggttcttcagcttaccctgtactctactcccaagtttctgaagtctaatatttttggatcaaatttgatacaaatagctgtgtgtaacatatttctggtcttcacatagcaaagtatattacgtatttatgtccaaattataacacttgaagtatatttatttttaaaaattgtagagatttagggcatctttattttacggcatttttgacaagttttgtgattattctgtgatatgttatttgtcatatatagtcttatttgaaaatacttttaagttaaaagcactttacctgggtgggtttatagaagctctttgtaaaaattgaggattgtctgaggcattgcagtcttgtcttcctgaacctcctaagccatgtctatatatgagagagcaaaggttttatttttaagagacagggtcttgctctgtggcccagactggggtgcagtggtgggatcatcggtcactacgccccgaaactcttggactcaagagatccttccacctcagcctcccgaataggtaggactacaaatacgtgccgccatgcctagctaattttttagtagagatggggtctcactgtgttgctcaggctggtcttgaactccagacctcaggcaattctcctgccttgtcttccccaagtgctgaaataaaaggcacgagccactgtgcgtggcagtttttcttttttacttaatcttgttttgcagcagttttgagacattgagtttgtgaattagcatttaaaggctttaatatttctactagagttttgtttactgagtggtttaagatactggagttttgtttactgagtgatttaagaaacaatgtggattattgatgaaatcttaaagtgatttggaggtgaaatgcgtcagtggtttgtagtgactttgaaacactatacagtaggttcacatggtttaagaagcatcattatggcttttgtgtgttttggtgtgtgtggctgtgaagcctcaggaatttagtttaagcttctgaaaagcccaccaatatgtatttagaattctgttgtcccatatcttagtcatctcaatgtttctcatttctaactttaaaacatgtcaattaaaaaaattcagtatatcattaat

SEQ ID NO: 20083 - DNA, 2300 bp, Homo sapien
aacatagatatcaagccatccagaaaatcttccttaggaattttaggctggttaatactgaaagcaaactttcaaggaaggtttaaaatggccaatttgaactttctagtgaaaaaatttggtgtctgagccaaattaaaatgccaatcattatattctaaccaaacttacagactttagttactagcaaataccagatatgattcttactgtataaaagttataattttagaataaaatggaggaataaccaccaacgtattgtagataggttgtgtctgtctccgaaactgcaatgctctcatacgctagaacagagcctacctacactttctgctcaattaataagcatcatataaatgaatgaatacattttaaaagaaaaacaacaaggagaaagaacaggaagaaagaacagggaaagaaaacagaaggtggggaagaggaaggaagagagggaggaaggggcagggtacttgagagaccatgaggatcccagatcagtcccacacatgattacactgaattatgaactaagatatttaccgaaacgttttccattaatgcatatttgacttgctttttctgacctaatgaatttgcaaaacgatgacaatcatgtagcaaatgtacatggactagtactcacaattaattttttattttctatgccagcaggagacaaagatgatagaagaatgaaattcatttttgacccagaaatcttattttagctactgctttatctgctcttaattttctaggagtggactttggggccgtcgtgccggatcctccctgaatgtggagcgatggggggttgcacacaggccgttctgccccagcagctaacaagaaagacccttgcattcctccctgcatctctcccttttgggtcctactaatgtctgttgaatttctcttttttccaaagcaaaatccttctctgcattttgtctgcttgtctgtttcccagagccgcaggactctctccttgtctggagttccagagagcccccactttctctttctaagctgtgttgtgtgtttcctggtacattctaggttccccaaagataaacatgactaaggattggaaaggaggaaaggccgcgcagattgttaatctgaaagtcaatccccggatttagctctcaaaaatgctttatttttggagaaaagcaatagagtaagacagaaggacttaacgcttgcagggaagtggctttctgccatgtagagccaggctggcaacctgccctctgccatcagggagtgagcatgaacctggaaacctctaggacgcaagagcgaggctggctgtcccctcgtgtgcagtgcttagaccttcttgccacacatcccgtccctcacctcactggatagcccccgaatcaactgttcacacgaaagcagctgcctggttctgagtggccatgctcactcccaagcacaggctgaatgaaaagaaaactgtgcaagtagcttgtatggtgggaagcccccagcagaggctgagggtgcagccaggtgctctggaagccttgaggcctctggtgtcatcttcctcacctctaaataagagatgggctaggttggtcaaggtcctccctgtcctaaaacactttaatgaaatggaagaaaggctgcaggctgatagaggagggacagtctggtttggttccctcaagtcttcaggagagggctcaaggacagtctcccatttcttgttggcaaaatgtaaagtgcagtctggaccctgtccattgagtagagactcaggaggccaaccaagatccctgaaaagctaacagcgtggtcagccttcccacagacagtgcacccaccgtgggaggacacttcgccccccattgttaacgtccaccgcgcccagactcccacagcgagctccttcccttcctccccatgtttgcagtggagttcccactcgagaagacagcacagtagcaagtagaggctggtcctgggacactcgcacccatgtgtgtcaggaagcccctgcggtcacacggcccatgaggaagccagaggggctgctggggctgatgaggccagggcagggcggcctgctcttccataaatgacagctggcaccaaagcccagagctggcagcctccacctgaggagtggcatctccatgaacggcttgtgttctcgcacagccccattgcgtagatgaggaaactgaagctcagagaggttcctgcccttgcccaaggccacacagccggatgagctagaaaggtgctaggggactgggaggtgggggagctgagac

SEQ ID NO: 20084 - DNA, 2300 bp, Homo sapien
aggtcggcagatccatgcacccctcctgtccctcccgcacctgcacagccgctgtggccctgagcctgcggcccccctcggagctccgggtggaacctgtttttaccacctcagctccactgtgctttgactgtgtttcctgttgattgaaaggactttcccttcactgaccaccatgtcattatttctctgtcttcctcatgcaggggagaggactgtccctgagcagatttagctgggtaggtgacgaacgcacttccatcggcttcctcttccgtcccagtcctcacagccccgcaacttttgtgttctgctctgtttcggttgcttcctggcctccttttctctcctctcgagacctctctgcccacagctgggatcgggccgccttgtcttccactggggaaatgaaacgtggtcttcccttccggaaggtctggtctcttgcttctgtgccggggacccagccctgcaaggccagatcctcttctcccagagggttcccaggcgacgtgactggtctccctcccagggagggagcaacaccacgtccgagaaaatgtttaacttcctccaacacaaccagtgcgagaagccccaggaacccgcatgtggaagtgggactggctggcccgtctcagtgaccccagatgctgacactgggaaaatgattctgctgatgaacagaaaaagaggctaaatagagttgctcgatttataataacctcattaatccaaagatttttgttttgtatgtgtttaaataataattaaaacatagatatcaagccatccagaaaatcttccttaggaattttaggctggttaatactgaaagcaaactttcaaggaaggtttaaaatggccaatttgaactttctagtgaaaaaatttggtgtctgagccaaattaaaatgccaatcattatattctaaccaaacttacagactttagttactagcaaataccagatatgattcttactgtataaaagttataattttagaataaaatggaggaataaccaccaacgtattgtagataggttgtgtctgtctccgaaactgcaatgctctcatacgctagaacagagcctacctacactttctgctcaattaataagcatcatataaatgaatgaatacattttaaaagaaaaacaacaaggagaaagaacaggaagaaagaacagggaaagaaaacagaaggtggggaagaggaaggaagagagggaggaaggggcagggtacttgagagaccatgaggatcccagatcagtcccacacatgattacactgaattatgaactaagatatttaccgaaacgttttccattaatgcatatttgacttgctttttctgacctaatgaatttgcaaaacgatgacaatcatgtagcaaatgtacatggactagtactcacaattaattttttattttctatgccagcaggagacaaagatgatagaagaatgaaattcatttttgacccagaaatcttattttagctactgctttatctgctcttaattttctaggagtggactttggggccgtcgtgccggatcctccctgaatgtggagcgatggggggttgcacacaggccgttctgccccagcagctaacaagaaagacccttgcattcctccctgcatctctcccttttgggtcctactaatgtctgttgaatttctcttttttccaaagcaaaatccttctctgcattttgtctgcttgtctgtttcccagagccgcaggactctctccttgtctggagttccagagagcccccactttctctttctaagctgtgttgtgtgtttcctggtacattctaggttccccaaagataaacatgactaaggattggaaaggaggaaaggccgcgcagattgttaatctgaaagtcaatccccggatttagctctcaaaaatgctttatttttggagaaaagcaatagagtaagacagaaggacttaacgcttgcagggaagtggctttctgccatgtagagccaggctggcaacctgccctctgccatcagggagtgagcatgaacctggaaacctctaggacgcaagagcgaggctggctgtcccctcgtgtgcagtgcttagaccttcttgccacacatcccgtccctcacctcactggatagcccccgaatcaactgttcacacgaaagcagctgcctggttctgagtggccatgctcactcccaagcacaggctgaatgaaaagaaaactgtgcaagtagcttgtatggtgggaagcccccagcagaggctgagggtgcag

SEQ ID NO: 20085 - DNA, 2300 bp, Homo sapien
cacaccacccggcaagaactgctcactacggctccctgccccagaagtcacacggccggacccaagatgaaaaccccgtagtccacttcttcaagaacattgtaagtgacgatcgatgggaagaggtagcaactgtgagggggaggaggggtgctggccactgctgtcatccacacaggacgttcgtacgctcgggggtggcaccggggtcatcatcagggtgaggccggccggggaactcccccctcgcacctgatcgcgagttccaggcaagcgcttcccgactgtatctgccacggattgcaccgtgcgctccgtgcgttctccagagagctcacttctcttgagattaggctcccatgtaacgcttagcctaaaaacacaggctttgcaacctatggagagtgcttgccatgggctgggagcggagggggcagcagagagagcacagggcatttttagggcatttttcgggcagcgaaaccgctctgtcgaggctgccatggtgactgaagaccacgcacttgtccaaacccacagcgtgcacagcaccgagagagccctaaggcagtgttgctaataagggaaactgttcggggtatgtggaaactaatttctgcacagtttttctgtaaaccgaaaagtgccatgcaaaacgaagacgattaaaaacaagaacaaaaccacaggcttctaattccaagatctcagtgcagcagacattttatgctcgtattcgataagtgcacttaggagctgcagacctggggacatccccttggaagctctgaatgtcagagggcccgctactcctagccccggaaagggctcacggtgaagcaaagtccgccgcctccctcagtgtcccaagatgggcccattccccagctacggagcctctgggaggtgttttccatcctctgaaacacttcctgagtgctctgggagatctgcatcatctagaatattttcaatctcaggtctatacttcttcaccaactaggacagaagtggggaggctgggcacccgggtgcttctggcagctgatggatgctagccaccctcagcaggcaggagcccgttaggaaatggacggcggcacagggctcccagtgcagcccacggttctctgtgtctttccaggtgacgcctcgcacaccacccccgtcgcagggaaaggtaagaccttggaatgttttgattgatcatcacttttctgatagaccttctctaaaatcccataatgtaccaaagagagagttaggctccgagctaccagaatccatcccaaaacgtgttgccaggcagctcccaagtagaacaggtcggcagatccatgcacccctcctgtccctcccgcacctgcacagccgctgtggccctgagcctgcggcccccctcggagctccgggtggaacctgtttttaccacctcagctccactgtgctttgactgtgtttcctgttgattgaaaggactttcccttcactgaccaccatgtcattatttctctgtcttcctcatgcaggggagaggactgtccctgagcagatttagctgggtaggtgacgaacgcacttccatcggcttcctcttccgtcccagtcctcacagccccgcaacttttgtgttctgctctgtttcggttgcttcctggcctccttttctctcctctcgagacctctctgcccacagctgggatcgggccgccttgtcttccactggggaaatgaaacgtggtcttcccttccggaaggtctggtctcttgcttctgtgccggggacccagccctgcaaggccagatcctcttctcccagagggttcccaggcgacgtgactggtctccctcccagggagggagcaacaccacgtccgagaaaatgtttaacttcctccaacacaaccagtgcgagaagccccaggaacccgcatgtggaagtgggactggctggcccgtctcagtgaccccagatgctgacactgggaaaatgattctgctgatgaacagaaaaagaggctaaatagagttgctcgatttataataacctcattaatccaaagatttttgttttgtatgtgtttaaataataattaaaacatagatatcaagccatccagaaaatcttccttaggaattttaggctggttaatactgaaagcaaactttcaaggaaggtttaaaatggccaatttgaactttctagtgaaaaaatttggtgtctgagccaaattaaaatgccaatcattatattctaaccaaacttacagactttagttactagcaaataccagatatga

SEQ ID NO: 20086 - DNA, 2300 bp, Homo sapien
ggacctcgtgaattacaatcactgtaactcagatatttagaatggtacattacacctatttggtactcataaataatggatggatggatggatggatggatggatggatggatggatggatggatgaacaggtaggtaaatagatggatacatgagtggatggatggatggatggatggatggatggatggatgaatggatagatggatggatgaacaggtaggtaaatggatgaatacatgagtggatggatggatggatggatggatggatggatggatggatggatggatagatggatgagtggatggatggatgggtggatatatggatggatggatggatagatggataaatgggtaaatggactgatatgtggatggatggatggatggatggatggatggatgagtggatagatggaggggtggatggatggatgaatggatgtatgagtggatgggggatggatggaatggatggatagatggataaatgggtaaatggactgatatgtggatggatggatggatggatggatggatgagtggatagatggaggggtgggtggatggatgaatggatggatgagtggatgggggatggatagatggatgggtaggtgggtgtgtgtatggatggatggatagatggatggatgggtaaatggactgatatgtggatggatggatgacgaatggatgaattgatggatgcatgcatgcatgagtggatagatggtgggtgggtggatggatgagtggatgggggatggatggatggatgggtaggtgggtatgtgtatggatggatggatagatggatggatgagtaaatggactgatatgtggatggatggatgcatgagtggatggatggatgagtggatagatggaggagtgggtggatgggtgaacggatggatgagtggatgggggatggatggatgcatggatggatggatgggtaggtgggtgtgtgtatggatggatggatagatggatggatgggtaaatggactgttatgtggatggatggatgaatggatagagagatagatggatgactggtattacaggaatatgtgagtgaatcctgttttctgtagataagtaatagagtttggagaggaaactaactaaatgatatttatttaaacctaacactctaacttgaaagcaaaatggattcattgcccttcgtgacagaaatgtggtattttttggagaaagctatgagatgctggtatacaacatgaaatatctcaatcccacttcagatttctaattgtttctgcttccagaggagaagccaagtcaaaatgtcctgaataagcagttctctattgtgagaggcctcttgtggaatctgggattgaaacaattctaaatgccccacttctttcatgcatgaattgcaaaaagatgtggcaagttttgtttctaccaagaaaactaaaaacaccttttgtcaaataaatgctccttgcatatttaacttatgcaccagtggccttttaaacagtcaatgtcccatcaaggtgcctgcacatctgggctctccgggagcagccatggcagcacccgggaagaaacgctgatgtggctgctctgcatgctcagatgacttcatcgggaagcctgggtgcattttacgctgggtgccaaatctcgagtaactgaggaattcccagagccttctgaaacacagagctgcaataaggctgctccatccaggttagctccatcctaggccaagggctttatgaggactgcacatattctgtgggttttataggagacagctaggtcaagacccctcagagaaagctgctttgtccggtgctcagctttgcacaggcccgtattcatatctcattgttgtttgcaggagaggcagatgcgaaccagaacaatgggacctcctctcaggacacagcggtgactgactccaagcgcacagcggacccgaagaatgcctggcaggatgcccacccagctgacccagggagccgcccccacttgatccgcctcttttcccgagatgccccggggagggaggacaacaccttcaaagacaggccctctgagtccgacgagctccagaccatccaagaagacagtgcagccacctccgagagcctggatgtgatggcgtcacagaagagaccctcccagaggcacggatccaagtacctggccacagcaagtaccatggaccatgccaggcatggcttcctcccaaggcacagagacacgggcatccttgactccatcgggcgcttctttggcggtgacagg

SEQ ID NO: 20087 - DNA, 2300 bp, Homo sapien
gaaagatgggggtaactgcaatgtgattttcttagaaatgtcaaagacacaatgaggctttgatgggttacttgtcaaaagatgcctttcaattttattcagcacaacgaatctctgtcactttgctgagggctacatggacatcttcatgtgaaagtttgtctctcgacagtgaaatgccagcctctgtttcttccatccactgtcctcaacctggggtcctttttctaaccgggagggcatgaaagcccccaagataagaccagttgatccaaatgtgaatccactgttttattaaatagtattatctacatgttttctttgaagaatccatgacttttctaaactgcctggctgcccatctgtgtggacactctatcccaacaaaatatgcacggtgaaatttcataaatactttaaaaagacttttaactggaacttgtggagcctgacatttgtagggctgactgttggcatatgtagtgtttcaggaaaccactgtaacaccagcagaaggagcaccaaacagaaggccgcgtgtgcagctgtcactgtggcctgagggacgctccagagcccagcacacagggacatctgcaggcaggaaggtggccccgccctgtggagtcactgagataaagccaagagatattttggggaggaaaagctgtttctgatgctaaagcaggtatctaaaatgggacccattttagtgttccagcttccccagcctgagctttgagtgacttgagctgggacctgggtgcacccgggttcattgtcaccacccgtgctcctagggcagctgtccagcctcccacgcccactccgctcatccttgacttaaagtgaggttgtggggcagaaaaattggagaaacacactatctttggcacccttttccctcctcaccttcagcctcaaagtctcagaaccctcctgccccctccacttgaaaatctctcctgaggaaacgaccagactgaatgcttttgcgtcgttgtggaagtatttctcttccagttgccagcatttgaagacagttgctaaatcctccggggctttgggggaggctggttttaggccgaaaccccgaccccgtgctgaagtctgagtcccgcctcccagcgcgggccgggacagcgctcacccctctccctcacttcctaacaaactgtgtgggtcccaggctgctccaggtcccctggaagctccagatccagatccctgactgggggtgtaggtcaggaggaacgcggggcctcattctgggactcccccaacctcctcctcttccaccatcaggaggctgagaatccagagaaagatctctgaccactaaatctgtgtgcaggtgagtcacggctaaacagcaggctttttctttttaacaagacagcgacgaagaccacgatgtctctgggctgcaggaccaggctgcttcctcgcacctgcgcgtgttttgctgtcttttccgcgcacgcttcctgcgccggtcctgcaggagaaggtgcgcccctagctcccagctcccagctcccagctcccagaggagcacctgccagccggacatgggcctggcctgggctccaggggagggagggagtgccttgggaggacctgccggctcctttcgcctccaggccgggctgactctcctcctgcagggccggggctgcgccaagtctatcggcagtttctggggtttccagcccctgaggacgcggggagatgcggcctggcacccctcccgcgaggtcgaggtcggggtcggggtgggttcggaggccaagcctccgaacgggaagggtcgacgggccgcagttcggagcccagttcggcagcgggcgaggctccaggccgcccctccgaggtctgaccctgcgcgtgggccccgtgcgccccccaagttccgcgtgggcagagcgggcccggggtcctccgagctcccggggcggcgccggcggccgcgtccaggtggggcgggcccggcgggatcggcctgtgtttacctggctcgcaggaagcccggggaggcggggccggggagctgggtgcgcgcccgtccctcggagccgccgccgtcagtcaccgccgccgcgcgccagagagaagcagcctccggccccggcggcccctgtctcccgaccccggaaggcgaagcaggctgcccggggaccccgcgcgtgggcgcttgaagccgagaccagcctgcccgggcctgggcaggcggagcagggccttggaccccgcggcgcccctcggcctcggagcaacgagcgcagcgccggtgggtgacc

SEQ ID NO: 20088 - DNA, 2300 bp, Homo sapien
cgaggacagatatctaaagtatatcagtagtgtttaccacatgtgacattatcattttatttatttttaaatgtcgtgtccataatgaaatgtaaaatccataaaagaaagtactttgttgtgttaattgctctatctccagaacctacaatagttcctggcacatagtaggcactcaagggtaaccagtaaaacaataaatatacactatatttcttccttttccaagaatgtggagggagggagaaaacactttaaaatgcaattcaaaagatgtcatgaaaagagagagagagagagagagaaaaagcacagaaatagaaaacaaataaaaagtacaaaataaaatgttaaaaataaatccatataggttagtaataacaataaatataaatgacctaaactcaccagttaaaaactagagattttaaaattgtgttttaaaataattcagttatgtgctatattaaagagatacctttaaattgcaggacataacataggaaggctgtaaaagatgtaacaggcaaatacaaagcaaagaatgttgttgtacttatagcaataacagacaaattatactttaaggcaaaaacaaacaaaacatgtaccataataccaaccacataatgttaaagcaaaaaaaaaaaaaaaaaaaaaaaaaatcaccacaatatattaagatcatatgcgtatgccaaaaatgtataaagaaatgactaatagacaacaaatttaggttacttggagatagtgggagaggtggaggttgtgactggaaaatatataaaagtgacttcaactctagtgataatatttaaaaattattctaagctagatggtgggtgcattggtattcaatgtaattttatcatatctgtttcatgtgaaaatagttcataatttaaaaactctcccaaatcatattactactaactttcaatgcaacagagctgtcaaatacaacatgatactttgaaagcctgggtcggagagcgtctcagggaagaaaagcaatacggattggcaagatcacctgaggaagtttcaaggcattctctcaggtcggggcaggtaagagcattcttggctttagcaggatacccaaataggcaagttgcttacactcaattttgtcttccagaaaatgtgtgtgaatagaacaattcccttgcaaggaactccctagcaatgaatgtagataaaatacatagatgttcaatgaactgcatcaagatttatctggaaatgaggcagaacagagctagcaaggtagaaaaacaagatcctacttccttaactcctcaaggcaaagagcccctgccctctttggtctttggattacccatcccctcaggcactgcgtccgcgcataatggacagtcaccagatggtgaatgctggaaacgcatcggtgtttttgaaagtgaaaacagacaaatcaccgcaaataaaggaatcagtgtcagctctctagctgggaaccaccaaggttacaaagctaacgtgactggccctgctataccgaaacggcttaatttctttctggcaaatccacatttacggcagtaagatactaaacactttctttcactttaaaaatatttcgtttgtcactgctgcagtttatgtccctcagatgagtaatacaaggcaaaaatgaagtgaggttgggtggtgtgaacagccttccccttccatgtcagccacgtctatagagaagctcacgcggccctttccctttgcacttctctcctctgtagcaggccgcggggtgagggtgggattaggcggccaattttacaaaactccagggagcgtcgccagcctcgatttcctggggttattcctgggagagaggcgttctcacggacagccaccctggggaggaggaggaggaaaggcactaatggatgaggaggcccgcgcacccctccgcctcccaccccggcgcgccctggaacgccctggagcgcgcccggcttccctcgcccgcctggcccgcggcatccggcagccccgccttcagcccgccgggcaggtccgcactccgcagaggcgagcgcgctccggttccagccgggaggtgggcggcgacccatcccgctagaatccgtccagtctctgctcgcgcaccgtgacttctaaggggcgcggatttcagccgagctgttttcgcctctcagttgcagcagagaagcccctggcacccgactctatccaccaccaggaagcctcccaaaagagctctcgccctgtggacgactcggaatccctggaaaagccgggagggagtcgga

SEQ ID NO: 20089 - DNA, 2300 bp, Homo sapien
tgactggaaaatatataaaagtgacttcaactctagtgataatatttaaaaattattctaagctagatggtgggtgcattggtattcaatgtaattttatcatatctgtttcatgtgaaaatagttcataatttaaaaactctcccaaatcatattactactaactttcaatgcaacagagctgtcaaatacaacatgatactttgaaagcctgggtcggagagcgtctcagggaagaaaagcaatacggattggcaagatcacctgaggaagtttcaaggcattctctcaggtcggggcaggtaagagcattcttggctttagcaggatacccaaataggcaagttgcttacactcaattttgtcttccagaaaatgtgtgtgaatagaacaattcccttgcaaggaactccctagcaatgaatgtagataaaatacatagatgttcaatgaactgcatcaagatttatctggaaatgaggcagaacagagctagcaaggtagaaaaacaagatcctacttccttaactcctcaaggcaaagagcccctgccctctttggtctttggattacccatcccctcaggcactgcgtccgcgcataatggacagtcaccagatggtgaatgctggaaacgcatcggtgtttttgaaagtgaaaacagacaaatcaccgcaaataaaggaatcagtgtcagctctctagctgggaaccaccaaggttacaaagctaacgtgactggccctgctataccgaaacggcttaatttctttctggcaaatccacatttacggcagtaagatactaaacactttctttcactttaaaaatatttcgtttgtcactgctgcagtttatgtccctcagatgagtaatacaaggcaaaaatgaagtgaggttgggtggtgtgaacagccttccccttccatgtcagccacgtctatagagaagctcacgcggccctttccctttgcacttctctcctctgtagcaggccgcggggtgagggtgggattaggcggccaattttacaaaactccagggagcgtcgccagcctcgatttcctggggttattcctgggagagaggcgttctcacggacagccaccctggggaggaggaggaggaaaggcactaatggatgaggaggcccgcgcacccctccgcctcccaccccggcgcgccctggaacgccctggagcgcgcccggcttccctcgcccgcctggcccgcggcatccggcagccccgccttcagcccgccgggcaggtccgcactccgcagaggcgagcgcgctccggttccagccgggaggtgggcggcgacccatcccgctagaatccgtccagtctctgctcgcgcaccgtgacttctaaggggcgcggatttcagccgagctgttttcgcctctcagttgcagcagagaagcccctggcacccgactctatccaccaccaggaagcctcccaaaagagctctcgccctgtggacgactcggaatccctggaaaagccgggagggagtcggaggcgccagcccactggggaggtggcgctgggcgcgcgggatgcgcggggagccttctctgcaggagccgcacagtgcactgctgcgcgctgggcagtgcggggaagcgccgcgggaaggagcggctccgagcaacaggtgcagcacgcagcccctccgggagccagggaaaaccgccggcgaagatctggagcggtaaggcggagagaagggtctttccacctgcgcggctgcagccggcggatccctcttcccaggctccgtggtcgcgcagcgggcggaggcgcccgggaaggggaccccagtgctctcgagatcaccgtcccttcccgagaaggtccagctccgggctcccgaacccaccctctctcagaaggtcccggcgcaaagacggtgccaccaggcacggccaccggatccccgctcccgctggctcgcgcctcgggggaagctcagactcctaaactcgcactctccgtgctttgcgccgggacccctggccacccccggcgcctactatcccgccctccctccccgcgcgccccgccgctcgccgggacagccccgcgggccatggagctggcggtcgggaacctcagcgagggcaacgcgagctggccggagccccccgccccggagcccgggccgctgttcggcatcggcgtggagaacttcgtcacgctggtggtgttcggcctgatcttcgcgctgggtgtgctgggcaacagcctagtgatcaccgtgctggcgcgcagcaagccgggcaagccgcg

SEQ ID NO: 20090 - DNA, 2300 bp, Homo sapien
tgctgcgggccttgatggagcaatttgtaagctccttctccaagttctggaaggaagtgctgccttctttgtgagctgctgttctccctttaattgaacagaaaatgctgctagctgtaaggaatagaaatgaatgcttcatgcgacacgaaaatacagcaaaactcgtttcttttgcattccgtgtgcctgccaaaaataaagaagaaaaaaagaagatgcattctattaagtaggagattgggtcagccatttcaggaagaccctttttacataaattccacgttaaggaaggagttccatgacgtttatcaaaatctctgttcagttaaatcgtatcacaggaagtccttcacagaaagatgaatagaagaggcagaaaggtagtggggaaaaggcaagacatttcataggaaagacaaactggaaggtgggaatagcattagtaatagttacaagcatagcaattctaacatttcctgttattcactgaaaactgtgaccctgatggatctcaatgtacttcaacagtgttattgtgtctttcagaatttttgcaagggaaattgcgctggatggtcagccatttagattctcgctggcttagatttcaggaattgaaccaggtggagggtaaggcctgtagactcacctgaagaatgtttggatgtctgattcatgactccttcttgagttttcagcattaaaatgtgctttttgtacacatattttctttcttctttttactgtccatggccaaatttcttcttactgaactaatatgaatttgacgctgctatgaaatttctcctgtaatgtgaaacgtatccacttctgttgaaagtgaaactctgactcttaggattatacagaagttattagctaaaaatataatttacatacaaaatacagtagagggtcttacaactctcatatttactagaatatttgccaacaaagaatctaccaagggaccctaacgatgttttaccctttttgtgcccggtagttatggctaccagctcttcttattttttagtcagtgatataagaatagtggtagatgtcgtacctgaaaaagtgtcacctcctgtgcattctcagggaagtgtaattcaaaaggaccatttagtcaagttttaaatgtaatatctggaacctcaaaagacccatgaaatggactttgatggcctttcttgggatttttttttttcaggaacagtgaccactaaataaatggaaagctgtttcctgtaatcagactcccatgacccacctacagtattaaatatttcagaagctcaagaacattatgtgcagaacctcaaatagtaggcaggtgctggattttaaaggttctcttgctgtttgccatccatgcatcctgtagtcctacgtgtgtaaatctaaccatcaccatggggttcaaatgggatcttgaagaattacatggtctattttcaccagcattattttagacaagcgactgctaaattagttgaatattcaacgcacagaacatttgattgtcaaaagaagtcaatgaaacaaaagaaaaaagtaacttagaacttttcatgcattgctggtggaaatgtaaaatggtgcagctactttgaaaacggtttggcatctctctaaatatgaaacactgtgttcccatgtccccagcaattctacttctaggcatgcacctgagagaaatgaaagcacacgtccacacaaaagcttgtgcatgaaggtttacaacagcattactgacaacagtccaaaatgcaaaccatccaagtatccatgacctgacggatgtaaacacaggctggcgtatcacactgtgtaatcccatccacggtgaaaggggatgaatgactgatgtgtgctgcaatatggatgatccttgaaaatttggagtgaaagaaagtagactcaaaagccacatgttgtatgattccatttacatgaaatgtccagaacacagaagccataacaagaaaaaagtagatgagcgatgacaaagggcaatggggaggaggagacagagagtgatggctaaaaaaatggctaacgtcggccaggtgtggtgcctcacgcccgtaatcccactttgggaggccgaggctggcagattacccgatgtcaggagttcaagaccagcctcgccaacatgatgaaaccccatctctactacaaaaaaatacaaacaattagctaggcatggtggtaggcacctgtaatcccagctactcgggaggttgacacaggagaatcgcttgaacccgggaagcggaggttgcagtgag

SEQ ID NO: 20091 - DNA, 2300 bp, Homo sapien
gaactgttcccctttccagaactgtccttctctccccaactatcctcctctccaagattgtccccctctccagaactgttcctctgttcagaactgtcccctctccagaactacttctctctgcagaactgtcctcgtctccagaactgtccttgtctcccaaactgttcccctctccagaactgtccccatctccagaactgttcccctctccaaaacggttcccctctccagaaatgttctgctttccagaactgtttcagaactgttcctctcaccagaatggagcagtcgcaagtaacacagttaacattatctaagattctatcatctttaatttaaagttttataaacaagtcagagagaaaagactgaagaggatatatgaaaggtaatttctgtagggtgtcttcccatgtaagataggtttcaaacattttgaaaatattataaccttgcaaatgtataacctcaatgaaaatagacttttttctttatcatccttatttactaacgtatcttttccagaaatgacttaatcacattttctgtactataatgagatttatacccttggcttgaaggatgttctttcatgcctatagtatggcacacacacgttgatgtgtgcttgtgtataaaacaacatcacagaatgttctgaaagtatttggataagtatgttagttgcttatactatataatttacgtctttaaaaatatccttgttcccattttctaagttgaaaaacaaaagtcaaaactggtttcctaaaaaacaaagcggcatgtgtttttatgatttaatggatgtcatttgatatttactgtttctaaatctatagataaaggacagaaaaaaaaatggccagtgcagttctagatgaatggttaagaaaggaattattctaagtctgaagtagtgcatttataaaaatgttgagttttgtctgtgttcaattgggatactgaccagagggaggctgcaggcaagataattaagtttcctttactaatttagttctttgtagcatttgcagctatcttttctaagtgcctactgcccagtcctgtcacctttgatgctggattggctgccaaggtgaaagatgctaccctgaaaatcctccttgaagggtcccttacattactgcctgaaagggggctgcccagatattttaaatttgcttgttttatttcacacatgtcctgcaatctacactaattacactgaggtttcagtattggtttcaatagagaagtgatttgtggggaagatgctagggaaagtctatagcaaataatagaaaggaaaattaataaatcacagctcttttcacataaagaaagaaaattttttgtaaggtgaactatttaaaacacaattagctcattcatgtcttggcagcaggaaacactgtttttagacctgcagtgagctcgctcttcacttgagatttaaactgacaagtaagaagatgtgtagtcttgaacttgttcctctgctaccgaggtctcgctcaccttctcctgaagacgcatcctcccatctgtgtgttcccgtatgcaaaggagaggatattttcaggccatttccatgctctgctccagacattatgtattgaaaataccaatacatgggagaaagggagaccagtgactggaatgtgtctctgtaggaccctcttagaaatcaacgcatccaatattattaaagataccttttggggaaaatattttgttggaaatatcctaaactctgaaaatgcttcattaaatggtctttgtgctgtttgtgcccccaggttcttaggggttgccgctctgttttaccctggagttcccttctctggtcactctagacctcagcggaaggggcagggtcatcctggtctctggctctgaccagtacctattgccgaactgatgcggtttggctgtgtctccactcagatctcatcttgaattcccacgtgtggtgggagggacccggtgggaggtgattgcgttatgggggcgggtctttcccgtgctgttctcgtgatagtgaatgggtctcacgagatctgatggttataaaaacgggagtttcgctgcataggctctttttgcctgccgccatccacgtaaggtatgatttgcccctccttgccttctgccatgattgtgaggcctccccagccacgtgaaactgtgagtacaattaagcgtctttcttttgtaaattgcccagtctccggtaggtcttttatcagtagcgtgaaaacggactaatacactaacaaaccataaaccagcac

SEQ ID NO: 20092 - DNA, 2300 bp, Homo sapien
cagggaaatgggatagagatctaggtgtgtggccttcccctggggaaatgggatgaagatcgaggtgtgtccttccactggcctcttatgcacagttatgttatttccaggcagtctctgtgttcactcaggtttgagtgtaaaatccccacaactttctgtgtttatctcctgtttggtttccttctttaacttatctttcttatttttgtgtctctttgcttccacatctgtgaagagtttagaggcacctgtatagttttagggcacagtccctgatactaccctgacttcaatgataagttcaggggttcccaaagctgcccccagtttcaataaatgtgctgggaggactcccagaactcactgagctggtgtcctcgtggctttggtttgttacaggaacaggacctgggttgtctggggaagccatgcataggtggcggtggggacgcacacagggcttttcagtgtcctgatcacacggagtcaggagatgagactctgtcctctctcaacagcaggaatgacaatgagcatggagattgtccaacatgggagctccccgagctcggtgttcagagtctctacggggcctccactacatgggcgaggtaagtccaccgtttggtccgtgtggtttagctcggtccccatgtcagtggatcctgtgcaacccaatgtccccatctgaatcaccttttgccatccggccagcccaagacccccaggcagacaaagatcatcctgcaggagccaaccctacaccttttgggggcaaagttaagttctttactacccaacacgcaggagctgtccctgcgttaaagacagtttatcacctccacacaggaatcccaggatggcatgtcagtcaaacctgaatttgactacactgtcacttaatacctgtataattttggatagtaacttagctctgctcagccttgctttttcacagtgacaggcacagtacctcaaatgccgtagcactcagaatttgtcacctcaccatgattattacaaagcaatctgtctccttcatgctaccctaaaaagttatctaagaccctctgaatttcatagatttcctcctccattcagcaaacactcactgggctttcatcagccttagtctctcttttaagggactgatacatgaatgaaaaaacagtctgtacccacaaggggcttgcactctggtggaaagagagagaaggtaaacagacacacaaatgcactattatgaatgccacagcaggtgtttttacaaaggaaagtacatctcactggtaaagttgtggaggtttcagaagaaagaaaacacatgtattagaacaaaagataatttgcaaaatgaggagagcattctgagtgtgatggttggttttatgtgtctgcttgattagactaaggggtgcccaggaagctggtaaaacattatttctgggtgttccttttgggtgcttccagatgagattctcattttactcagtagactgaataaatgagacatcagctctcacccatatgggggacctcttcagtctgttgaggcctaaatagagcaagaaggcagtggaaggtgaattcacgctttctgtgaactgggatatccatcttctgctgctggagttcctggttctaagcctttgaccttggcctgaactacaccattggttcccttggttctcaggcctttggggttggacagggccttacagcccttgcacatggcaggtcatgggacttcttgtactccgtgatcacatgagccagttcctcataataaatctcatccctctctctctctctctcttctctatagttctgtttctctggagaacgctggacagatagaaaagcgtaggtctgaagagtgagaaatgctcacatattctcaatcatgcacgttgctatagattgaattcctcccacccaaattcatatattgaaacccaactttccaatgtgactttaagaggaggtgtgactcctgggaagggcataggttagatgaagccatgcatgtgaggcccccgtgatgagatcttatgaaaagaggaagagacgccactgctctctcctctctttttgggcacctgccatgagaaggcacattgagaagccagccgtctgtgaatcgggaagggagccctcaccagaacccagcccagctgtactctggactcgaactcccagcctccagaactctgagaggtaaatttctgttttttataagccacctaggccatataatattttgttttggccaccagagtggactaagacactgatgt

SEQ ID NO: 20093 - DNA, 2300 bp, Homo sapien
aacgtcctcaacctgataaaaagcatctatgaaaaacctacagctgacatcatacttgatggtgaaagactgtttatttgtacgtgttggcaagggaagtttcacggaagatgggctagggaagtctagacctcacagtaattatgcacttgtggccatttcattttatatctgcatttatattgggaagagcagatcaaccaaccagcttttgctgataaatgatcaacacgttcatatattagacctaggaatttgggtcttattggtttattttttaaactgcattcatcaggaccatttgtacatccaaactatgtttaaagaaaagtaattggccttcagagtagcagagtaaacataagcattatatgtcactgccaaatcgaacaaaaaccatcttgatatactaagacctcctaataagtggaggggctttcagctaaataaacagcttaaaatacacgctacaataatgggaagagtgtgagctttttgggggacagacagttgtattctcttgagctatggcctcctcagtcttaaagcagaattttaaaaagctcagcagggttcatggagatgtctgtagaattctcagcaaatgagggctgatactttggatatggttggtaagcatggtctggcttactgtatgcctgggtgtgtcatatagatgaacccgatgtgaagacaagttctctgaaaagaaatgtggaggaaagaaactttattcaagtgaaaggtttgcagactggggaacctttggtgtagaggcacattccagagcagaccaaagggaggatctggcttttaaagagaaagttctcacccaggttcccaatcaggtctgtttatgtaaatgaaagattcagccttgcttagtttagatcagtctaggtagctgagctctggttcattggggcagctgagctctgactggttggtttaggtgagctctgacagttcccaagttgaacaaagatgtgagttttcagggaattcagcctgtgtgacctccagtcaccaaatggctgcttgtctcttttttaaatttaggcccagttagccacttgccatccatcttgaagaatcagctctttcgggttcacaattgttcaccaattgtggtttgtggtgtgtttaagaaaacccaaacatgtaagtctaaattttaaaaattaataaattgggaacgaccatttactttataaaaaatggcttttataagcgttgtttaatcatggagcattaaatcatgatttgatttatacatacacaaattttgagagatatatgaatcacaccagaagggctcatatctgtaatggaactttatatgaaaactgtgtacttgatcatcaaccaacaaatgagttgtattggcaaagttatgtgaaactttgaatagattgatttaaaagtgggacttgtagggtgctgtccttgttataaaacaagcagacatcagatagaggatgtctttcatgactgcctgcttcttctcaaaatcagtgcctggaagaaagttgcacccttttcctttgacctccagtggctactgtggtcattgggcatcagggccattcagcgcagatgacatggaggggctaaataaaattgctctccagtcctctgggacaagactaatattttttggcaatttcagattgactggtagacaatgttttagatacaactgtcaattcagatcgcagtcaacccattcaaaatacatgcaataagcaagttctcagttgaaattgacaatttctagtgcctattttgctaaattgtgatcttcgttccagagcataacagttatctgttatggagtgtggcggtctcattaatttatgcttagaactgctcctgacagtggattgtctttggcttccaagaacctttcattgactgttttaagctttaaacaaaaatactaccaaggtaatgtgtgtcatctactctgtactctccattgaccctgtttcttatactttctagagggaatgaaccaaagcatatttacaaaagggtctctatcaaggccggggtggggggggacaagagagaaagaatagcttagaaattaagtccctaggccgggcgcggtggctcacgcctgtaatcccagcactttgggaggccgaggcgggtggatcatgaggtcaggaaatcgagaccatcctggctaacaaggtgaaaccccgtctctactaaaaatacaaaaaaattagccgggcgtggtggcgggcgcctgtagtcccagctactcgggaggctgaggcaggagaatggcg

SEQ ID NO: 20094 - DNA, 2300 bp, Homo sapien
tttcccccgtagcttaactagaaaagcgccatcgatgggtgtgttaaacgggataactagagatttcaaacaccttttatttgcctgtcttgaaaaaaaaatctaaatgaatacgcccgctaccaaaaggcaaaataaaaccaaccttaagggtttttgttgttttttttttttttcaaaagtggcgatagggactgtttggacctgactccaacctgcgccctcccttcctctatgaccctcctgcgcttttcctggaacccaaagctctgacttcgtcaaacttacacaattaaaggcaggcggaagaacgcgggctgggaagcaagcgggaagattctagaatggaagggagcccgccgagcgccgcgagccgcgccaggccgggtccgatggagcaggcggggattcctcccccaggcggacccccgccaccagccctgccgggagctcgcggcctgcggagcgcccgggctggccgctcaccgcccgcttcccccagcgaacgactcggggaagctccaggaggccatctgtgctgacggttcacaccagacaggaccacttgcaaggacaaaaataagaaatttaggaaacgaaaaaagacgtactggggcgaggggcgcgggcgcggcgacgacggggccgggggcacatcctggcggccgctcggggagagaggacacgcgcgggaaggagcgcggcgggtgcacggccgcgggtgggagtacgcgcctgtgcgcgcggggcgagggcgagggcgcgtgcgtgtgaccgcggggagggggcgggcgcgtgtgcggggagcgcgccgcgccaggggccgagtgtgtggggccgatccagaagtgcgcagccccctcacctggcccccgtgtcatccccgaaatcccgggaaagggtgggccgcgcgcgggagtttggtggagttggaactttcggtcgcgctcgctgcccactccgctggcgcccggtggcccgtggtgaagggggactagggtggggaacaccggggccctgcggtcccctccctttcctgtatttaagaagccgccggcggcgcagaggcccaggcgggctggcgcgggggcgaggcggcccggtggcagcagcgggcggggcgggcgctccggagtcggtggggcccgcgggttggggggcggggagaggggggagtggaagggagggggaacgcaggggagggagaggaggggaggagccgcgcggcccgcgccgcttccgaaccggaaagttggtcttgccgaagtcctgccaccccggcgtgcgcactccgctccgctccggccgcgagcctccgagcccggccggccgccgggggaagcccgcggaggggacgcggggccgggcgagaaggtccggagagcggggggcacctgagcccgggcgggcccgccgcgctgagcggcgctgagagccgcggcggagcagcgaaggcggccggccgaccccgcgcgcccggaacaggaggcgcggcgcccgagcggcccgggcgagacaaaggcgccgggtcggagccctgcccgcggccgctcgctccgggaggggccgcccggcggcggcggcggggggggcgcgggcggcggcgcagacactctataaaggggcgagcccggcgcgccggcggagacggcgccgcgcggacgccgccaaagtttgctgcctgcgccctgcggagggacggccaccgcggcccgcgccgcacccgggccccgccacagccgcacccggggcggccgaggagcgcggcgccggagcccgcgatgtgaggcggcgccgggcagcgcgcgccccggtcccgaggcgccgcggccccctcctcgtcggcgcggccgctaattgcgagcgcggcctcatttgcataggccgccggagtccgctggagcccggccaatcggcgcggccctccgctaatggccatgcattattcaccagcctaattgctcagccccatgcgcggcccgcgcagccgccgccgccccgcgccccgcgccgcgcgcccgccaggccgccccgcgccgtccccgccggccgccccgctgatgccgctgccccgcgcggggcccgagcgccgctagcagcatgtctcggcgcaagcaggccaagccccagcacctcaagtcggacgaggagctgctgccgcctgacggggctcccgagcacggtgagggccggggctgcggggtggccggggggtctggggctgcccgtccgggctggggaagcgcgtgcggcgggagcggatgcgcgcgtccgggagcgggagaaagttccctgcttcc

SEQ ID NO: 20095 - DNA, 2300 bp, Homo sapien
gatggtgttgtcactatcagtagttgactgacagtgaggagatgctgttgtcactgttggaagttgagtgagggtgaggagaaggtgttatcactgtcaggtgttgagtgagagagaggagatggtctgtcactgtcagatgttgagtgagggtcaggagatgatggtgttactgtcagtagttgagtgagggtcaggagatggtgttgttgctgtcagttattgagtgagggtgagaagacggtgttgtccctgtcagtagttgagggtcaggagaaggtgttgtcattgtcagttgttgagtgagggtgaagaaatgttgttgtcactttcagttgctgagtgagggtcagaagatgttgtcactgtcaggtgttgactgagggtcagatggtgttgtcactgtcagtagttgagtgagggtgagaagatgctgttgtcactgtcagtagttgagtgagggtgaggagacggcgttatcactgtcaggtactgagtgagggtgaggagatggtgttacagtgccagtgctgtgagaatgagatggtgttatcaatatcagttgttgaatgtgggtgagagatggtgtgaacagtgtcagcggctgagagtgaggtagagaaataatgggtgaggccattgtcaattaggaggccattggcgtcttttgaaagtagttagtgtctgtggagtggcatgtattcaggttacatgaaaagcagctgagaagcaaactggcaatcagagtggcagcaacaaattaagaatattcatattcataaagaccattttttataatgaaaaagtaatacatgcagatgggggaagatcacctgaaccttgagaggtggaagatgtagtgagccgtgatcaaaacattacactccagcctgggtaacagagaccccatctccaaaaaacagaaaagaaaagcatttataagttcatgttgaacagtgtttcaaacacatagacaaaatttatatgtcatgaaaatggaatatcagaaaaacattgtttaaaaaaacacaaagtgagtaaaccattaatacgtgaggtgagcggtgcatcagcttgccggcttccagctgcagcgggtgatggaggtggaagggagctgtcctcgggacaggaaatgaaacaaacccaaccaaagccgtgtattcgtttattcaatatcgttttgctttcttgtgtagactgagggtgtaaacctcgtttctgacagtcgcctataggacttttcagcaggctgtgggcctagaggtgggggatgtggaatcaagctaaagacccagaaccagagaaagaaggaagcagcagtgaggaagcaggacaagaacatctcggaaattcagcccggcgcggtgggcgcgcctgcagtcgcggcgctttgggggcccgggccacgtagcacgaccctgcctgtgaacgcacagacaccagcggttccaagggcgcgggcaggaagcgggcaccgaaggcaggctggagaagcgcggggcggaagcaagaagccgcgcggcgaggagggcgcgtggggccccacacagccatggggcgcgcgtactactggcagcgcaggctctggaccgctaaggaggccgcgcgcgcccacgcgtgtccccggcagagcttccaggagacggctgcgaggcccttccacccgcggaccagagcgcgccgggtcgaaccacgacccacgtgcaggccctcgcgcgctaccggaaggccagcctgtggcgcacgcgcgccccgccccgccgatcggtgacgtcatcgggcccgtcacgaggcgggggcggggcctcggaacgcgacgccccccgtcccagctttagccactcgtgacgtcattgcccggactccactgcctcctgcgccgcgcttttgccaccctgggcacgtcatcgtgcgccgacgccaaacgagggcggggcctagggacgccacaccttccgcgccgccgctcgttacgtcatcggacctcgccgcttggcggaggcggggaaggcccgcaggcggcgcctcagccggggttggcgctgaggggagagggcggggaaaaggtggcgaattgaggggaaagtgggaggggcgggaaaggggcggtcggaacatggcggaccagatcccgctttacccggtgcgtagcgcagcggcggccgcagccaaccgcaaacgcgcggcctactacagcgccgcggggcccaggccgggagccgaccggcacagcaggtaaccgaggcggcactggccccgttccccgccgacgctccccggggcccccagcccaccgc

SEQ ID NO: 20096 - DNA, 2300 bp, Homo sapien
aactgagtgagaacacacttatcaatcaccatggggactcatgagaggaccaccccctaccccatgattcagtatctcccactaggccccacctctgacattggggatcacatttcaacatgaaatttgcaggggacacacatccaaaccatagcatatggttaaggaagattaagaaattcaatagcacattgcctttattatcatcgaggatgaagatgttacggttttcatatgtcattaagtaaacaaaatgacgtgtgccacacatagtagctcatagttcactgggaacgcagttacttgttcagtctgttttctacaaagtcatgtgagatactgatttttccttcgcattgttgatatctgggtgaaaataaggtatttgttaaattggtatttcccttttttgtgttttaagtgatagtggtgtcattcaacttatctttgcagttgaatgaagaatgaatgacattgagcattattgttttgtttatccatgtccattattagtttttctttgcttttgccagcagtgtgactattggccctgcccagagccatttgcaatcttacaatagttaagtgttagcactgaaagatactaatgttaagaacagatgtctactgtctgattattgggaaaatattagtgtttcttagtagaagcaacacagttttttttaatactagatttctcattctgagtctatacacaattttctatgaatcataaaactttgataattatgatagtctaatattttactagttgtaaaaatgaaacttattttgctgtgatgtttcacaattgaaaagccttttttttttttaaggcgtagtactaattcttaagacagtgtttatctaattgtccagtcccaggattcattggaatcagagacattttcttagggggtctataagaatttcctttaaaaggcatccgtaggctgcgtgcagtggctcacgcctgtaatcccagcactttgggagtccaaggtgggcggatcacctgaggtcaggagtttgagaccagcctggccaaggtggtgaaaccctgtactaaaagtgtaaaaattagctggacgtggtggcgggtgcctgtaatcccagctactcaggaagctgagtcagaagaatcgcttgaacttgggaggcagaggttgcagtgagctgagattgcaccactgcactccagcctgggagacagagcaaggctctatctcaaaaaaaaaaaaaaaaaaaagataaaatctcaagtttaaaaaattatttacacttgccagaatagaaatgttttacttatttttttttttacacctaatagtattagcatgaagacagagttgatagtagggaacatcacaattttaggtaactgaagtatgtatcctgagctaattggctatatagcttcaaatttttgggtttgcatttatataacattggatattgtaccattaactctaattcagaagtttttctcaatttatgtatagcagtgttatttcttatttcaagaaattggtgttcagttttcttgtagaacattttagaaatcattagctccaaggttattgtatatatgattcccatgggggaaatgacatctcagctcaagggactatttccatgttccttttcctgggttttgctactaaagtcaaggcatatttttcaggcagccatccctttaaattttatttattcatttgtctgctgggttatttatttattttaacatcttgccctttgtcttagttcattttgtgctgctgtaacaggatatctgagactagataatttataaagaacagaaatttatttctcacacttcttgaggctgggaagtccaagatcaaggtattgacgtctggtgaggccttcttggtgtgtcctcacatgggagaagatgggagggcaagagaggatgaatgtggtttcctcacatggcagaagagcaggagagagcaaacccattgcaatatgctctctttatgatggcattaatgcatcatgagggcggaactattgtgagctaaatgcttcccattaggcactatcttctaagactgttgcattgaggattaagcttccaacacatgaatttggaggggacaaaaacatttcaaccgtagcaccatttgtctcctttgctgctattggagggagagtcccaatttctcattagtttatgcagcttgctgcttagtaatgacttatcaatgacagttgaaacttgtagttgtatttgatgaaggaaatatgcacatttctttatagcacttagttttttg

SEQ ID NO: 20097 - DNA, 2300 bp, Homo sapien
ctctggttagcgtgctctccgtggttagcgtgctctccgtggttagcgtgctctccgtggttagcgtgctctctctggttagcgtgctctccgtggttagcgtgctctctgtggttagcgtgctctctgtggttagcgtgctctccgtggatagcgtgctctctgtggttagcgtgctctccgtggttagtgtgctctctgtggttagtgtgttctccgtggttagcatgttccccatggttagtgtgcctttagctgcataataggattggcataccctatttatctgattaatgtctggtagggaggttgcttttaaagacagacttttatcagaaaataatactttttgtcataaaatactattcacaaattattaactgtaaaaattgctcttccacttgtgattgttaaattttaataagtcaataaataattatcaataagaatacattctatttctgagtacctgccatatgccagagaatcactcatgttattttggcctcaaagcaatttggaaggccatttttccacatgacagaagaggagcgtggccccagcagagtgaagacctggccacaggagttccgactttcacacttgggcttagaacccaggcctgctttctccttgtctatcttgtctcctttaagtttgcaaatattacatgtagacacattaatagagttaattagtcaccaatttgtctcttattttagaaaaataattaccataaacatgagattcaaactatttcccctttcatggtgtccatggaactggggagggagaaaccttgaaaagtcgtataacttgctccctgtccccagactgatggggtgagctgcgttctcaattttaaaaccatctggctctagggagcaattaacacaaattgtaaagaaagtctttatgatccataatggtctttattttaaagaataataccaagtgacttttgtgatattgcttaggattcctctagaacaatgttattcaaacgtatatacttagccgtgaaaacaaaaagttctgaacacctaagttcttctgcagctgtctcatgttggcaagctttctgagcactgccgtgctggctcgcctgcgtgcggctttcctgaggcagcggtggcctcagttgttgctggtctcccgtaggtcgctctggtgcagtggacagagagtgtgggcctcacgctggtcagcagggacctcacctccatgcagctgaagacccccagtggccaggtcctcagcttctgcattctgcagctgtttcccttcacctccgagagcaagcggatgggcgtcatcgtcagggtgaggctgcggggagggtgccacgcgatggcttcagacattttgttttcacaccttttaaacacagattttcccaaaagaaagttaaacatttactcaggtgctttatgctgttacagttttgtttgttttttttttttaatgaaatctaagctaataatctatatctgggaacctactgtgtctctagtgagataaaataattctcctaagtcaacctagccagaatcaataatgtgggatttattaatttttgaaatcaacaactaaagctgttttgatttcaacaaaaataacatgccaaagagtttgacttttgtacattgatttatgaccataaagttgccaaaacgtaccttaatttttttagcaaacaccaaaatcatatcttggaagttgactaaacaatgaagcattaaatccaactgtaaaagtttaagagaatgaatgcaactcaaatcatattcattaacacactcagaccttcagcctagcatctcaggatgcacaattatgttctcagtcctgattgcactattgctgaagagtgggcctagccctccgcgtagaaacacgtgtgaggagcttaacacacaggaacacattcataggaattgctttttccattgtatgttttattagactagcagttatttgccccgagcaatgcagcctaaatgtgcctctgtttatttttgttctttgataggatgaatccacggcagaaatcacattctacatgaagggcgctgacgtggccatgtctcctatcgtgcagtataatgactggctggaagaggaggtatgtgagtgactctagcgtggttcacagtgtttctatggaagaggaggtatgtgagtgactctcagcctggttcacagtgtttctatgaactttattgatagatgacaggaaaaggatatcctttccccagcttgcagacactggtatcattggatgaattgagctgtcaaaa

SEQ ID NO: 20098 - DNA, 2300 bp, Homo sapien
cttgtcttgttgaaattcaccagtttaaattgttccctagatatggatgctaacaggcgataaactcgagacagctacctgcattgccaaaagttcacatctcgtgtctagaacacaagatattcatattttcagacaggtaagtatgtatcttaatcactttgaatttttaaacatttgtctcacacaaacgaagcctattgtttttgtcagaatatatatttattaatcactaaatatctttttaaaaagaactactgtaatttttttaatttataacagcacaccagcatggcacatgtatacgtatgtaactaacctgcacaatgtgcacatgtaccctaaaactttaagtataataataaaaaataaataaataattaattaattaaaaagcatgttaaaatagatatttttagccacatacattaatcatgatcaaagctgctttttgacggaatgaacaagctctaagttcagaagtattttttgcttatactattagtattatttgctattttaaaagaggcatactgcaattattttcaatttgtaaaaatgtatattgattaaaaaaattacatttttctacaagttatacgtgttacatgttgtccagaagctgctgttgtgaaacaagctataaatacaaaatagaaatgtgtttttaatcactgccattttcagagcaagtgctgccttaactagttcaaagaaaattaatagaaatgatctaagtttatgtgtttactgtatgtattagttatgactaaatttaattcaaacaaaaaataagaatttcttggtcttgatttatggtgagtgaacagacattctgtgtctgcgtctgttctaaatgaatcgcttgcacctacagaaggagttatttgaatataatttatatgtaaatgtagtttgttttgaagcatcagaatcacaaattaggccctgaagactactatttgcaattaaattattaatgcttctgataaaacttcagatcaatttttgttgacttttcagtgttatagcaccacaaattaaatttttcacaataaaacctacctatttaaagatgagtctgagattgttaatttgaaccacatgaagcttttaatttatttcagtcctattaataggactattaatatatcatttcttttatgctccataaaatctccacagaaggaatatgaaaaaccacttacattggtttctgaaatatttttgttctaaaacaaatgatatttcaagattatgacttacttttactcttttaggtttttttaaaaatccctcagacactgggtaaaaactaaactaatggagtaagttgaaacccatggcagagacaacacaagcaattaagtattttgcattatttgacctattatgaaaagagatgtatttacataacaccttgatttgagagcgtcctgtctcttacccgatgtgtggcgatgatgtgtggcgatgaggagctcggcctccctgggctctggtgctctgttgggtgcaagcctcgttctgcagagccgtgtccgtaacgctgcgagtcagtgactctcagcagcgctgctccccacgccagcctaccctggcctgttgctctgttaaataatcacctcgtgggaattacaagaaaattcttaatcattatcgttgtatgttaagggagtgtatgtataaaaggcaattaccctcccaaactatccagaaggtaattattaactcataggcaccctttacacaaatttcatcagagtggtgattccactgcattcctcactatacgtttcctgcttgcagttgccacaaatttgaaaatgattggcgttaactgagtggatagacacacccagcactgctggaggaattggaaaggaccttcttccgggtccaaatactaaagctcctttggttttagataataaccccagaacattccactgtgactctgcaaataatgccctgtttctctgtgcctgtaacttagacaacattttaatttgggattctttttctcccttaatggaggtaaccagtcggggagaggcacatttggagctgaatgcatttcgaaggaagcatgattgtgcactagtcatatctggggactctctggaggtaaggctggaccctgagtgagtacatgtctgtctgtgtctctgaggcaaggctggtccctggctgagtgtctgtttgtctctcaggcaaggctggaccctgagtgagtacatgtctgtctgtctgtctgtctgtgtctctgaggcaaggctggaccctggcccagtgtgtgt

SEQ ID NO: 20099 - DNA, 2300 bp, Homo sapien
agcatttataatacaagaaagtgagacactgaagtgtacctctaacaaaatacacccaagatctgtgtgctggaaaccaacaacattgaggaaagaaactgtaaaaggcgtaaacagatgttcctggattgagagacgtaaacagatgttcctggaatgggaggcataaacagatgttcctggatcaagaggcataaacagatgttcctggattgagagacgtaaacagatgttcatggattgagaggcataaacagatgttcatggattgagaggcgtaaactgatgttcctggattgagaggcgtaaacccatattcctggattgagaggcgtaagcagatgttcatggtttgagagacgtaaactgatgttcctggattgagagacataaacagatgttcctggattcggaggcataaacagatgttcatggattgagaggcataaacccatattcctggattgagaggcgtaagcagatgttcatggtttgagagacgtaaacagatattcctggattgggaggcgtaaacagatgatcctggaatgagaggcgtaaacagatgttcctgggttgggaggcgtaaacagatgttcctggattgagcctcaattagatgttcatggattgagagcctcagtattgcttcacattgacaagctcactctagaatttatatggcaaggcaagggaactcgaattgccaaaataatttagaaaataacagagttgggccgggcgcggtggctcacgcctgtaatcccagcactttgggaggccgagacgggcggatcacgaggtcaggagatcgagaccatcctggctaacacggtgaaacaccgtctctactaaaaatacaaaaattagctgtgcatggtggcgcgcacctgtagtcccagctacacgggaggctgaggcaggagaatggcgtgaacccgggaggcggagcttgcagtgagtcgagatcgcgccactgcactccagcctgggcgacagagcgaaactccgtctcaaaaaaaaaaaaaaagaaaagaaaaaaaagaaaataacagagttggaaaacacactacctgattccaagacttactgtaaaacagtaatcagttagacaatgtgttattgtcaaaaggatagacaaaaagatcggtggaacagaaaagagagcccagaaatacatcacatgtgtcagatgatctttggcaaacatgagaggaaatcagaaggagaagagttgtgtctgcagctgttgggacaattcgccgcccatgagcaacagacccacaacctccacctcacacttcatgtgaaaatccacccaaagtggacccttgacctatatgtaaagctataaacctttcagaagaaaatacacacaaaatatgcatgaccttgggttaagcaaagagtttttaatcatgagatcaaaatcatgatccttaaaggaaaaaaataataaattagactttaccataatttaaaagttttggccaggtgcagtggcttatcatgcctgtaataccatcactttgggaggctgaagcaggaggataacttgagcccagaagctcaataccagtctgggcaatatagtgagaccgtgtctctacaaaacatagaaaaaaatgagctgagcatggtggttgctgtgtgcctgtagtcccagctgctcagggggctaaggtggaaggattgcttgagctgaggagttggaggctgcagtgagctgtgattgagccactgcactccagcctgggtgacagagcgagaccttgtctcaaaaaaaaaaagtttttctctctgaatgatactgttaatgaaaaaacaagccacagcctagaaggaaatatttgcatgtcacacttttgataaaggagttgtttctatagtatataagaaacccccaaaattcaacaagagaacaacccagtttttaaagtagacagaagatattaacagacaccaccccagagataatccacagatggcaaggaagcctgtgaagatgctcagtgccattttcatcagggaactgcaagttgaagccaccgtgagatgccgtgtacccacccgtgctagaacagccgaaataccagcaacgtgaaaggctggggagggtccagagcagcagagactccccttcactgctagggtgaagggagaatgatacagcctcttcggaagacagtttgggcatttcttacaaaggtaaacatgtatttaccccatgacccagtagtcctgttcctaggtatttctccaagagaaatgaaaacttagattcatactaaatcctatat

SEQ ID NO: 20100 - DNA, 2300 bp, Homo sapien
ctaagctccttttaactttgttagtcatcaccaatcctaaaataaaacccgtgtaacgtctcccctagtagcggctataaacaaacctacgaggaggcaggaggaagaggaaaggggcgcagggcgctcggggagcagagccgggggcccgcggtggccgcagaggccgggccggggcgcagaggccgggcgagctggccgcgctctgggccgccgcctccggaactccctgcgcctggcgcgcggccaccgtggtcccggcaacggcattaaacagagggaaacagacccgggattccgtcacccgggcggggggataaggacggctttgagagcagacaggaaaagggagcttttctgcatggggtgaaaaaattatttattgaaggaggaggaggcggcagcggaggaaggggaggggcgggaggaggaggaagagccggccgcccccgccccggccccggctcctcaggagccaagggcagcctcgccaggtcggtcccgggctcgaggaccgcggctggggtcgaggggctcagtctcccacgtgaccggctgggcgcgccccgccagacccggcctcgggattccctcctcccggcgagtctccgcccgccccgtcctggaggtggggagaaggagggcggggcgggggggacggaaactctccccgccaaatcctggccccaggcctggggacactcgcggcgggaagatttggaggggaggggagggggaggggcgtgggggcgcggcctcgctggagtccccctgaccccccgacccccgcccaccggcctgggcgtcctcccgcggcccctcctcccctcccggcgcccggtgctctggggcgcgtgccacgcctggctcggcgccgtaggggcccccgcaggtagagacccctggaaatggcctcgacgccgcaggagcgaggcggccaccaccccgctaatccgggcacgtctctccaggccgaggcctgcggtggaaaagccggggttccatttgtgctgagtcggggcggccgaatggagccaggcctcgggacgcgggacggacgggctctggccgcgcaccttcgcgggctctgcagcgcccgaccgcctcccccggcagggaggaggcgcttgtggggggcacccacggggcacagtgatccctgggggtctgcggacctcctgggccccgcagcagacacgagtttagcctttgggtttagtttaaatcacataagggtgtcgtgcaatcgatttatggtttctacacaccagacactttaacctccaaccccccccatccaaagccaacaagaaaatgcggtgccgtgttggcagctgagctgcgcccgaagagacgcagggagacgtaagagaggaaagtgtgagtggccggggggcctccccccgtcagaagtcgcgcagtcgcgcccataaaacgccccctccgggcggctagggcaggtgagcgcgtccccgggcctccccacgccggcccctgccacaggccgtctaggtcgagcagatatttacagaataaaaatgacaataactcgacgtcccgggacggccacgcaatctgttagtaatttagcgggatgggaatttcctttctagggcctgccagtgaagcgcttttccaaatttccacagcgggggaagcctgcgattttacataatgacttcagcatgccgggctttctcgacacccctccccggcccccggcccccgccccccgccccttttccagcagggccgggctccctccggacacccgcgtggactcaggcgtcccgtctggcccgttcgcccccgtttcccccgccagccccagcgcccccctgcccggcccccggattccccgttcccgcccctacgcccccatcccctccccgtgcgcccctccccgtgcgcccccctccccgtgcgccccccctccccgtgcgcccccctccccgtgcgccccccctccccgggcgcccccctccccgggcgccccccctccccgtgcgcccccccctccccgtgcgccccccctccccgtgcgcgccccgcctcttgcgcccctgcccccaggcgagcggctgccgcggcgcggggaggggcgggcgctcggcgactcgtccccggggccccgcgcgggcccgggcagcaggggcgtgatgtcacggcagggagggggcgcgggagccgccgggccggcggggaggcgggggaggtgttttccagctttaaaaaggcaggaggcagagcgcggccctgcgtcagagcgagactcagaggctccgaactcgccggcggag

SEQ ID NO: 20101 - DNA, 2300 bp, Homo sapien
gtagccacccagtcagaagtcgctccagacacaatgccccacgggctggggccaaacaaagctcaccctgttctctgccacttaacttcacagcgttgtttcccagctcagattagaaaatggcagggcgctggcaccccgcttcatcacacccagcggggcttctgtctccgcagacatccccagcctctgggaggatgcgtccaagctaaacatttccatggagacacccagtgtctgtggaacgggcagctttgaatctggaccaatagctctgaaccatttgcaggaaggaagcccagcactggggcgggggaagggggggctcctaggagcagcaggggagccgccccaccgaccccttctctgggatggagaccagtgcagtcctaggacagcagcagtgagcctccatccctgcagggcccgcggcctggggccaccagcaggcgggacagtttagcaaaaagttttagtctaaacagatgataagggctgtcatttgtgtataattttatggtgggggtaaaaaggtggctggagttttaaaaacaatgtacaggccgggcgccgcggctcacgcctgtaatcccagcactttgggaggccgaggcaagcggatcacgaggtcaagagatcgagaccatcctggtcaacatggtgaaaccccgtctctactaaaactacaaaaattagctgagagtggtggcgggtgcctgtagtcccagctactctggaggctgaggcaggagaatcgcttgaactcggaaggcggaggttgcagtgagcagagattgcaccactgcactccagcctgggtgacagagcgagactccgtctcaaacaaacaaaaacctgtacaatggaaagagaatgaaacgttgtggcttctcaacagaaaacagaacttccacttgcccaaggtcggcaaaagcagcaaaactacaacaaaacaacgctccaacatccatcccaaagtcagaagtattattagaaactaaatcaggccacacggaacgatggcttatcactggagaaaaccagccagtgaaagggtcgcgggagaagcccggggacgaccctgggactggagggtttctcgcctctggaaaaggcagtgcccgcggggcaggccagagggagcgctccgaggagctttggggttgccagccttgacacgcgcacccctccgcccgggccggctcccctccgccctcagactcccaccatcctcctactattccacatgtcgggtgtatatggtgcggagagcccgggggaagttagaacacgcggcgggagaggcaggcccagggcggcctcagctaagcagcccggctttccggatccccgccgcgcacaggctcgggccgcctagggtgggacccgaactcgccttcccgccccgctcaaggaggtcatctttggaggtgcccctagaaggaccggcgggtttcccgcggggcgggggcgcgcagggcgggtgtttggaggctggggactcgcaggagaggccggtgggtgccgggcctcctgcagggggttgcaggccgaggggcgcgccacgaacccagcgggaatccctgcgcttcccggcaccgtcgggctgaaatcggggttcctagcgttggcggcctcgggctgggacctccccactcccggggctccgcagggcgcgcacgtggcgctcgggggtcaccgttgcagccgctttcccgaggaggcccggattgaaaacttctttaaaaaaaaaacttaaaaaaaaaattccgtcgccctgggcgcagccttaggtacctggtgccgctcgtggggtcccgacgcccctacccccgggtccggaggagcctgcgccgggccgggacccccagggcacaagaggccgggggacccctgcggtcgcgcgcgcgcgagggggcgggggcgggggggacacgagtttatttaaaaactcgtgtccggggagtttatttaaaactcggaagccggcggccgcgagccggttgtttatgtaaacccggaaacgccccggggggcgggggcggggcggggacggggggaggggcgggggtcacgttacgcggaggacgcgcgggcagcgccgggagaaccgaacccctggcggccgcgaccccggctcccgccccggccccggcccgacccgccatgacggggctggaggaccaggagttcgacttcgagttcctcttcgagtttaaccagcgcgacgagggcgccgccgcggccgccccaggtgggtcagtcccggagggcgcggggggcgcggggccaggtcgggg

SEQ ID NO: 20102 - DNA, 2300 bp, Homo sapien
tagaaagcaggcaagcgtgacctggagttcgggggcggagaagaataggaagcacagggcgccccaacaagggacgatcccagcacctggagaaggagcagagacgagagacagaaacaacacgaaccccaggtcaagtcggtgccgtgcgtgccaagtgtcctcagcgggtggaaagtgtcgctgtgtctttgatagtttacacaacagggagagagcgaaaagctggggttggaggaaacaggagagaagtaaggctgtgtggcggggacaagactcagacacacccctgactatctgtaaatgggccgatcggacacaaggccagggacctcctggccagccccgagccccgtgaggtgcctgtggcaggacgtgggtatggcaggtgacagaagccctgccgggtccactttccagcctccccggcttcccttctgcgttccgctggcctggccgccacctccagggacaacaagcctggcatggggtgcagatttagtctccagccctctgcgaaccaagcagtggtggatcgcagagctgcgtgcggggagagggggagacaggccagcgtctgggatgtcctcgtggggccggggactcagccccggcccctgggcacccagccatgtttgagaggcttccctccgcctgaccagaatcagagctgtgggtccatgaattgagtcacttcaaggtcttgctgcttcacatgaacagctgtgcagaggcagccagagacagcccggggctcctcacgcccagtgatgctgacgacggcctgcccgtgaggacatagaactttttctgtgcgtagtggtttttcatttgttttgattttgttttccaggaatgtggagttaaaaggcaataagagaatagtgtccagttgcagagtctaggtagggggtccacagtgtccgtgtttgcatccctgaggggtctgaggagggcagttcacgctggagcctcctctgtggcagcctctgctcagccgcaggaacctaaaggtcacgcacagcccacatcctgtgcgtctcaaagaagtcaagcctcaaaatgaaaaatgaggctgggcacggtggctcactttgggaggcctaggtgggtggatcacctgaggtcaggagttcaagaccagcctggtcaacatggtagaaccccatctctactaaaaatacaaaaattagctgggcgtggggctgggtgcagtggctcaggcctgtaatccctgtactttggaaggctgaggcgggtggatcacgaggccagaagatcgaaaccatcctgactaacatggtgaaaccccatctctactaaaaatacaaaaaattagccgggagtggtggcgggcgcctgtagtcccagccactcgggaggctgagacaggagaatggcgtgaacctgggaggcggagcttgcagagagctgagatcgcgccactgcactccagcctgggtgacagagcgagactccatctcaaaaaaaaaaaaaagattagctgggcgtggtggtgcatgcctataatcccagctacttggaaggctgaggcaggagaatcactcgaacctgggagatggaggttgcagtgagctgagacctcgccactgcactccagcctgggtgacaaagcgagactccatctcaaaaaaaaaaaagaaaaatgaatccagctttttttttttttttttttttttttaggatttctttgctttccagtcctttctactcccaagttttgtttcagaagtgcttgacccataaataaattccaacaatgaggtcgtctttgtttctcctgaatattgggctttcccctcagacttctcgagcatggccgagccacagaggttcagtttttaaacagtggttttctgtatcttgcattattttaaatgtagatttgaaaaaatgccacagagctccgtgtggctccttttctaatgtgatctccacgcattccgcatcgtggagaagggccgtgaggaggctccgctgggggcggactcgcggtggattacgcgtcagcgagggccgccccgtgccacgcgctcgcgcgctgagagcgtttgtggggcctgtgtcttccgaaacggaggcgctcggggcccgctgcggtgcccgcgggtctgtgccgctgaagtgggcacccctcctccagcctcgtgaggacagcggccgtccctcggcgcggggctggtctgccacgggcgcctccccgtgtcccctgggccgccgcacggcctctgccacggtcggccctttcagtccctcagaagcacttgggtttaaagtct

SEQ ID NO: 20103 - DNA, 2300 bp, Homo sapien
tgtgtgtctgtgtgtgtgggggggggggcgtctgctgatgtgtgtgtctgtgtgtgtggggggggcatccactgatgtgtatgtctgtgtgtgtgggggcgtctgctgatgtgtgtgttttgtgtgtgggaggttgtctgctgtgtgtggggagggggcatctgctgatatgtgtgtctgtgcatgtgtgggggggcgtctgctgatgtgtgtgttttgtgtgtggggagggggcgtccactgatgtgtgtgtctgttggggggggccgtctgctgatgtgtgttttgttttgtgtatggggagggggtgtccactgatgtttgtgtctgtgtgtgtgtgggggggtatctgctgatgcgttttgtgtgtgtgggggggggtgtccactgatgtgtgtgtctgggtgtagggggggtggcatctgctgatgtgtgtgttttgtgtgtagaggggtgcgtctactgatgtctgggtgtaggggctggcgcctgctgatgtgtgtgttttgtgtgtggtggggggtgtccactgatgtttgtgtctctgtgtgtgtgggggggggtgcgtccacggattgtgtctgggtggggggacgtctgctggtgtgtgtgttttgtgtgtgtgttgggggggtgcgtctactgatgtctgtgtgtggagggtatctgctgatgtgttttgtgtggggggggtgcgtccactgatgtgtgtgtctgtggggggtgtctgctgatgtgtgtgttttgcttgtgttaaaaggcgcacaccgcaggaaaggaaagtggcagtaaacacccccgcccccagccttccctcacctcagatacgccaagttccgggcactgagcaccctgcaggtgaaacagggaggaccagagagggaagggacgggggccagatttggaggagagaggacggactcctggggccaggagctggctgggcagggtgggaaccctcctgtcccagggtctgagtcgtcccccaggcaccagccagtaggcccatccagctttccatgactttcctagtaagtactgaaagaaaaaacacacatctaacactgtggcttgcccagcggggccccaggccgccatctgggaggatctgggggcaggtggctgttcagggcccagcagagccggctgagctcagaccccagtaagggtcagtcctgccctgtcagctctggggtccctggcagccattcccactctccgagccctccgtggtccctgtgaacagactgggtgactacagtacctgcctttgccgctcccggggctgttgcaaggagcaagcaggtgcacaaagggccaggcagggctgcataactgctggggaaatggtagtttgttcattccttaaaatgtaagatccttaattgctttcagaaaccgggcattcagaaatgcagaaaaatgttgcttccaagccaggcagcaagggggcaaaatatatcaaacagcgttcaggccctggcagctccgttctggccctcatcattcccagcatagagaaacaaaactcctgcgtgaaacttaagaggtgaactttgggtagctcactacagggtgaagtttaaatgtcaactttctttcaaaatgatgatcaaaaagaagaaactggttatgtgaaggtacgaatacttgactgagaaaggcgtctcgcctacggcttgtttacgcacagctagtgagagcttgcgtggccccagcaagggcacagataagattcacaggtgaggcagtgaaagccatgcctgcccttgtacttggtagtttttatatttaaaaatgtactgatttcctccttcactcaattccagatgtgtatagagaggtgggtatgagtgtgggtgtgtggatgtggcctcgagggaggctctcagcctgcagccaggattcaaaacgccacagtcgagttttaggaaaaaacaatagtttccacctgaggagtattttagagaaaaatctaatataagggaaaaaaaagccctccttattaaattaaattgtggtataacagctcaccacatcctgttgcggggacatctgacgttaggcaaagtaagtttcctctttcaggtctcccacacgccgtgagggtcacatgctacctgcaattcaaaatatgctaggaagggaaaaaaccctttgtgtctgtggaaaagctgaataagaagatggaaattatcagcagagagagctggtatgggaaaccgtaggtgtcatcggcaaccataccctacccaaggaagccgcccccggaatagcaagggcagggccgggcagctgtg

SEQ ID NO: 20104 - DNA, 2300 bp, Homo sapien
tcgcaatgggactgcgtgtgccgctggcccctggcattgcacattgcgggtttgtgccaggaggaccctgtgtggggactgttccacactttccacatttgcttctctggtagcaggtgagctccgggattccgtcagcgctacctccgcgggtcccctgaaatattcaaagagtatgaacaggttaaaagttttaacccctgaatagctgggatgtaaaaaatgaaatctggcaagtggttaaacgaaattacagacctaattgcttacacttaaaataatactaaagcaaatgtgagattgtgtttaacttggaggaccagcaccgtcggcaacgtggttctgttctaatttttcaccagggagggctctacattccaggctgttatgaaatgaagtcctcagtgtctgtgaagttcaagtgttttaaatggagcagaggcctctccagggattgcccaccccatttccacctcagtcctgttgggaaaccatccctgctgccataagcagagagcaagagctcccaccttctgatgcagcggctagataccaggagggccacggaagctgggaccctgagagactccgaaccacagatccaactgggggatgccaggcactgacagaaccacggggccctaaaaggcggaaaccgtgactccacaggactcctctcttctgcaacctgctccaaggctgcccctgtgcagagctcaactatgcagctgtggccctgacccctctgccaggctgcccgcaccactccaggggacacggtttccactgtgggcagctggtgcagtgtgaccgtggtgcaggtggggcctctgggcagaggacatcttggtaaactgggctgcagcagggcccaaaggtcgggattgaggggaggccctgccaggtgacctctgcaaggacctggggaactgcacgcaaaatcgcagagagagaaggatgtggttcttaaccagcttccaccctgtcttgcagcctctgtgtttacttcccagttgatctttaatttcagttgccaaagcagctgtttgcaccgtgcagatgagtcccaggggcctcagacccgcccagccgcccgcccaaggcgagaattggggctgcggctgggctgggcagacggggttggggggcacagctcacagggccccccacattccgcgctgccaagtcttctttttccagtagtcccaagctaacttgaagaaagaaaaatatgagggagggaaagagagaaagagaggtgaaaaaatatggtcataaatctgggacctgtttttattggtgcttctatttcagatttccagtttggaaaaatacttttttatgcatctcaggcaccttggtgatggtggagtgatgatgataaatgcaaaaagtttttaaaagtcctttttgtgcccaggagaacaaagtctggtacagtgcggccacctcagggcctctgtcatccttagactaaagagggttggcttgtccaatttaactttgccccatgcctccgtgctagtgtgactgggccaggatgccctcggtgccctgagaccctgtccatgcctggctgcgcctcccaggtttgtcttagggagcagaggttggccaggcgccctgtgggaggctcagcagggaaagcgcctcttgttggggaatagctcgggggaagcgctttcagatgaactgcagggaacaggtgaagagtgtggacaccggagcatggggcggtgagaagacacaatacgaggcctgccgtccgaacgcggaccctgcagcccctgcggcgggaagccgtgaacacaaggctgagtttgcgcctctgatttgcgccacgtgatgggacttgccggggcctccctgcccgtgaagaggctgtttttgctttgagtctgcgtgcacggtgggtctgctgcgcctgcataggtgggtttaattggctccagctgcactggcggcgcctctcctccactaggatgtggcgcatggagttatgggtggagccctttgaagcagctgcaagtcattctgtcgtataaactgaaataagaagagggtgaaaaatccaagcccgtgactctgcccgctccacagctgtgctcacacagctccgcgagacggccgcccaaacaaagctacctccgtgggccttggccggctgacaagaggaagagaaggagattactctaagctccaggtattctggtgagctggaagctggccgggagggccaggcgccagtgacacctccagccagcaggcccatgtggaggccccatcccgagagcgtgccc

SEQ ID NO: 20105 - DNA, 2300 bp, Homo sapien
catgctgagtagtctgtccttacagtgtgaaccaggggttcatgggaattcttcaccatccagtagtctgtaaatgttgcccatgctgagtagtgtgtccttacagtgtgaaccaggggttcatgggaattcttcaccatccagtggtctgtaaatgttgcccatgctttagttttgttacctggttgctctgtttttatgggattgtgagaaactgaaaaactgtgactgctggagccattttcccacaatccccattttttaaaaatcccataaaggctctctcgtgagcaccgcacgttttcccttgtagtcacgagggtaggggctggagaaagcagcagagatagtcaaaaacccacagctacaaaaaatgcactcctaagagcaagtaatggcgagggctaaaaggcactgtgccccttctgggccattctaattaccacatttaaatggttttgagaaaagagaatttttatctgaggaacgcgagttcttttaattatcaggccgagagagacattcaaatgaggcgacaatcgcgccctactaccccttgacctgtgttcacctctttaaactgctactggtggcaacagcgccacaaacagctataaattaacctaatgacgccacaatggacactatacccacactcaatagctgaacaacatatagtcagtcactaatcaatgttatttctgtaaaccagtgagaattcctcacaaacaagttcctattagtccactccctggcccccttttttgcctttaaaatccactgttaactgctaatcggagtacacattcagggcgccttgaatttgtgctcaagtgtggcccaaataaactctctacttagagaaactgtgtctccgctcgttttcaggccgacagtttccaaaatgttagtattcagcctaacatgagaaaagtcaccatataaaagtgaggggggaaaagcaaatacaggataatctcaattgtatataaaatttatatacgtaaggacaaagatacatagtaaaaaaaaaattctggcaggtattaaggctgaaaaaattaaaacagtccagagcggtctggctcaggccagcctgggcctgccgagtagctgggacctcagccaccgcgcctggctaagtattaatgaatctgttttagagatagggtcttgctacgttgcgcaggctggtctccaactcccaggctcaggtgatccgcccgccacagcctcccgaagtgctgagcctcccaaagtgctgagactacaggcctggccgcccgcccgccagcttaattcacgtaaattccagacaaacgtagaaagtggctcctttagtaagccacttgcggctgctgctcatcagggttcgcctggggccactgagaccacgcgccggtgcccgccctcccgctgcggtccgattttctgaaccaaccaggcgcttccgggcgccttgccccagacgggcccaccgcctgcgcgggccgagggcggcgcacctgcccctgcgcttccgcatcgaaggtgaggtcggaggaagagaagaccgcaacccccaagctcccgcggcgtggggtccggggggggacacgaggcggggccaccaggacgccgacagcctcacgtctctgggcccgcggcgcgcaaggcatgccgggacccgtagtcccgcgacgttgcgactcacagtgcgcgatgggagtggaggagagcggctcgcggtgcatgccggaactcgtagtctcgggatgctgggtctcagcgcgtgatggggtaatggcacgcaggcctgcgttgaacgctgggactcgtagtcccgccatgctctgtccgcggtgcacgccgggatacgtagttccgagcgcgccaagaccgtcactgggactgggcgacagcggcccgcgttgcatgccgctgctccacggtgccggcgctccgaggaaaagtaggtagggctcaggaacgcagttcttcacggccggcacgcagggttggtcccaggacggagccggctccggccccgcgcggcgctcgtatttacacgcgcacgtacgcacgtacgcggcgcccttgcgtgacgtcacgcgccctccaggaagtcggcgcgggctaggcgacgggtggaagccggtaccgagaggaactacagcgtcgccgcctgggttgtgtcgccgcggtaggcgctgcgctctgagcgcagcgcaggccccgtaccgaccgcccgcccgccctctgtccgcgatggaggtgccggccgcgggtcgcgttcctgccgagggcgccccgacggcggc

SEQ ID NO: 20106 - DNA, 2300 bp, Homo sapien
tctgtggctttctctaaggcaaggatttacctgccgcccatggactggaggcagagagatgagcctcctggaaccagagggacacctggtgccacacagacgctccatctgaggagaaatgatatcacatcagtgtctcaaagggccctgtgaggtaccccaagatctcaaacagcacctccctgtaaacactactgactgctgggaacccgtcatcaagctcatgacctggctggctgactgactgatgcactgggttggttttattcactagactgactgaacatggaatttcaatactaacttgccacataaccaagttactcacctgtctaggccaaagcagccctttctgtacaatcagaggaacagaatgaaacctcagtagggatcttccatcctggggttttctgtccagggaatacaccagcattgggatctgcctccacaatcctcccaggtacggccagtgcccactgaggaagccgtgaaggcattttctgggaggcaaggccctgaacctcccagccccacccaccagcacgcagggggcaggagtgagtgcccgtgccgagggtcaaggacccaggctctgtctccaaaggaagcggagccaggacgttctggggctgtgacgggaagactcctgtcccagtcctcactcttgcggaaccagatgcagagaagatcctcaacaaacacagggtcagggcaagccaaagggacgaggagccgcggctgccgaggagggaagagagtggcatccccagaaggagcggcacctttcccagagggagctcacgcccggcccactgcgggctggagtgtccacctctccctggagtttctgttctcacaatcaaaactaccagagccaggcgcacacgcgtgtccacttgcccgcccatcccagaacacaagggtagattcaaacatggctggacacttcggtgctacggaaacatatccccttctggggtcagagcacagctactgagagctgtggagtctgtcacaacgcccacgtcaccctgaagcagcctgcgacaatgcccactgtggtcaaccacggggctactgccttcgctgcaggcctgggttccgcccgttccttagccacgaaacagaactgcaccaggttttacaactgcgtttcacaaagtttacaaaaatttaaagatgtgcacacacccaacagtttatatttcaataacaggtctggagcctgcctgatgactcttgtgctcacagccacccatgagttttcctaagtcacaaaggtggagctaaaggaaggggcggggactatcactgcagaaagaaagaaacaaacatagcttttccaaacagtaacttcgtgtcgctacgcaggaccctttccttttatctcaaaatgctccccgttggtaaaaccacaggtggtgactatccagttttaggggagaagcgcagtgcctgcgtcccgctttatcgctccctcaccaggggcgcccctgcccaccgcggacgcagcagcccgggggtcctccaggatccctccccggagccgcccgccctcggccccgcccggctcagcacactcaccctggggcgaccacctggcccggctgcgcgcacagctcccgcaccacgcccgcgcgctccgacctcagcctgcgttccggccgcgcggggcgcacgcagcccccggaggctacacgggactgagaggccccggaggactgcgcggaggcggcggcctcgaacacggccagcaccgagccgatgcgcacggccgcgcccgccgccaccctccactccagcaggcgcagcggcgcgggccccgggcagcgcacctcggccacagccgccgtcggggcgccctcggcaggaacgcgacccgcggccggcacctccatcgcggacagagggcgggcgggcggtcggtacggggcctgcgctgcgctcagagcgcagcgcctaccgcggcgacacaacccaggcggcgacgctgtagttcctctcggtaccggcttccacccgtcgcctagcccgcgccgacttcctggagggcgcgtgacgtcacgcaagggcgccgcgtacgtgcgtacgtgcgcgtgtaaatacgagcgccgcgcggggccggagccggctccgtcctgggaccaaccctgcgtgccggccgtgaagaactgcgttcctgagccctacctacttttcctcggagcgccggcaccgtggagcagcggcatgcaacgcgggccgctgtcgcccagtcccagtgacggtcttggcgcgctcggaactacgtatcccggcgt

SEQ ID NO: 20107 - DNA, 2300 bp, Homo sapien
tcagaatacttagaaagttcctttctaacctgtactcccactgtctcccaggtgcctgagccctggtgcttgtgcagggcccccaatccaggctctgccccatcccaatagccctgtcctgccctgaaactgcccttgagctgggcttttgtgtctgtggaggcggggactgtcatcctctctgcctcgtctctgttagacagcacaattcgatgtcagcccgccacctgacgttgtgtatctgtcatcctctctgcctcatctctgtcagacggcactgattcgatgtcagcccgccacctgacgttgtgtatctgtttgcttaaccaaccctggcatatgtgatcattctagtcccttgacctccaaattttcattcctatgcgaagacctggcatcgagatttgtggttggagaggcaggaggcaggcgtgtgtccccacagtagccagctgtgaaggatttggcccttttgcctctgagtatccagggaatggccagggctcctggggaactcagcgactggactttcgggcccagaacccaggagggcaggcgtagggacgggatggcatcagggaggtggcagtcgaaaggacccgagtgggcagaggaatgtgaatagccccaccccacgcacaagctcagcagctctgcggggccactggtttagcggcagttcttgacatcagcgtcagcatctgaggttgataattttcttaggagcttgcttgtgttaatcctactaataatttacaaaatcctaagtcacttgactattatgcccatatttttgccttttgccatttcttcctttccatcagctccagagccccttcctgtcagctcctctgagcctttttgacagggcaggccgctccccgcccctccgcaaagactttttaatattcttttatatgctttgacgtttcttgcccactgtattcgaggagtttccccatttccacccggaagtccgtccttgctgatgtaacaccatgtcaggtgtggcttgttttcccgaggagcctggtggccacagcctcagcttcagccacttcctggttctcggtggccagtccccacagactgtgagacctatgcttgctaatgttaactaagaagagaatctgaaagtatttacttcagaaacctcctttttgctagttagcgccagagtgagtagattaatcagggcaaaagagaatgagaggtgctgttagtgtgttacagggaaaagtcacccgaaggcagaatgataggatcgaatggggacatgcccaggataggccccagtggtgggtactgtggtttgcatggaggtagctggaggtccgcttagaaattctgcatcagcactgggtctggtttttgtttttttgtttttgagacggtctggctcggtcgcccaggcttaagtgcagtagtgtggtctcagctcaccacagtcttgacttcctgggctcaagctatcctcccacttcagccttctgagtagccgggactacgggcgcacacccccacacctgtctaacttttgtatgttttgtagagacagggtcttcctatgttgcccaggctggtgtcagactcctaggctcaagagaccctcctgccaagacctcccgaagtgctggaattgcaggcattagccacacagcgcctagcctggtctgtttacagagtcagcaaattctggcctttaggctacccagccttgtttgtacatgaagttttattgaaacatggtcacgcccacacggtcagagttgggtttcgtccccgtggcccgtaatgcctaaaatagtgactctggcgctttaagaaacagtttgggaactcctgcctgaaggagaatcggaaacagcactgaagatgttactgaggtttaaatgcgacccaaacagaaagggcttcggggcggttggtgtccgtctgattaacctgctgtctgctggttacatgtggattagaatcttaaactgttacgcttggcaagatgaatgactacaacttttcattattattttttgtaaattatgcattttcacttgtagaaatctctttccttgtggagactcaatggtttgcattattgatgatcgagaagatgtctggaagtttgcccccaatctgataactgtgaagaaatatgtatacttccagggcacgggtgatatgaatgcgccccctgggtcccgagaatctcagacgagaaagaaaggtgggtaacctccttcctgattctctagaagaattcacatttgcttattgtttagctcttcttatttcttatctct

SEQ ID NO: 20108 - DNA, 2300 bp, Homo sapien
gcctctgcagctgcgttacctcgttcctgcctgttctgctgggccccaaagccggcgtccgctgcctctccagctgcgttacctcgtttctgcgtgttctgctgggccccaaagctggcgtccgctgcctctccagctgcgttacctcgtttcagcctgttctgcttctcatgctcaggatgctttcccgaccttgctctgtgtctcttcttgtttcccgtcctctctcttgaagccgtcccacctcactccagcgcagagctggggagagttttattctgtgatccagggtcgtgcaaggaggttggtagaaacatttcatttccgtgcattgacaggataccgtagcatctgctgttatctgtatttgctctttggtagaaattccaacacttaggtatgaattcacttgtgttttttctctttacatacttttaaattttccttaagattaaaaaaaattatgttagcatgttttaagtgaagtaaatacaaacgaccctcaactttacaatagttcgcttaacaattttctaactttacaatgatgtgcaagtgacgtgtgtttggtagaaaccacactttgaattagaagtcttggctcagaattctgtagaacagcttgttccaagtcggccttgtgctggacgactttgccagcgatggggtaatgtctgagcgtggaaggcggctgggccgggtgtgctgacacgttttcagcctgtgatgggctcatctggacgtgaccccatcctgagtcaaggagcctctgtaatgaagaaaactgtttttcagaaagcgcagtcaccttttttgtaaaaacaagcccaggaaaggtaggtgtcgttcccacatcagtgtgtttacacgagtcaggcagaaagagggagaggagatcggaggagcatgatgtaggcgaggtcaggttttaatgtgaatgtgtgcccacgtttctggcttggctgtgcaaaacgtacctccagatcttccagatagcagcacgggggcacgtgccgggctgccctgcctcaccagcgttggcacggacgtctgaggccctcccaggtggggcgccacactagcgagggtccctcgggtccgtgggctgccgtgctggccggcccgcctgcccttggctgtcaagtgtaaaataacagattttaacagtgccttgtttttctctcttgacaaggtatgatgccgtgttaaaggccctaagtatttcagaatagaatttagtagaattattcccgtaggagatttgccatcgaaacagtaaattcagtgatgtaagcattctggtgaagtgtgaatattagtaaccttgtcgagtaaccagatgctcttattaaataccattccatgccagcgtccctgggaacatgttacttttagagatcattataatgacctgatgataaagccgctgccttagctaattaaccattggttaaaatgtttctgccttttaatgattcaggccagggcacatgtgctgtgactagctggacacgtggcgatgagtttgaaattgcagagtggacggggtggatgcgtcggcctccatgtgggctcgggggctgagctgtgatttctgatcgaagcggcttcacaccgagtctctgtgactctggactcggcctcgactgctccgaaccgcgcctgtctcgggagttgtgctccgtcctctgtggccgtttctcgtacctgctgcgggggtggggttaggtcggcgtcggtgagtgcccctcaaggccccagccaggtgtgcacccccagatccctcctgggaaacagcctgcgctgggggactgtggtcaggccgccccgcctcacctgcctgtctcagggaccacggggctgtgccgtcgcacacagacgccctcaacgtcggagagctgtgagcggggccgtgctcttgggatgggagcccccgggagagctgcccgccaacaccactccgacgtgatccatgctggacataaagtgctcttccctccgctagtcatcggccgagcgggcccctcgctcctgggtgtaagttctttctgtgcgtccttctcccatctccgtgcagttcaggagaggaggggagaacttgagttcacctcccggcactgggctcagcctctcccgccgccacatcgaggcactgacggtacccacctcccgcctgctgaggttcggggaggctgaggtttggatgcggtactcccatcacctgctcacttgcctgccgcctctgttgccactcccgtccgcgtcacacgtgtcaggcgtggggccggctgagctcaccc

SEQ ID NO: 20109 - DNA, 2300 bp, Homo sapien
tgtgccgggtctttgtctttagacagtttgtggtgtgtcagtgtggatgtctttgaatttatcttacttggagtttgttgagtttcttagatgtgtagattaatgtttttcatcgaatttggagggtttttaaaccatatttcttcaaatattctttcttccctgttccctctttcctttcaggactctcactatgcaaaagctggtacatgtgatggtcccacaggtctcttaggctctgttccgttttcttcacttgttttctttctgctcctcagataggatagcatgaaatgatgtatctccagtttctctgcttatttcttcagcgtgttcatagctgctgctgagaccctctaatgagcttttcatttcagctattacactttcaacaccagaatttctatcacttttttttaatataacttctgtctctttattgatattctgtatttggtgagacatcattctcacaaattcctctagctctttgaagatattaaataagcttatgtgaaatcttttctggtgagtccaatatctgtgtttcttcagtgatattctgttttagttcctttttcctgtctatgagctacactcttgtattctttgtatgccttgtaattttttgttgaaaatgaaatttttaataagtggcagttctggaaatcagactctcccctctccccaggagtttttgtagctactgtggtttgttgagtaacttttgtgaactaattttgtaaagtccatattctttgtctgatgtggccactgatgtctgttccaatagcttagagggcagcaagtggtgggacatatagattcttaaacgtctggaatgaaaactgaaacttgtttttgcagatgggctctgcgtgtcttggagcaaccttcagcactcatccaggctggtcaagcctctgtcttatcacctcctgctcgcagaatctgaaggtcagcccgaggaggcacttcagggacttctcgggtttttcccggcatgtgcgcagccgaggcgtgtgcgtggcattccagattcccgggaactcttagaactttatcaggccttcatttcctaaatcatctcattccccagcctttcgtccccagctttttgtttagcctgtggcggcaaccataatccattgcctcaggcagcaatggctgaaacactttcctatcaatgtttttgacacacactccccaagtggctgcctttgcacagacggagttccaagacaccggagatgaaggcaggagtttgagccagtcttccacggagtcaaagtaattacgattcctagtcaaagagtcctgtagcttctccttccagtgctggtaccgggaatgcaggctgttgctgtccccgcagagctggggagcgacaaagcttattattgtgacgaagactcagctgttctttcttagtgccccacggttggtgcaagcttttggttagtttccagagttccaaaaaagttgactcttgacagttttcaccaggttttccattgtgttaaggtagggatggacttttggagctccttattctgcagtttctccgcctcacagaatgctgagtagggccaggaatgccgttttccagcaggtcccctggctgattctgacgtggctggtccgcgggacacaccgtgagaaactaagctaggactgcgtctctccctccagacatcacggcgtcctcaccggtcggtggggtccgccctgaaacatctggctctttggagtttgcgtcgatttgtgaaagctccgttcgaccccgtgttccaagtcccctagtgtaagaacccggctgttcccttggtgataactcaaggcgggtcaccacctggcggggtccgctggacgcttgagggtcccccatgcggaccaggtgcagaggtcgggcctgcggaggagtgggaagtgggcgggcggaggggtctccgagctcacctccgagggttcggtgccggcccggcccctggatccccgcgggcggacgcgctcccccagctcagccctcgcgaccctaacgcggtccgttccttttgcaggagccgggcaggagcccctcggtccggtccggccctgcgcatggagccatggccctgctccccgggcggcggcggcgggacccgcgcccggcacgtcatcatcaacgtgggcggctgccgcgtgcgcctggcatgggccgcgctggcgcgatgccccctcgcgcgcctggagcgcctgcgcgcctgccgcggccacgacgacctgctgcgcgtgtgtgacgactacgacgtgagccgcga

SEQ ID NO: 20110 - DNA, 2300 bp, Homo sapien
agtatttgcaggtttggcgtgtgggcagaggtgtgagggccgggggttgtgtgtaggttcagttgcccgtgagaggtaaaggtaggagggcttgtcgtaggtgtggggtggtggtagggggtgagatgtaggtgcaggccagggttataggtgtgggttgcagttacaggtgtgtggcgtaggtgtgggtgtgggacataggcacagatgtgaagtgtaggtgtgggctggggtgtggggtatggagttccggtgtgggctgtaggtagaggtgtggggcatgggtcaggtgtggggtgctggcatggtgtgaggtaggtacaggttggggtgtggtgtggggtgcaggtggggattgggctgccctggttggtgtgattacagtgaatcaagaccaggggggttgctggggtttctcgggcgagggtgcatggaggcccgagagggtgtccatggctggaacaggctccctcactgttgggttgggcagtggcagccctgagggcttcggtgtggagcccaaaaggcagggatgctcccagagagaaagtgggtctcagggcgggcgtcgtatgtaggctccccggctggacgtgggccttgtccggcggagtgtggcgtccccagccaccccacagctggagatcctgtgggcagtgcccgcgtgccgagcttgcgacctggagatctgtgggaggtgcctgggtgccaggcctgtgccctccagagcatcaccacagcctcgtggtgagggtctagcggatccggaccccacatgccggcctcctggcccctcacaaggagctggccgtgtgtgacctcacaggggccccaggcttggcaggagctgttgctctcgattccagggtagcaggttttgctgttcagcgcaggcatgttgttcaaggtctcagcccaggggctgccccgtcagctggggggacgtgggaatcctcttcaaacccgagtttccagatgctggccgaggcggccctgcaggcaggcctgtcttaggccctgaggtctgctcttctcacacacggggaaggctccagaaacgcctgtggaaggggggtctgtgtgtggaagaaacacattggacgtgcttttcctgttctcactcacttcaccacaagcagcacacacacttccatgtgcaggcgtctccccagcaccgagcaggcagtcggtcctgcggcgggcaccgccggttgtcctgacccagagacagcgccagatgccacccacacttagacacccatcgcaaatctgggcctctggaacttctgggccatgttagggttccatgacccctccttgggctctgtcagcttgctggagcggctcacagagctctgggaaacacggttgctgatattttacaaagagcattttaaaggacagacataaaccgccgagtgaggggatacacagagggagctgtggaggggtccccaggcaggagctcggtctcgtggagtggggctgccgccctcacggcacacagatgagctcctgttcactctcctgccggctcccgcaaattcagctctccccggagcctcccaaagcctgtctacttgggagacctcattggataggcgtgatggacaatggtgttgaaatgtgattggacctaagggtgcgacgtgaacccagcagggtctgttgagattcttctgtcctctgtgcaggctccttcctccaggatgtcggcaggaccctctctggaatgagggttagagtcctgcctgggcaggtgaacagagggcaaaaggtcagagagattctgttttctgaggcctaaagcaccccaacgtcatgacaagagctacagaagcactgtgggtacgggagcaccacgggtacgggagcaccacgggtacgggagcaccacgggtacgggagcactgcggctatgagagcaccacgggtacgggagtgccgcaggtacaagagcgccgcgggtacgggagcaccgtgggtatgggagggtacgggagcactgcgggtacgagagcgccgcgggtacgggagcaccgtgggtatgggagggtacgggagcactgcgggtatgagagcaccgtgggtacgggagcgctgtgggtatgggagcgccatgggtacgggagcaccgtgggtatgggagggtacgggagcactgcggctatgagagcaccgcgggtacagaagcactgtgggagttagcaccctggaaccgtggatgaaaacccgtgtgtgtgggatgcggatacacttacacacatgtaaaatagtattgggggtgctgtgtgggcgag

SEQ ID NO: 20111 - DNA, 2300 bp, Homo sapien
gtcttgccttgtgtgtttctcagaggcttcctcgggaagcatccagtgaggcaaggggacggtggtggcccctgctgacctgggtgatattcctggaggtacagcttgtgtgcctgcctgcctggcccctgtccaccctgggccatggctgctgacctgggtgagatgcagcttgtctgcttgcctgtctggccccctgtctgccccaggcccaggctactgttttctctgcccttccctctgctccctgagtctctgtgacctcaggcagctgctccctctgctgaaaagctcccaggagacagggaagggccttggtctctgaagccagcacagagggaatcagcatggccaccctctgaggactgcatcctggctccctgtcctcccaggagaacgtctgtggctttttcctggttgctgtgggagcctcacctgcaagtggaaccttcttacctgctgggctggctcacctgctgagggggctatagggttccccttgttcctgctctgagttgataaggcagtgctgagggggctatggggttccccctgttcctgttctgttgataagggggtgctgagggggctgtggggttccccctgcttctgctctgtgttgataagggggtgctgagggggctgtggggttccccctgcttctgctctgagtcgataaggggttgctgagggggctgcggggttcccccttcttctgcttcgtgttaaggggatgctgcatgggagctggagagaggtgggggctgtggtggttgttgctaggtcttccagtttttcagaagttgggaaatgaggctgttatgtaggatctcctgactttgacatgttggtgaccagttcaagttttgaaaattcccttcaggccaaactgcaggctgattgagattcccgcgctggaacagtcaggggttggggctttctatgagtgcgtgccacacacagcccagccttggaggtggtggctctgcaggcatgtgtcccagctctgtggtggctctggggaggcagagaccgcagggaggcagagactgccagtcattggcctgtggttctgccctgcagaggctcctagctgagctgaagagatgctcaaccctggtcaaaagtcagcaagaaggcctgggagcctgcagctagaggagctcggggccagggaggcgtgggggcgggggtggtgcagagccttggctgtcttctcttctgtgggagtgtgtgtgcatgtggaaatttcgcatctggcccacctgctgctctgcacactatccccgccttccccaggcaggaagcagggctgctgtgagctagaaactgggctttttgcctggtggcaacccggaggctgcagggagggcctggggcacctgggctgagctgtgggaggggactcagggccactagacccgggtaccagtgcctgggccactggttctggggagcgccaaatgtgccgaagggttctgagtcaggctgtatgggggtcttacggcccctccccggagccctaccccacctggagtctgggagatgggcaacaggtgcctggtcactgtggtgtttgccaactcctgggctccttccccgggatgccgcttggggcctgggagagggggagtgggtgggcagtctttcctgctgcaggttcaggactgggtgaggcggcgtgggtgggcctcccttctgacccgggtctctcccgctgcaggttcgggattgggagaggcggcatgggcgggcctccctcccgacacaggatctttcctgctgcaagttcgggaccaggagaggcggcatgggtgggcctccctcctgacacaggatctttcctgctgcaggtttgggaccaggagaggcggcatgggtgggcctccctcctgacccaggtgtctcccgctgcaggttcgggactgggagaggcgatgtgggtgggcctgacacagggtctctccggctgcaggttcaggactgggaggggcggcgtgggtgggcctccctcctgacccgggtctctcccgctgcaggttcgggactgggagaagtggcatgggtggacctccctcctgacacagtgtctctcccgcaggtttggaaggcgctttgagtccccgctgctgtggcagagcgccatcatgatcctgaccatgctgctgatgctgaagctgtgcaccgaggtccgtgtggccaacgagctcaacgccaggcgccgctcctttacaggttggtggccggcgcttcggaataaagtcgcagggaatcagggcgtaggtgactctggtgaaaca

SEQ ID NO: 20112 - DNA, 2300 bp, Homo sapien
agttcatggccagcacagactgttatcactaaaggaagaaaaagttaagttgagaagtaaatgtggcatctattttaattagcttttaaaattactaatgctgctggattctgtttcgttttcattttgttccttgtgcatcttttgtggaacactgtgctttttgaaattttgtgtttttctttgtcttcaccctaaaattagtttactatctccccgggcaccctgtcacttcattttaaaaggcctcattctttactgtgcatatcgagtttctctagatttgatttttgatgtgtggattatggggaagctcaaaccttgattcacccgcctcctcctccgtctcgtcattcattgcttctgttaaacatttaaaaaaatgcaggtggcctttcacacagagtggccaaaatggctcacgtgcagcctcattgctggaggtgaacgtggtgtgaagtggcctccgtgtgtcccaggggactggcctattttagatgcttgcccagcgtcacctcctcagcctcaggtctctgtgggtgggttgaccggcacccaggccgcttggtagccagtggagaacggccctggaagtgactgtgagcttggctgtatcctccagccttgggggttgcgatcgtgctttatagtgcagaggctgaggcctggagggggccggtgtgggggctggagccagcctgtgggcagagtgcccgtgccccctgcactcctgctcctgcagtgtccctgcacctccggcctgtgcctcaggcccagaaaaccctgttcaagctgcctctttgctgctggccgtcctctatccccgggcccatcaccctcccttcttctgtttgcctcttagtcttgccttgtgtgtttctcagaggcttcctcgggaagcatccagtgaggcaaggggacggtggtggcccctgctgacctgggtgatattcctggaggtacagcttgtgtgcctgcctgcctggcccctgtccaccctgggccatggctgctgacctgggtgagatgcagcttgtctgcttgcctgtctggccccctgtctgccccaggcccaggctactgttttctctgcccttccctctgctccctgagtctctgtgacctcaggcagctgctccctctgctgaaaagctcccaggagacagggaagggccttggtctctgaagccagcacagagggaatcagcatggccaccctctgaggactgcatcctggctccctgtcctcccaggagaacgtctgtggctttttcctggttgctgtgggagcctcacctgcaagtggaaccttcttacctgctgggctggctcacctgctgagggggctatagggttccccttgttcctgctctgagttgataaggcagtgctgagggggctatggggttccccctgttcctgttctgttgataagggggtgctgagggggctgtggggttccccctgcttctgctctgtgttgataagggggtgctgagggggctgtggggttccccctgcttctgctctgagtcgataaggggttgctgagggggctgcggggttcccccttcttctgcttcgtgttaaggggatgctgcatgggagctggagagaggtgggggctgtggtggttgttgctaggtcttccagtttttcagaagttgggaaatgaggctgttatgtaggatctcctgactttgacatgttggtgaccagttcaagttttgaaaattcccttcaggccaaactgcaggctgattgagattcccgcgctggaacagtcaggggttggggctttctatgagtgcgtgccacacacagcccagccttggaggtggtggctctgcaggcatgtgtcccagctctgtggtggctctggggaggcagagaccgcagggaggcagagactgccagtcattggcctgtggttctgccctgcagaggctcctagctgagctgaagagatgctcaaccctggtcaaaagtcagcaagaaggcctgggagcctgcagctagaggagctcggggccagggaggcgtgggggcgggggtggtgcagagccttggctgtcttctcttctgtgggagtgtgtgtgcatgtggaaatttcgcatctggcccacctgctgctctgcacactatccccgccttccccaggcaggaagcagggctgctgtgagctagaaactgggctttttgcctggtggcaacccggaggctgcagggagggcctggggcacctgggctgagctgtgggaggggactcagggccactagacccgggtaccagtgcctgg

SEQ ID NO: 20113 - DNA, 2300 bp, Homo sapien
agggggcagggggcagggggccgggatcgtggagaagaggccgcggctggcggggaagcaaccctcagcgtggacccctcaacctcgcggctcgccccttacccgtgcacccctcgcctcacacccccgcgcccctcacccacgcgtccctcaccctacacacacccgcccatcactcgcgcacccttcacccctcacccacgctcccctcacccttcaccggcgcgcccctcacccctcacccctcacccaggcgcccctcacccttcactcgcgcatcactcacccctcacccctcacccacgctcccctcacccctcacccctcacccgcgctcccctcacccctcacccgcgcgcccctcacccctcacccgcgctcccctcacacttcacccgcgctcccctcactcttcacccgcgcgcccctcatccacgcgcccctcgccctcagtcctcacccgcgcgggccaagagggtcccgggcgagggcagctccccgcgggcgggtgtggggctcggagttggcttggcacgcgaggccggcagcagggcccgggcttcacgcacgcctggcccccgagtctgtcttgaggctcaggagctgccttttctgcaaataggcgcccaacggttcagcccggagaactacacggggatggggagaggccgccccgcgtttctgcagcgacagcgaccgtggccgcaaccacgataatgacaatggccacggtgacggccgcgcgtccagccggccccccggcgacggccccggcgcatctgctcgtggggcacttgcatcggagcggagacccgcggggggcgctccgtttcccgagaccccggccgcctctgggcgctgcaaactccgagccgggtccccgggtctcctgggtcaggacagagctggacgagactcgtccccgggtggcccgcattcaggacacgcgtgagaggggcgtccggaccccgcgcccccggccctccaggacgacgccctccgcttggatggccgcgcgccgggacagctggagacgggttaacgtgggcgccaggcctgagggaccggccccgcccggctggtatttcccgaccgggcgggaggagccacgcgcccccaccgccccgacagccccggctcccggccccgcctgcgcccgccctgcccagcgcgctctaggacaccgcggcgcctccgcgcagctccggcgtgggcggggcccggcattgtgacgtcacggggcggggtttcccggcgcctgagcggactgacgccgagacgcgcgcgggtcagcggcgcggggacgcggggcgctgggcgcggggctgggggcgcaggtaaggagcgcgggggcggcgcggggtcctcggggggcggcctagggcggccgaggacgcagggccggggcagttggtcgcggccttcagtcccctggcttggtcctgtggggtccccggcccggcacctcctcccgcgagccgtgcgcccccatcctgggcctgcgcccccttcccccgagccgtgcgcccccatgctaggccctgtgaccctcccccgaacagtgcgccccgatcctgggccctgcgccccctcccccaccccatcccggggcgcgcgtggacccccgccggctaagcgcacccgggcggtgaccccaggggcttcgcccgtcctcgaccccggcgctgggacccctccccagccccctccgggagcgtctcgggacccccagacacccccccgtcccaggcaggggccgctcctcgcgcgccccgggccccggtcgcccccgctctgcctcgggtcctgcggctggcgcgggtcgggtcgggtccgtgcgcgccgccccagcctccctgggcggaactcgagcagctccccgctccccgcaggccccgaggccgcaggagcgcgcggagcggcgatgagcaggcggccggtggcccgcggggcgcggagcccgtgacagcctcggccaggcgggcgctgcgatggaggccgagggcctggactggctcctggtgccactgcaccagctggtgtcctggggcgcggccgcggccatggtcttcggaggggtggtgccctacgtcccgcagtatcgggacattcgcaggacgcagaacgccgacggcttctccacctacgtgtgcctggtgctgctggtggccaacattttgcggatactcttctggtaagttgggggcttgctttcctgggctgcacccggagaagagggtttctcctttggggtttctggttgaggccgggggagcagcagggtccacacctccctgctg

SEQ ID NO: 20114 - DNA, 2300 bp, Homo sapien
tccaggacaatctctctatctcaagatccttaatgacattagaaaaaaaaattgttttcccatacgaggtaatatttacaggttgcctggattaggacttgatggctttataagggccattttccagctgtgcatggcttggtcggcttctcttgtttgcaggaagctatgtgacaagcgcagcacctgcaatgagctgtgattggctgatgtagactgggggtgggggctcggacccccggcaggtggtgttcgaaaaggtacaaactcactctgcagtcatcaactcacctttcggggtgcctctgaggcgtgaggcctgtggggtgacgtccgagcatgccagatttcgtccactgagccgggctcctggaggccccgtgcacagatgcagctctaggccccaggctgcgggcacaatttgccccatgcctccacagcctctggatttaagataaccgaggatagcgtctgggaccccagtgctcccgtgagggtcaaggaggtccggagcttactccaacctccagggcagagaggacagatgatcccaaaggctgctgggctcaggctagggcgcggctgagcaggggcagctgctttttctctcccaggcttcctgctgtgccttttactcacctctacgttcctggtgctggggctccgcagcgctggctctaaagaagttccaacgccagcctgggggcgcaaggcaggagcgccctgtttcctcgattgttggggatttgctcctagttaggtggtgactgtccttatgatcccccataaaaccagtcgggcagggggcagggggcagggggccgggatcgtggagaagaggccgcggctggcggggaagcaaccctcagcgtggacccctcaacctcgcggctcgccccttacccgtgcacccctcgcctcacacccccgcgcccctcacccacgcgtccctcaccctacacacacccgcccatcactcgcgcacccttcacccctcacccacgctcccctcacccttcaccggcgcgcccctcacccctcacccctcacccaggcgcccctcacccttcactcgcgcatcactcacccctcacccctcacccacgctcccctcacccctcacccctcacccgcgctcccctcacccctcacccgcgcgcccctcacccctcacccgcgctcccctcacacttcacccgcgctcccctcactcttcacccgcgcgcccctcatccacgcgcccctcgccctcagtcctcacccgcgcgggccaagagggtcccgggcgagggcagctccccgcgggcgggtgtggggctcggagttggcttggcacgcgaggccggcagcagggcccgggcttcacgcacgcctggcccccgagtctgtcttgaggctcaggagctgccttttctgcaaataggcgcccaacggttcagcccggagaactacacggggatggggagaggccgccccgcgtttctgcagcgacagcgaccgtggccgcaaccacgataatgacaatggccacggtgacggccgcgcgtccagccggccccccggcgacggccccggcgcatctgctcgtggggcacttgcatcggagcggagacccgcggggggcgctccgtttcccgagaccccggccgcctctgggcgctgcaaactccgagccgggtccccgggtctcctgggtcaggacagagctggacgagactcgtccccgggtggcccgcattcaggacacgcgtgagaggggcgtccggaccccgcgcccccggccctccaggacgacgccctccgcttggatggccgcgcgccgggacagctggagacgggttaacgtgggcgccaggcctgagggaccggccccgcccggctggtatttcccgaccgggcgggaggagccacgcgcccccaccgccccgacagccccggctcccggccccgcctgcgcccgccctgcccagcgcgctctaggacaccgcggcgcctccgcgcagctccggcgtgggcggggcccggcattgtgacgtcacggggcggggtttcccggcgcctgagcggactgacgccgagacgcgcgcgggtcagcggcgcggggacgcggggcgctgggcgcggggctgggggcgcaggtaaggagcgcgggggcggcgcggggtcctcggggggcggcctagggcggccgaggacgcagggccggggcagttggtcgcggccttcagtcccctggcttggtcctgtggggtccccggcccggcacctcctcccgcgagccgtgcgcccccatcctgggc

SEQ ID NO: 20115 - DNA, 2300 bp, Homo sapien
tgggccgggagccacagcacagcagccactttccacccacaccgcgtctttctcagccgtccacactggcccctacaactaagtttgtatctcagcctctctcagagacagaaaaaaagaggaggatgctaaaagcacacaaaaagtggcaaaatggccatgcttttaaaaaataattttaacagcttcattgaaatgtaattcacataccacaaaacccacccatttaaagggcataattcaacagttttgagtatatttacagggttgtgaaaccttcttacgatctaattttagaacatttttgtccccccacaaagaaaccccagacctcctaaatctctccgcactctccctcgtccctgcagcccccagcaacagaagtcaactttctgtctccgtggccttgcctgttccaactctccatggacttaccactcagggtcttcacgcctggcctctgccacccagcgttgttccggaggcccgcctgcttcgtagcgtgcgtcagcgcctcactcctttgtgtggctgaggaatattctatcatctgcattttgtcacctacttattgggggtggacatttgggtggtttccaccttttgagcattactgatgctgcagtagacttggtgcactcgcgctgtcgtttcggtatatgcctaggggtggcgcggctgggccctgtggaaactgcttcacttctgaggacccacccgactttttcacagcactgcagcctttcacagcccaccggctgcgtggggggggccacaatccccacacgcctctcggacttacgtttgtctctctgattctagccatgctggtgggttgcagtgggagctcattgtggttttggtttgtgttttcctgatgactggttgtaatgagaaaaaccgagaatcacatttaaaaccttaccctaaagtgggagttgctgagagaccaaagaatgactgggcggagtccagcttggtgagtaggtgagtttattaggactcacatgtggggcactcgtgggcagcaggacaactctagagatgagcgtgcttctgtccctaagctgcttttgagctaattttctgcctctttgcgccgtctgtgtgatgggcctgctccctgtggtggttctcacatcccctccgggctgtttgggttctcagggacacctgctcctcgctgggcaccgtggcctggactcaccgcctggcctttagggttcaggccacagacatccgccctgaagtaacctggcgggaaccgccacgccacagcggtggtgctgggtggctgtgttttatttatccgcacatggagacaccagagcttccaggtgtggtcactgggctgtgccctagggatgctggggtgaccagacatagccctgttcccacagcgctgcacaggggcacagacatggcaacaagactggtaaccctaaaacaccgtcctgggaggtcacccacaaggtgacgagccacaacccaggtgtgaaagaggccagggaaggcccggcgtggtggcccaggcctgcggtcccagcactttgggaggccgaggcaggaggatcacttgtgcccaggaattcgagaccagcctgggcaacatagtaagatcccgtctctacaaaaaataaaaaagatcagccggacctggtggcgcgcgcccgtggtcccagctactggccaggccgaggcaggaggatcgcttgggcccgggaagtcgaggctgcggggagccatagtcgccactgcaccccagcctgggccacagagcgagcccccgtctctgagaaacgcagcaggggtgaccgaggcccatgcactgcccgtgcggagcgttttgggggtgtaggtggccggtggcgcccacgggccctcttgagtaaggcggctccgcccaggccgtcccggggcctcggctcggctcggctcgggaagccgcagagcctgggggcgcggaccagtcctccgaggcggccgctcggtgacattgcgtccctgcaggtgcagcgcccgcctctccgctccggccccgcctccgccctggaacgcagcgcgctccgcccgaggcctcccggcggcccatacgggaatcgcggagcttagctgtcgccacctcgcgccgggtccgcgcggcccacgggaccccccactgacgcccccggccagcggtccacatggacgtgcggggccctgaagcccccggcgggcgcgcgctgcgggacgcggtgagcccctccccgactcctgcttctctctggatgggggcgcccctgcggttctggggggttttg

SEQ ID NO: 20116 - DNA, 2300 bp, Homo sapien
gggcctcctcctatgtcgacgggattctagattcacaccatggtacgtggggctccctgggatcttgaacccccagctgggagaattttgtgcttctcagcctcactgttctcatctcaccctggacacggtcgcagggtgaggagtagattacaccgtgaatggtgtgggacgtcagtctgtaaactacaaagcagtatataaacaggaaacgctttcagtagcaatggtggtatttctgtgtgacctggtaagtaatttcataagaattcttgaggagcgcagggtcacgagattttctcctgcatcctcctctgcatgctttatggccttggctctgggccaaggtgtgtgatctcctgcattcatggtgtgtggtgtgaggagggggatgggtccctgccccgtctgcacgtggccctcatgattcccgcgctgcttgttgaaaagactttcctttccctctgaatccaaaggccttagcacctttgtcagaagtcaacagatttatggatgggtttatcccatgatatttattttttttatttttattttttgagacggagtgtcactctgtcgcccaggctggagtgcagtggcgcgatctcggctcactgcaagctccgcctcccgggttcacgccattctcctgcctcagcctcccgagtagctgggactacaggcgcccgccactgcacccagctaattttttgtatttttagtagagatggggtttcacctagtttgccaggatggtctcgatctcctgacctcctgatccacccgcctcggcctcccaaagtgctgggattacaggcgtgagccaccgcgcccggccttatcccatgatatttaaaatgtcatacgtgggccaggtgtggtggctcatgcctgtgatcccagcactttgggaggtcaaggtgggcagatcacctgaggccatgagttcaagaccagcctggccaacatggtgaaactccgtctctactgaaagtataaacattagctgggcctggtggcacatgcttgtaatcccagctacttggaggctgaggtgggagaatcacttgaatccaggaggcggaggttgtagtgagctgagatcgcgccattgcactccagcctgggcaacaaaacaagacttcatctcagaaaaaaaaaaaaactcatatgccaacagtaaatatttattcaattgtcttacggtttattttttcaggcagaaaatctatttcaggaacttcaggaacattttcaagctctgacggcaacattaaacctcagaaatatccttttctacctttaacaaatgctgtgattctttcggactggtagattatcatggagtatctttttgttgtctggtagtagtaggtaatagtttacttaggatttcccagtatttacttctgtgcttttatgtggcttcctgatgtgttaattacccctcacctatagcaaaagctgtacctccggccgggtgcagtggctcacgcctgtaatcccagcactttgggaggccgaggtgggcagatcacgaggtcaggagatggagaccatcctggctaacacagtgaaaccccgtctctactaaaaatacaaaaaattagcccggcatggtggcgggcgcctgtagtcccaactactcaggaggctgaggcaggagaatggtgtgaacccgggaggtggagcttgcagtgagccgagatcgcgccactgcactccagcctgggtgacagagcgagactccgtctcaaaaaaaaaaaaaaaaaagctctacctcctgcttgactggcaacacaggatgtcttgtgcagcaagtataaaggacaaaaacacaaacatataacacttcccagtggggcttccatcagtccccaaccggacagtgccccctagaccatagaccccacagagcataacactgaagcacaggatcccagatacggctctcccaaactttgttttgtttagtttaacatcgccaactcactgttttgtcttagaaacatgaaatcaaacagaatgagaatataattttttttggagttggagcaaatctagataagggtcacaattgccccaagacttgcccaatttgagctcatgctacacaattaaatatattccttaaatattgtgtgcttgcaacttttgattttgtaaatgggttcccacaggacaaaaatgagtcttaaacataaaattaaaccatatgaatgttagttttttagttaatttcagctgggtggtagtctatagtcccagctactcgagaggctgaggcagaaggatcgctt

SEQ ID NO: 20117 - DNA, 2300 bp, Homo sapien
gtttcaataaattatttggggacatttgagtcttatgccttagcttggaacaactctcctgtgaataaaatgcttgtgatgtgttaagcaactgtgtttgtatctgaaatgagtgactaccaaaatgacggtaaggaattttttagaaggcaatagcctgaccttagtaagggctcagatttctccagtgtgtacctggtgccaatgaagtacaggagattttgttttatcatcccatctcatggatgaggaaactgaagtttgttgagataacttatgcaaggcacagatgaacctgaacacgcctttatgtaactaaaaccctcactgttaaccactatgcttatattctgtgcctctgctttactcaattataaaatgaaagagatttagatgatctctaatatcctaccaacctgaaattgtttcattacaataaagcatttcgtatataattgggaaatattctgtattatgtaaaaagcttaatctggcagtgagctgcacttgtgattctagtatttaaattgtgggtgcatattatcaaagcaccttatggtgctgtgtcccagaggaaaccaaacatggaacccatttcaatccccatgccagcaggctcttcagactgtagttctcaccatgccacagcccatctgagagacaccacagcatctgcatagtgatttgttgttgtttttgagatggagtctcactctgtcacccaggctggagtgaagtggtgcgatctcagctcactgcaacctccaccccctgggttcaagcgattctcctgcctcagcctccctagtagctgggattataggcgggcgccaccatgcccgggtaattttttgtatttttagtagagacggggtttcaccatgttggccagactggtcttgaactcccgaccataggcgatccgccggcctcggcctcccaaagtgctgggattacaggcgtgagccaccgcgcccgggcgtgatttgttttaaatttgtcatctaaaggaccaccaggatagctagatagtagacaagagttttactatcaatatcagtttgcaaaccagggagtctccagcatgaacccaaagtgctctctcagaagaacagaggttagaggttttattttaaaaagagaaatattaacttatttctctttgagaaagttcactggcactagtaagggtttggggagctctgactggtgagcgaagccagggggccagatcagtcctggaggtggaagttatgctgaagctatggaataaaactggctttaggtcgggcgcggtggcttcttcctgtaatttcagcgctttgggaggccgaggcgggcagatcacttgaggtcaggagttcaagaccagcctggccaacatggttaaaccccgtctctactaagtacaaaaaaacactagccgggctggcgccttgtagtcccagcttatggggaggcggaggcaggagaagcgcttgaccccgggaggcggaggctgcagtgggccaagatcacgtcactgcacgtctcaaaaaaaaattttttttctttataaaaagacaaattaaaaaacctggtttcaggttacaacaggcagctcagcagccggcctgatggtgacattcctcaaggacggcctgcccagtgcttcctccctaccccgctgctcgactctgctgtggttgggtatggcaacaacgacacatttttatgatcaagtttcacaaatgacacacatgaactgtcttagtaacacacagaaacaagcaccagaaaggaagaaaacgagccgcagtgccgggcattccgggcctttctggacgtccccatccgtggctggaggacagcccgggcggcggcgggcggcctcggggcgggagcgtgggggcagggcacggcgagcccggggcttctcaggaccaccaggccgcctggacgctggggaggaacccccactccgacagctgctatgacggaaccaacggcgctccacggtgcccaggtcgccgccgctccacccggccaactacacgttcgcgcggcgcctatacgcacatgccgtcagcacgcacggcgctagcgcgcgcgcatgccgtcagcacgcacggcgtcggtgcgtgcgcgcccagacgttctgccgggtggcagtcccagcggagtttgcgtgtgcgggcgggaccggatttcgtccgtgggcccgggggcggcgggggccggggagtgaggggccggctgagcccacctcgctgggccctccctggcgccccgccttgggcggcggcgagcgcgcgggccgc

SEQ ID NO: 20118 - DNA, 2300 bp, Homo sapien
gcaggtgggaagaaaggaggaagcagcaacctgaggccaggaacccacattcctttttaaaatgcttttctccaaaagattttaaagaaaaaaaaggggggaaatgtgaaaggaaattaaattttgggacgccaaattcacttagccaaagggaagagtcaagctgggaactgggtcacgcaaacctgtctcccccttttggttcctaaataagatggctacaagatgaaaggctacacgcctcccccatattttgcccacaaggagattcctggtgagctgttgaaatttcaccatggtggccaggcgcggtggctcacgcctgtaatcccagcactttggaaggccgagttgggcggatcacttgaggtcaggagtttgagaccagcttggccaacatggggaaacaccgtctctattaaaaatacaaaaagtagctgggtgtggtggcacacagctgtaatcccagctacacgagaggctgaggcgggagaattgtttgaacctggaaggtggaggttgcagtgagccgggatcacgccagtgccctccagcctgggcggcagagagagattccatttcaaaaaaataaaacttaaccatggcaatgcaaattgatagcttatctttacaggtgcagtcaccctagcccatctgattgttcccctaccacattttgtctgcgttatcttatgtaaaatgcagattccccacgtttttcctctgcccgtttgtttgtgaaaactctgcttctcaatactccgccctttcccctttaaatctggggccctcaaaatcatttttggagaaaggcgtagacctgtctcctgggtgcgtccttaactttggcaaataaatctcctaaaatgattagagacttgtctcgtcgttttcttcgattgacaatatatacacacatacatacgcatacacacacacatatatacgcgcacgcacatgcacacatatacatgtccacacacatgcacacacacgtacatatgcacacatacacatgtacacatccacacgcgcccacacacacacacacacacagacgtgtctcacaccacagcagccgcctcgggggagtcacagcccacgcatccccaacactgcggtcgcgctcacttctctttccacgcccggggggagcagcttccccgctgggccacgctgactctggggaggcgggcggggcgagaccacttctggggaggacgcccaatctggggactttctctaggtgcccggggagaaggcggcgcagcagcaaagccctggagggcccagtggcggaaacagacggacccctcgcagcctcccgccgacagcggccctgcccaggtctccaggcttcgatgccttcgttgctttgtgcggcgcacccgcctacgtcagttcccagtatttaaacaaaacgtgttcctagctacgcagcgccaggcaaccaggcggttcccacgcttccccgagtggcacaccctccgcgcagcccacgcggcctccccacgcccagctcccgccggccccgcctcgcgtcgtccttcgccccgcccccgttgccgccccccccgcccgcacactgcccacctggcgttgtcttcaccccgcttacacgccgctcgcttcgctctggtagtcgcccacctcgcgctgcccttctcgcttcagtcttcgccctgcccacccaccgcccacctcgcgccagtcttcgccccgcccattcaccgcccgcctcgcgtcagtcttcgccccgcccaaccaccgcccgcttcgcgtcggtcttcaccccgcccactcgccgttcgcctcgcgccttcgcccctccgccgttgtcgccccgccccttcttgcgtccagtctttgccccgtccctcgccgtcgccccgtccacacgccgtcagcttcgcgtctgtcctcgccccgcccacctaccgcccccctcgggccttcgcccctccgccgtcgttgccccgcccgccttgcaccccgtcttcgtcccgccccgcgccgtggccccgcccacacgccgtcagcttcgcgtctgtcctcgccccgccctgcatcatcgccccgccctgcatcatcgccccgcccacacgccgcctgccaggcgtgagtcttcctcccgctctgcgccgtcgccccgcccacacgccgccaccctcgcgtcagttgtcgctccgcgcctgcgcccgttgtctccctgctcgctccgggtcccggcgccgcgccatgtgggctgcggcgggcgggctgtggcgctcccgcgcgggtctccgggccctgttccgtag

SEQ ID NO: 20119 - DNA, 2300 bp, Homo sapien
ggtcttggggtgtttgtggggggccccattccaagcccacagctgctagagcaggccttgcctgggggccttagacagcagcgtcaacatcgcctggcacctgccagagtcgggtttaaccagcctgccaggtgcatccctgagctggaagcaaagctccacgctgtagcaggcctggcctgaccgtgtcagcaaggggcagtgtgggggcggcagggcagggagctgagcccagggtgtggaaactttccaaagtggagccttggaggatacaggggctgtgacgtggccttgactaggtgctgttcaccaagaatagactcttcatgaaggcgaatgagtggcaggtctgataggcctcacctgcgattctgccagttgaactggcccgaggcactggccatgcttagagaaaaaagttgcaaacgcttttttttttttttttgaggcagagtctcactctgtcgcccaggttagagtgcagcggcgtgatcttggctcactgcaatgtctgcctcttgggttcaggcgatcctcctgcctcagcctcctgcgtagctgggattacaggcgagcgccaccacgcccagctaatttttgtatttttagtagagacagggtttcaccatgttggccaggctggtcttgcactcctgacctcgtgatccgcccgcctcagcctcgcacagtgctgggattacagatgtgagccaccgtgcccggcgcaaatgcatttattgcatacaggacggtgcacctggactgtgctggccgaatgcttctgacactggagaaggcggaaaccaaagcccaccttccttcactcctgtctccagttaccctcagatagacgtttgggagggttctcaggcgagtagatgtaggaagtgtgatgtgctgttgtgttgtggcgacgacactgtggactaggggcatggtttgtgcttggtgtgaagcctcttcttccttcccagggaccctgatgccccacaaccctgcggcaccacagagccgaccacaagctccagtctgtgtgggatcgatcatgaggcgctcaacaagcagattatggagtacaaaaggaggaaagataaagggctcgggggcctggtgtggcaggggcaggtggctgagctgacaacgcagatgaaaaagggaaggaagagggccaagccccgcctggagcaggacagctccctcaagagttacctgtcaggcgaggaggttgaagatgacctggacctggttggtgccccggagtacgaatgctatgccccggacacagaggagttggaggcagagagaggaggtggcagaacagaggatggccacagctgcggagcaagcagggagtagatggagaggctctgcccatcccacatttgcagggaaaagcattggcacgcaacgcagcatgtggcttcattgaggcagttgatggagttaaaccatctgctcttctgctacttcaacattttctagcttttccgtgtatctaaacacaatttgctacacaagtcactgtttttttttccatgcactgtgtgtaatttaaaaattaaatggccatcttatcacagattctcacaaaaagaaaatggtaaaatagtgtctctgagatgctggcatggccacctccacctgcagagccctgccaggtgccagtgagtgcttggcccgaggggtcaggccacagcagtggccggggtaagaactgaacctgcaaacctggggagaacagagggtccccagagcctcccaaccccctggagctgggctccgtccctggggctgctgggctggcacgtggcgccgggggctccatccctggggctgctgggtcggcacgtggcgccgggggctccgtccctgactggcctcttcacagctttgtgcagcaggctccaccttctggttcaggccaaggttgggcagaaagtgagttgggtttgctggggcttcctgggcgaccccggctctgaccgtggttccatcacgcctgaagtagtaacacttttcccttggtgcccgtggccagctagtgtattttctaatccatccaaaggtgaaacagacttggtctttgccttctgaagagtgtgcgactctgagtcatactgaattctttgtgtcacctccgacgcaaagattcgttttgctgtttatcagaagagaaaacacagattccataccttgtcagctcctatttagttcggcttccctcttaatgtcccagcccctgtgagctgtcaggttctaaattcagaattctctcaattctgtcaggttctgcactacga

SEQ ID NO: 20120 - DNA, 2300 bp, Homo sapien
atttaaaaattaaatggccatcttatcacagattctcacaaaaagaaaatggtaaaatagtgtctctgagatgctggcatggccacctccacctgcagagccctgccaggtgccagtgagtgcttggcccgaggggtcaggccacagcagtggccggggtaagaactgaacctgcaaacctggggagaacagagggtccccagagcctcccaaccccctggagctgggctccgtccctggggctgctgggctggcacgtggcgccgggggctccatccctggggctgctgggtcggcacgtggcgccgggggctccgtccctgactggcctcttcacagctttgtgcagcaggctccaccttctggttcaggccaaggttgggcagaaagtgagttgggtttgctggggcttcctgggcgaccccggctctgaccgtggttccatcacgcctgaagtagtaacacttttcccttggtgcccgtggccagctagtgtattttctaatccatccaaaggtgaaacagacttggtctttgccttctgaagagtgtgcgactctgagtcatactgaattctttgtgtcacctccgacgcaaagattcgttttgctgtttatcagaagagaaaacacagattccataccttgtcagctcctatttagttcggcttccctcttaatgtcccagcccctgtgagctgtcaggttctaaattcagaattctctcaattctgtcaggttctgcactacgagtcagtgtcatccctccaagccctggctctctgccagtgcagcagggctgtgagaatcaagacggcacagggaaggcatctgtcccagcatttgcacatgacaggtgcccacggtgcaggagtagaatctgtggaagcagcagtggctttagttgctgtgccctgccacctcctccccaaaaaggagaagtgtccaagggatagcagacccgtagcactgagcggcctgccgtgctgaccactggatccaggccacgtgctgcagacagcggctgtgggcgagtgatgaggccactacccagaaagctgcatgtgcactgtgtggggtaaggacagtaggagatgctgctgcaagatgctgactcccttgtttttcttttcatttgtgctctgggactaagctgtgtataagtcatcaaatggcagaagcaagatttttcttttgagatctaggaaattatttgtttatactctacactcttatttcctatatcaggatggggaggccactacctcaggccagttaaactaagaagaaagaatttaaggcaatttgtaaggatagacaaaaccccacatgatggtatgagtaggagagagaaaaaaaaaagggagccagaaattaggttacaaagtgtacaccacacataaaggctgatgcctctgttacaccgtgagccaaatgtttatctctagggtttctggtagccagttgcggggtgtccagtgaaggggtgtacatgtctgtggttaatcatataggtcaggataatgaggtgatactgcagtgacaaatggcaaatctccctggcttacaacaaccagtttgcctcttattcttctaggggaccatcatgggctgaggtcaggccaaggccttttgtatctggtgttactggaacatggctatgtgaattcatttatgtacaagagacctccccatcctgatgtaggaaatgaatggtgatgatttacgagcgcaacatcctaaaaaacgtttttgtatttccctagcaagataacttcaggttacaaggctctggtacttgaccatgatgactccatgagaaaacagcagaacgccagctttgcaggtacctccacagcactgccgggctgggaacagggccagtgcttgcaccagcgctggagggggccacagcagagtaaagacagagtctgccatgcaggagtgcttcgcaggtcaggcactgctctgagtgctttgtgttaacctgccccccgccccctaacttgggaaaggtgttaaagaaggagagaacgccctcaatggtgtgtcctttgcatacacacctttgcatgcatctgatgtgcccaggctgtgttttattgttctagcaatttattgttacaaaacagattgctgccatcaatttgtctcaggtccttctagcacatctgacagggactagtgtctagagccatgaggacagagaccagaagggacaagaaggagtgggcagagggaatggaaggtagagttaggcccagagagccccaggctgctgcccagacctccacgcctgtg

SEQ ID NO: 20121 - DNA, 2300 bp, Homo sapien
gtttcttctgagcagcagccagagttcactggttggttcacaggagtaagcagggttagtctaagttgcaggaaaaaattcttaaaaataactgatgagactagaatttaaaaataggtgtaccatagtttttgaaacataatttctgtctctccagtaccccattttcactaaggacaaatcattgtaagactgatttgctttattatacttggcctgattatttgtataaagtgcagcaagaataattatttttcacatagacttttaaaattggctttgatgaaactgtgttccatagaaggaatctcagataagacttttttcttttattattattattttttattattatactttaagttctaggatacatatgcacagtgtgcaggtttgttacataggtatacatgtgccatgttggtgtgctgcacccattaactcgtcatttacatcaggtatttctcctaatgttatccctccccctgccccacaccccatgacaggcccgcgtgtgtgatgttccccttcctgtgtccgagtgttctcattgttcagttcccacctatgagtgagaacatgcggtggttggtttttctgtccttatgatagtttgctcagaatgatggtttccagcttcatccatgtccctgcaaaggacatgaactcatccttttttatggctgcatagtattccatggtgttatatgtgccacattttcttaatccagtctatcattggtggacatttgggttggtttcaagtttttgctattgtgaatagtgccacaacaaacatacgtgtgcatgtgtctttatcgtagcatgatttataatcctttgggtatatacccagtaatgggatcgctgggtcaaatggtatttctagctctagatccttgaggaattgccacactgacttccacaatggttgaactagttcacagtcccaccaacagcgtaaaagtgttcctgtttctccacatcctgtccagcgtctgttgtttcctgacttttcaatgattgccattctaactagtgtgagatggtatctcattgtggttttgatttgcatttctctgatgaccagtgatgatgagcattttttcatgtgtctgtcggctgcataaatggataagacttttttttaaaagccgagcctagccatggctttgtgccctaaaatacctatgagttaggtaaattcctctcctcttgaggtcacaagataacttggggctcctgagcctgtcataaagtgacatttttcacttaccacaggtcaggccccctgtccagggactatatagacaaggtatgttttcccgaggggcttttattgactctacaagtcaagttggattccttaaaggaaaacacactattccagtcaaagccttggcaaaatagccagtttctccagttgtgtcctgttacaaatgaaaacagattcttattgcacttatgcaaacaactgtattgccataaattaagaatactcacaaatagtttccaaattctggagaaatgaagtacggagaaacaaatatactcaaaattttgttcacaggagtgtgctttactcaattgtttttgtttgtttgtttttgttttttttttgagatagcgtctcactctgtcgcccaggctggagtgcagtggtgcgatctctgctcactgcaagctctgcctcccaggttcacaccattctcctgcctcagcctcccgagtagctgggactacaggcacccgccaccacacctggccaattttttgtattttttgttttttttttagtagagacggggtttcactgtgttagccaggatggtctcgatctcctgaccccatgattggcccgcctcagcctcccaaagtgctgggattacaggcgtgagccaccgtgcctggcctactcaattgttagaagctgcaaatagcttaagtttccttgactctgaaaaagaaaacaaaggatcagcaacattttaagcgaagttaaaaagattacttcagtttagtccacgcagttaactccagttctgcttgctattcatgaatattttggctttccatgagtcctgaaagttttttcctctattctaatgtcacaacttccaaagctgtcggaaacctgcatttaagtgcacctgtcaaagtcctatggttgattataaaaccaccttttaaagaggaccaaaacaagacaattgtctgtggatgacaaaagtcttaggccagccactattaaagtcaaaattgataatgaaatttggttatttctgtggcatataacaatg

SEQ ID NO: 20122 - DNA, 2300 bp, Homo sapien
atgagggaagagatctgacgaatatttgggatataaaattggaaaactggagatggggaacacactgcttgctgtaggagaggctgttgaggagagaatgatgggctcagatttgaacgttttgaatctgagttgcctgtgggactctgaagtggagctgccccctttggcagccagaaaaataaaactgaaacgtaggaaagagatggagatactggtttggaattgacataacaaggtttgaatctgtggtcgaaattaacaagggagaaaatgcagaaaaaaatgaaaggcgtgggagttccaatacccagcacggtgcctggcacacaggaagcgagtggcgcatatgtgctgcaccgtgaaggaaaaagtcagcaggatcccagagaacaccgcgttcaaggatgggccgggaagagatgcaggcgaagatgaggaaacagttcgtgaatatggagatgaaagagcccgtctggggagtagtgggtgtgggggggggcggctttgtggggggaggtctgtagattaggaaacagttcccgagtttggagattaaagagcccgtttgaggagtagtggtggtggggcggctttgttgcgggaggtctgtaggaaagggggattggtctgtagtaacaaatggaagatagatacagaaagacgaggcctaaaatctgttttgggctcagcaattaggagggcgctggtgaccaaggcgtttctgcagagtggtgagggtgggggcgagaggcgtgcagggggctgaggagacagacacagggactgctgttttgagaaatgtgataaaatgagaggtcactagaggatcaatgggagactgcaggctttaactacacttttcatcccacccataattttgcaaggaagatatatagggacatcacacccatttaccactgtaactcaaagtaaaatcttaacttgtcagcaaacataaagggcaaactctacttcaattatgacttgtattcatgtaggaaaaaagcaaattttggtcaggtcatatcggcccaccatttaacacagttttaaaacgaatatggacattaatttagtgcctattatgtgtttagtcactgggctaaactgagcagaaggctcccattgagagggaaaagctgaaattatggacgagcggatggtgacaaggaggctctggagagggcggtgggcggaaggcccagcctgggcacggcctctgccccgcggtggctggagtgggcctcagggctggaggctggcggcgggttgcaggggctcggcgctctggaaggagacgtggccttgtgatgaaaggggcacgtgtcctgcagacggcttcgccaagaaggaactgcctggaacagccactgagggcgcggctgagttagggtcaggggaaggaacactggaggggagttagggtcagagtcagggttagtgctaggtgaggttcaggtgcagggtcagaattagggttaaggttaggggcactgggggaggcgcctgcgctgccctcgtggttactcccacgtgctctggggcacgagggcgtccgccagaggcctggggactccacggaacgaagacctagagccattttgaaagccctacgccatgtttccactaattttgtggaataaattattattgctacacaattgataaacacctgtgcaaaaatgaacttttaggttaagagtttatacaaatgtatgcaattaaccctctccccacacaacttgtagtagatctaaaaatcagaattctcaagagaaggtgtgatcactttcccacaggaatgatgaagtcaggagaccccagctagtcggttcaccaggatatgccaatcatggcacacttgtcccagttctgggagccaaagttttgtcttccaatggcaaggcagcattatcacagttgggctcccattggctctgagatgtgggcggggtcaccactcctggagctgccactagctccaccccattccatgcaaatgaagtcaaagctgtggtgagtccacgtgattagtcacatggttgatgacacactctccccacccctttagtgacgtcattgcccactcaaactctcacgagagtttgcacagatgtggaaaggagctggcagggcagttccctgggacagaagggagtcagggggtccaacaggggccccccactgccaccccagagcctccagtccagctttaggcaggggccccggggggcctgtgggaagtgccaggggcccccaagcacactctgctctcattggctggctgcgcctacatg

SEQ ID NO: 20123 - DNA, 2300 bp, Homo sapien
atatgcttctaacagtgttttctcactgttaaaatgtttgtgcatataatttaagattatagagtatacctactccatgagcaatagtataaatattttaccatagggctaatactgcagacctttcttcctaaagcagtaaagtatcttggaccaaatttccctggttatattaccacatacatttatctcctattaaagtttatattgactttagataacatttccagtagttgaaagatgctaatgaaatataaagggcaacttgcagtctgataaaattacacgatgaggtgcttcagctgttgaacacagtgaagtaactgctgagctggttatgtcccttatgattttatttgtattgagttcatttgaatctttcaagttgaccctgtgtgtctgctttgtttcagtggccttagcagaggtgtgcagtaccctttcgtttacgagattaggggagtaccacaaatctaaaacctaagaataaagggtgagattaaagcatgttactctgactctacatcattttgggtaaaatgtgatcttcattactactttcatatatataggtttctaaaatttgttgaaatcagtcattaacgctggaccagaagagttcaggtggattaatctgtcatcactgtgggctcttgggggtatggctggcttgagtctgtttagattgcttccaagccctttctgttgattttgtccattttctctacagctcctatgagttggtgttacattgctattgaccaaaagcctgaactgccctagatatttaaattctaatatttacttgccaggcgctaatggacacaatcataacccaaaatgaaaatatagtaaatcaaatagctttttttctgctgtgaattcagctggcatctggatatttgaatagaccaattaaaaatacaagtatcttggcaacttcattgctacatcttagtgtttaaattacagcagtattagagatataaaccaaacataccttatctaacatcccccaaaactcatcaattctaattctagttagaaagtcttcaagactcctgtctaaagctttgatttgtaataaataggattaactaagtttgtgcatttatgaatagaatctttaacagtttttaagaactctgcaaaggatagcattggttattaacttgataatttcattaaatttttttcttgagacagggtctcactctgtcgcccaggctggagtgcagtggtgtgtgtgatctcggctcaccgtagcctccgcctctggggctcaagcgcttctccgggctcggcctttcaaagtgctgggactacacgcgtgtgaggcactgtgcctggccaacttgataatttcaatagcaaaacggtatcctatagaaggcttgtttcttagttggtataagttgctaagtaatcattaattcaactcgataaacctggtgggttttgtgtttcgttcgtgtcatttgtgaagcccgacaggaagagtggagccctgcgctgtgtgcgtgcgttttaaagcgtgctggaaacgtctacaatggcagcgcagccagcagccacgcggccttggccacccccgagctcacggccgcagctcggcccgggccccctggacgtccgccctgggcaggggccgccgcctccgaacgcatctctgcctccctaggacgaggcagccgagggaggagagcggccaggactgcgctgtggctggacggcggatgaggcttctttcaacaaggcgagtttcagtgagaaatgcgtgatgcttttgatgtttcaacagaatattgtttctaagattatgtatcttgcacgtttggcacttgagggggtgctcatcttttgattccgctattgaggtagaggcgggacgggggaagcagctttcagtaagacccgcccgctcttgccctgtcagtttaccattgccatggcaacacccggaagttgccgccccctttccatggcaacaccctgatggccgaaagttactacccttattccagaaatctctgcataatctgtcggtttgcatataattaacagtggctataaatgtgagtgcagccctgtcctgtcctcagctgctgccctgggcgcactgccttgcgggtcactgtggctgctcctgtgcttcagcgggactagaagctgccgcccacgggcagcggggaagaaatctgggcaaagccatgagccctccgaggctgagctccagtttaggggctcacctgccttgcatcgttccgagtcctgtactggactgcatcaggccgcgtctc

SEQ ID NO: 20124 - DNA, 2300 bp, Homo sapien
cgagacgcctgtcttacagagtcgtgtgtgtcaagaacaagaggtttcatataaaaattaatgaaacaagattttttttctgacatgaggaaaatgcattattcagagtttccaaatgccaccagtctcttcacttaaaatttttactttagactaagctccttacgtttctgcttgattaattcagtggactttcattttattttgcagtagcccaactttagggtaaagtttacacactgccacaaatgtgtcatgccacaggctggcaggtgtgggcaggcggatcccacagggtccctgggagacctgaggaagagagctgcacagcccccatgggaggctgggcatattggtgagccttgaggctccatgtgcctacaaatagcactgactgtgcgggacctcacagaagggaagcagccatcctctgatcccactccttcctctactcatctcccctcatcagctgctaaccaaaaacgcagggaaatgctcacacgcccgactgagtgacacattcaggggccttgaatgctggctagaagacactgtggtggggcttgcgcatagaaaagaagaaagcaggaaaggtctctcttagttgtaattaaccttagaaaaaaacgagcctccgtcttacagttgagagaaggaaatatgggagaatgggcaaagcttaagaagtccccagtccagcctgctgcctcccagaaggctgaggcactcgccagccctccaagccctaaaccctccactgccattgattctctctgctgcagctgcctgctagcaccttttaatctctgagttctttggtttggtgcctgtggagctgtaaggagagtgctagagagttaattttaggggctgcacttgagcttgcctgatttcagctcagcctgcaggtctggaatgctcctgtgcaccctgggtgcttcggcgtcacgcagatggaacagcagtgccaggtgtatgacggccgagggctcaggcggggctcggttgtgtgtcccctctaactgtcccctctcccgcagaggaggccgagcgtggcagcctcggcgcgggctcgctgtgcaggcggaggcgggcgctgggcgcgctgcgtgatgaaggaccccggcggcgtgcacacctggacatcggcctcccgcgcgacttccgccccgtatcatccatcatcgatgtggacctggtccccgagacgcaccggcgagtgcggctgcaccggcacggctgcgagaagccgctgggcttctacatccgcgatggcgccagcgtgcgcgtgaccccgcacgggctggagaaggtgcccggcatcttcatctcgcgcatggtacccgggggcctggcggagagcaccgggctgctggctgtgaatgacgaggtcctggaggtgaacggcattgaggtggccgggaagacgctggaccaggtcacggacatgatgatcgccaacagccacaacctcatcgtcaccgtcaagcccgccaaccagcgcaacaacgtggtgcgcggcggccgcgcgttgggcagctcgggaccgccctcggacggcaccgcgggcttcgtgggtccccccgccccgcgcgtcctgcagaacttccaccccgacgaggcggagagcgatgaggacaacgacgtcgtcatcgagggcacactggagcctgcacgtcccccccagaccccgggcgcgcccgcaggcagcctctcccgggtcaatggcgcgggcctggcgcagcggctgcagcgggacctggccctggacggcggcctccagcggctgctcagctccctgcgggccgacccccgtcacagcctggcgctgccgccaggcggcgtggaggagcacgggcccgcggtcacgctctagactcccgagaggcccccaaatcctagctccagttccccggtaaggacagggacaggacctgcagactgcatccgctcattttttgttgtttttgtgaccacaaaaacaacgctgctctttgtttcaacttccggatataaaaacacaagtattgcctatttttatagaatttcgccacagaacttaaaatgaacgcctgtagagacactctataccaggcctgagtgcaggtcttggcgcctttgcaaagtgatagaaaagatctgaccaagtgcaaaaaaatgctttttaaaatttttacaaatactttgtttttaaagtgaagctttaaaattacttttttaaaatagtcaaattcatgtttttaagtaagttggcccatgcaacatatctcagcattcttgctgtgctctctgctgacttg

SEQ ID NO: 20125 - DNA, 2300 bp, Homo sapien
agatcggatctacctcccctctcccaacaaggagggtctcctccccatcctccctcatcagcgactgtgcccctgcctcctgcttggggaagagcttctctctgctgccaacctggagcctggcccttccctccttcctggctggaagctgctttcagctcctggccttcctgatgggcatcggctccccattcctcgcgtcctctccccctgtgcagagcatgtgtggggacaggcagctggatgaagcacctcagagatccactgcccaaggctgcccggtagacctgtccctgggagggaagcagcccagccccgctgatagaacctgcatttcaaacagacccagggctgcagcacacaacacgtttccagtggagaagccctttgcagagttcagagctctcgcaggcctcgtgttcaactcctcatcttgccacctgcttttgttacgcaagaaactgaggcagaaagcagggaagcaacacagctgggtagggcccagcagagtctcaccccaagctccccagctgctcacccacagtgctctgggcccctcccacttccacaactgcgaccttgtctttgaccttgaacttctgtctcctcctcccaaaatgcctgtgaccaactgggctgcctttgacgagctgctctgaggaacagcagccacttgcccactggcccccagccctccctgaagggtggcagctgatgcctgtgtgcctgaaggcagctcctgcccccagtatccacaaggagggacaaactctcacatggacagtgagggtgtgacaggccctgaagaacaggttctgtgtccactttagatgctggaactacacttaaagagcgaccagcttttacagatacaaaaataaacatgtttgcctttgcttgttattgccaaggaagccatcttcccctgctttgacacctcaactgtgaatgcatttcccataacatctgaaaatgtacactaaaaatcaagtcacacttaaaggtagtgtttttggccaatttgttctgagaacaaatacaaaactgcataaaaatagcttccacagggaaaaaaggtgcaagtccaacagacaccctttccagtcacctagacatcacctgggtgttgaaaaccaccttgagcccaaatccacctgcaccattgattctctcgtgtcaggtgcatccacggggcttatcaaagctctgttttattcttttaaaaatgacaagttactattttgggcaggacaaatgttcccagagaacttttaaatctgatgttatagttttatttcttagttctaggtacagggctagatgtttggctgaagctgcgtgtgccacaacactgcaggccccacaccacgcagccagacgcccctcccagtcctccttcgtcctgacgtggctcccagtggaatgagatggctggggtctcatgaggggccagctgcgtgggccatccattctctaccatggcatgccgacaacaggggcacagagaagtccccctttcaaaccaagatttgagctgaagagtcaggttcctggtcgcagggctccgtcatctgcaggaaaattagtgaagaagtggagggccttgcaatgtgaaagggtgggagagagaaagccagagagacttctgcaaaacaagctgcagataggcatggagaagagcaaagccgcatacaggcatagtggaaaagtacgctgaccttctcagtggctctaaaacaacaagcgaaagacaaaaaaccaccagcatccgtcttcttcctttccagccagacaactctccctggccctaatgggtttcaggcagagatggtttcctgagggcagcaccagtcagaatgggtggagcaggccccagagcttctaatggtcccagctgagtcccccaaggctcagcacgtgatcctgccggtcgtacacacagccccagctcgagcactgtgcggccactctctctccaagtactctctgcccgggagcccacttcatcctgcttcatcagtctctgaagctgagagaacacccttgtttgtttctgcagacattcctttgcttcagcactcaccgctccccagaccacaaaggtgtatggacttagcaaaaccagtcataatgatttttctatatcaaaaccagccctaacaatttttatacaacttttaaataaaaacagtggaaaatacaataaataagtcctctaaataaagctgtggtatgaagtttaaatgccccaagtcagaagtcaattggatgtctctgtctgagctgagagcacatgacat

SEQ ID NO: 20126 - DNA, 2300 bp, Homo sapien
aaccacaaaacaatgttgcccactgtaatgggcaacttgcagtcagcattgagcctgtgacttttctcaaatccaaagatttgcattcagtttaggaaatttcccttgaaagaatggcagcacctctgtccacagtctgcttgccaagtgtgtgtctcttggcattttttgtttgcttgcttacttactgcgcacgtgccttgttttggaactctgtttacatatccggtcctctggccagcctagcatttctctaaagggcagtgattataactcagtggctttgtaatggtactccctggcactaagtcccagcatataacagggtaaatacttagcaaaaataaaggaaaatcagatttctatgaaagtaatttgtgttaaaggctttagaggtgtgtagtttgtggcctagtagttctaattttagaagtccatttaaaacattgaatataagcaaatttttaaaacagtgtgatataaaagcttaacagtggaaacatcttaaatatccaacaataatgaaatgattataaattatgcctatattcatataagcaccttttagaaaacatcttctctaagaacatttaataaaaccgttctggccgagtatagtggctcacatctgggaggcagaggtggaagcattgcttgaggccaggagtttgagacaagcctggacaacataaagagacccccatctttacaaaaaacaaaaataaaaataaaattagtctgtgtggtggcacaaatctgtggtcctcaagaggctgaggtggaaggattgcttgagccaaggagtttgaggctgcagtgagctgtgattatggcattgcactacaacatgggcgacatagcaagatcctgtttttagaagaagaaaaagttcattatatagcacaaggtgaaaagtgcaagttgtaaaacgagataaacagcatggtcacaactttgtaaaatatacaaatatatatgcagaaaaataagtgaaaataaaatacaccaaaggttaatacagttgattgctgagtagcatgactacaggtaatttttacaggttttttcacttctttatattctgcaggtttcttttgcaatgaatgtatggtgagatttataattatatggcttgtagattacaattcatagtatacttcaaaatgattttttaaaaactgtcttgtcttctgaacttcatcacaaattcctcaagggcaaggattgtatctttggtttcagcaagcccgtttcagaggcctcttgattggtaaatattcattgatgctgctagtaattgattctttgtcttaacaggttctctttttctagctgccttagaaaaagtctcctttcgcatcaggcaggtgcttctgatcctctccctagagataggctatctaataaagccctctaagcctttatttttattttttattttttgagacggagtctcgctctgcctcccgggctggagtacagtgatgcgatctcggctcactgcagcctccgcctcccgggttcaagcgattctcctgtctcagcctccccattagctgggattacaggcaccccccccaccacacccggctaattttgtatttttagtagagatagtgtttcaccgtattggccaggctgctctaagcctatttgataaaacccttctcccaggccatcagcaacttgacaattagtactgacaggtgatgccttttgggatcaggtctccagtggttctcgttagcattcttcacttgaatattacccaaaacaatggcaaaaatcaacccctatcctaggttgctcggtggaggcaatcaaaacgagacgccttgggctggccgcgatgctcctttccccaggctctgggattgtggacaggagggcgcgcacccactggcgatccgacgcggagctgcagcgtgggggcgtggtgtggcgggtcctccggagcgcggggcggggctgtgggcggggatatgggcgggtcctccggggctcgggggcggggcggggcgcgggcgcgggcgccgggaggtggggcggcgcgcgccggcgtcccccgcgctcctcccgcgcgcggcccctggagtccctgaggcgcgcggccagcccagctcgggcccgcagcaccgggagcagcccgccggccaagcgagcgcgggccggggccggggccggggcctgggggcgccgcccccgggagtctttctgcggcccctgaggagcgagggcgacggcgaggctgaccggggccgaaaccatgaaccgaagttttcacaagtctcagaccttgc

SEQ ID NO: 20127 - DNA, 2300 bp, Homo sapien
agattacaaaatactttgacatcttttctctacagccctcaaaaggaggcagggcaagcacaattaaatcccattacaaatggggtgactgaagctccattcatggcttgcccagggtcacacaaagaatgaatagcagagccctgagcctgtgtgcttccctctgtgccaggctgctttacccaggcatgggtgcaccttgtgcatgggacatttctcctttgttgtgtcctgagtaccttaagccactcagatattgctcaggtggagtgagggaaaaatgttttcaggttgtattagtcaaaacaaaataccacacactgggcgactttaaaatcatacatttatccctcacagttctggaggcttggaagtccaagttcaaggtggcagctggacgggttcccggtgagggctctcttcctggtttgcagacagccaccttctcttcgcatcctcacttggtgggaaaagacagaggagagaaagagagagagagaaaaatgagatagagagagagagagaaatgagatagagagaaatgagagagagagagagagagagagagagggagacacagagacaatgctctcttttcttaccagatctataatgagggccccaccccatgacctcatctaaccgtaattacctaccaaaggcccatctccacataccatcacattaggggttagggtttcaacataagcatttggagaggacataaacattctgtctacaacatgagtggagatccatctcttctttacctctggtaaggggaccacacgctgcagccagcgagacagtggcatgttcttgttacaactcgatctaactcccccagaagaggaggcagggaaggcggacaaaactgggagagggagagagtgttaggaagagagtagggtggccagaggcagcaaataaaatataaaatgcttaattctgaatctcagataaacaaccaataatgttttttagcataagtatgtcccaaactaagcttgggacatatttatgctacgaaattattcgttgtttatctaaaattcaaactagctgggcatcctgtcttttaatctggcaaccctaaaaggcaagggccaaaaatgccggaggcaagccaacggattccaggagggacaactgctggactttggactgatgatgctctttttatatatttaactttttaaaaaagcctcttttctttctttttaccagcttttcactagctttttaaaaattgtggtaaaacatacataacctaaaattcaccgtctaaaccatttttcagcatacagttcagtgggattaagtagattcacactgttgtgccgccatcactaccactcatttccagcacccttccatcaccccagcctgaaactctacccattgaacacgagctgcccaactccgccttgcttccccattcctggcgaccactgcttctgtctctgtgaattttgactattctaggcacttcacaaaactggactcatacgatatctgtagttttgcgtctggcttctctattgaattcttaaaggggggtgggaactaagcagatcacaagggagctgcccacagaggtaaagacaaggtcaggtaggctgagagacgcaggaaagcgggtcaaggcgtagggctggagggcaggggcgggccctgggcgtgggctgggggtcctgccccggggcgcaccccgggcgagggctgcccggaggagccgaggttggcggacagcttggccctgagcttgaggggaaggcagcgatgggacaaaggacggaggtctaggaagagggtctgcagagcagaaagcacgggtaggggcggcctgacgctcggaagacaacgcatgggagccgtgtgcacgtcgggagctcggagtgagcgtgagttccgtgcccaggcccgcgactcggcccgacaggacagcgctccgggtcgacggggtcctggagccgcgctcggggagggcgcagcggagggcgagcggcggcgttaggacccggaggcgcgggcggactgggggcggcggggctaggacccagcggctccggcagagcggaagcggcggcgggagcttccgggagggcggctcgcaggtaggaggcgtccggggccgcgggaagtagggtcgtgggggcctggcggggcgaagtaggggacccggaggggctggagggaggcgggcgggaggcccgggaccgttcctgaccgagaagcctgcgccaagctggtgttccgcggccgctgcccggtgcccggctccactgcgaacgccgccg

SEQ ID NO: 20128 - DNA, 2300 bp, Homo sapien; identical to SEQ ID NO: 10

SEQ ID NO: 20129 - DNA, 2300 bp, Homo sapien
taataatgtggggagcttttattgtgattttcctcgggttattaaacttgcatgcatggacacttacgggctagaatttgtggtcactgccaacagtggattcatatcgatgggcaccttctttttcttaattgtatcatacatttttattctggtcactgtccaacgacattcctcaaatgatttatccaaagcattcttcacttcgtaggctcacatcaccgtagtggttttgttttttgctccatgcatgtttctctacgtgtggcctttccctactaagtcattggataaattttttgccatcatgaactttgttgtcacccctgtcttaaatcctgccatctatactttaaggaacaaagatatgaagtttgcaatgagaaggctgaatcaacatattttaaattctatggagacgacataacacatttggttgatgagagcacaggataaatgccatggaccatcaagactcctgtgatcaccatgatcactatggaacgcgcacatttttagtattgcctgaaaaaactgaaaaatctgcaaaaaggatgcattaaatctaagaattgtatttcagataaagttgcaacattttttgttaatcataaaaagtatatatttctatctaatgtgtgtatctaattaacagcaatgactatctttaattttgatgtagttattttatatctgtatataagcacatacacatatatatgacctaggtttatttatcagtatttttatgctgataataagcatcactggaaattaattttcttatggaaattatgtggatccaatggataaaatatgagtttatataaattagtaaatgccaaaatcaaggaagaaacaatttttattttaattgtactttaagttagataaatggtaaggtcaacagcttgttacaacccttaagtattattttcaggctgattgtcaatatgttttgtacaatgttctcacttataggtgggaattgaacaatgagaacacatggacacaggaaggggaacatcacacaccggggcctgttgtggggtggggggaagggggagggatagcattaggagatataactagtgttaaatgacgagttaatgggtgcagcacacccacatggcacatgtatacatatgtaactaacctgcacattgtgcacatgtaccctagaacttaaagtataataaaaaaaatagactctagtactctgtattatgcaaaatttgtctatgttacacttttttaacaacacaatcctattgcccttgaaatcttcttcaaagcatttctcgagtcactcttaaaaagcatctacaacctaaaagtataggaagagatttatttcctggagaagagaccccattgagatcttaaaagcacatataatgtgcctgtgcttaacttaaggtgcttaggacaaagaaggcgattgacatctttcaggtaaaacctggtaagtttggtggtcaaggaacacaactgagacatcacttggatgtatttctatgactattttaagaaacataaattgtggtgactcactcagctcacttttaactactgcatggtaattaaagatgcaaaataaaataagttacaagaagtgaggttttttattggttaaagcaatttttctatattttctccgcaagttggtcataaaagttctaagcattcctctttttataaaatcgaagcattattacttactctcttgttaacctatctggattttaattttgtaactttattatatttgttttgctgtgattctttaaaaagcacctttagactcagtgagatagcaaaaatatccaaataggccaaaaaattgtggcaatgtcctctcactcaggaaaattctgtgtgttttctctaatggccaagggaaaacttgtgagactataaaagttagtctcagtacacaaagctcagactggctattcccagatctcttcaggtacatctagtccattcataaagggcttttaattaaccaagtggtttactaaaaaggacaattcactacatattattctcttacagtttttatgcctcattctgtgaaaattgctgtagtctcttccagttatgaagaaggtaggtggaaacaaagacaaaacacatatattagaagaatgaatgaaattgtagcattttattgacaatgagatggttctattagtaggaatctattctgcataattccattttgtgtttaccttctggaaaaatgaaaggattctgtatggttaacttaaatacttagagaaattaatatgaataat

SEQ ID NO: 20130 - DNA, 2300 bp, Homo sapien
gtgcttattctaaaacaagtaaatgtttgcctatggtctgagattctaatccacggagttcattctaatccacattcaacactatcatgtaccagtgggcctcataacccacctagccctgtgatttttcaggttcacttttctaaacttgtgaattaaatatttattttcttagttcagaagaggaaaaaaactcttgtaattgttgcccatttcaggagaaatcttgcatatgaaaacaagagataaatatacacaactgaggactgtggtttaaacaaaatcttgagaatgttttttgaccttatacatttgtgctttagtataacaaaatgatatagacaaaggtaacttttaatagaaccagtcactaaattaaaaaaatgacaaattcttctgcttagctaagcaacagagaaggtaaaatactaattcaattcatcaatttaagcaatactcattaagagccaagtatgtgcttactgaataagctgctaaggtttggtggttacagagtgtgcggtgaaatgatgtctacatcacagtccaacattcacagagtttaaaagcctaccaagaatcaagacagacacaaatacctaacatagaagtttgtatatgataagagagccagagtacaatttaggagaagaaattgtatggaaggaaggttcatttccattagaccagaaaagacagcacatttgaaggcctgaataagaaatattctggataagatattgtggctgctaccagaatggctcttgatgatctctacctcttggtatttatacccttatataatctctttcctatagtgtaagctggtcccaggtacttgtttctattgaatagaatagaacaaaagaaatgagatgccacttctgagattagattataagatactgtgaatttcatcttgtgccctctccctctctctctttctcttgccctctcatttgaatgaagccaaccggcatgctgtcagtggcccagtgtaagtcctgttacaagaaattgatgattacctgtagccaaccctaagtgaagaactgaggtcctcagtcctacaaatggagagaaactgaatctagctaagaaccatgtgagtgagctgggaagaagatccaccctcagttgaaatttaagatgacatattgagcagacatactgagacacactgaaagtaagagagcaggaggaaacaaaaccagggtcatacaaagaacacaactgattttgagattctcacataagtattacaccttcagtgagcacgtgtactagaaatttaaaaaataaataaaataaaccttcaaagtgagctagcaaataaatttccctatggtctcagctctgagtggagagagaaaatgttccctgtggagtttatagccagaatccagctctcaaacaggtttcagcctgaactcacacaatctgtgtggcttccaaatttgcaagctgagaatttaattcaaagtggtctcaggttgatagcagtccaaaatgctaggtaggaaaaaaaatcctctctggacaaataaatcatcaaagcaagctcataagagcaggtttcaaaggtcatgagcttctaacacacacacaaaaatcacacacacaaaatgggggtagcagcaacatgggtagcgtattcaaacttgaaaagactttaaatatttgtattattagatgtagattatgaaacacatattttaatgtggttaatttttttaaggaatcaaaactatgagtaaagaccaagaaaattgtgctggatggccacttccaccatggctcccctcctatttaagtctgggtactgtgtcacccgaagtcttcaggcacattgttccaggtttgggtttgcctatgaaagaaactcatgagagctggaagtgaggagtgaagaggaggtcttcacataaagcaggcttaaggattagacatagcaggtttgacagatgtgatggcttgcagaatcctttatgagctcccactgtccatctggataagatttacagacctttcagaaattcctataagcttgggttctgtgcccactctctagactgtcaggctaagatctctgatataaaacagacctcttctgattttgtctagctgcttttctaatatctattcaccaagctcttccaataatagcataaggccctaattaatattaaacttttatcattataatacataggatgtcttctgttttcctgatcaaattctgactactattaaaatataaagaattgtccagaaatatataaaaaaagaatcacacattg

SEQ ID NO: 20131 - DNA, 2300 bp, Homo sapien
actctgtgctagccaatctctcattatgctgttcacctgttataatgaataattctctgtattaaattttaccactttaaacttttgagtggtttatgcttcctgattggactctgactaatatgttaggaagggtcccaggaggtaaacccacacagatgggatttgggcataggtttggtttcccagggggcagtgctgagctctttgccagtgggaaatgggatgctggtgatttccagtaggtgacctcacagtgactcaagctaccacttactgttgattgtgacgaaatgccagctgaggcacatgccttgggagctaagtggttgctgcccttgaccactgtgaagactggtgtgggaagggtcgctttggatgcacttgagcaggggtccccaacccctgagccatggagccgcaaggagccacacagcaggaggtgagcggtgtcgagtgagggagtgagggaagctttgtctgtatttacagccactcccctttgctcacattcccgcctgagctccaccttctcagatgagcagcagcattagatgctcataggagaacgcaccctgttgtgaaccgtgcatgtgagggatcgaggttgcgctgtccttatgagagtctaatacctattgatctgtcactttctcccatcacgctcaggtgggaccatccagttgcaggaaaacaagcttgacacgcccactaattctacattatggtgagttctataattattttattatatattacagtgtaataatggaaataaagtgcctaataaatgcaaatgtgcttacatcttttggcccagctcctacctcccggcagcctctccaggcccagaactttctccagtcagcctctacagaccaagctcatgactcacaatggcctatttaggcccataccctacgtcacggcagcctccgcagatgaggctactgcctcacaacagcctccacaggcacagctccatcgttacaatggcctctttagacccagctcctgcctcccagccttctctccaggccctgaactttctcaagtcgacctcaccaggcccagctcatgcttctttgcagcctctccaggcccagctcctgcatcttggtggcccctccaggcccagcctctgcctcccgtcagcctctacagtcccaacgtctgcctcacagcagattcttcacgcccagcatctacctcactgtggaccccccaagccaagctcccaacctttcagcagcttctacacacccagctcccgcctgccagtggcctcttcaggcccatggggctcattcctgacaacggcctttccaggcccagtttttcccttccggcggcctctccgggcccagaacctcctcaagtcagcctctccagacccacttgcaccctccgggcgttctctccgggcccagctcttcttcctggttgggtctccaggcccgattcctgcctctcaacaacctctttggactcagtgcctacccatctcctggcggccttggtcggcccacagcttcctcaagccaagctccccaggcccaggtcaggcctcacggtggcctctccaggatgagctcctgccctccgatggcatctccaggccccaaatggtctccggtcggtgggctcctccacgccaaggttgggcctcccggcgactgccgcaggcccaagttgtcctgaagtcgggctctcccggccctgcctcccagcaagtaagcaagctcttttggctcaactcctgcccagctcccaaccgcctttgtaggccccgaactttctccagccaagctctgagggcccacctcctgcctcctggtggcctgtacagttctagcactggttggagaacagcctctgcaggccccgcccttgcctcccaggggcctctccaggcccagctcttgcccccacggcggcctcccggggccaagtccctgcctgcctcccagcagcccgcgtgcggcccagctcctccctcacggtggcctgttgatgcccaactcatgcctctggcaccctgcccagaggcgtgagcccctgcctcacactggctcctcccacgctgagagaggtcagtgtgagccccttgcctcacaccggcccctcccacgctgagagaggtcagagtgagccccttgtctcacaccggcccctcccacgtggacagaggtcagcgtgagccccttgcctcacaccggcccctcccacgctgagagaggtcagtgtgagcccttgcctcacaccggcccctcccacgcggacagaggtcagcgtgagcc

SEQ ID NO: 20132 - DNA, 2300 bp, Homo sapien
agtcccagctacttgggaggctgaggtgggaggatcacttgagcccagggaggctgagaccgcagtgagtcatgatcaggcctctgcactccagcctgggtgacagagtgagaccctgtctcaaaacaacaaaaaagtagcagctaacatcaactgaccttttaccaggtgcctattgataccatagtttaatttcttataactgtttcttatttcacttaccaactctgtcttcagttactcccagatttttactgtgtgtgtacagatgaccttttgcttagattgaattgtctccccagaagtaagattactgtgagtcatggtgaatggacattctccttacccttgatgtaaattgacagggttttgggtgcctcccagctataatcttagcactttgggaggctaagagaggaggattgcttgaggccaagagttggaggaggcagtatggcagtatggtgagaccctgtctccattattttaaaaaattgacaggctttaccctggaaggcttatacacaatttaaccacccctcatagtataagaaagtgcccatttcactgcacctttgccagcacagggtattataatttagtaagccattttttgtttgattattttaaatagacaaaagacctcatattactttacttgtcacatttcaacatctttcctcagcttattagctctatttcttttctgtctgtaaatggttgttgtggttttgttctttgagacagggtcttgctctgtcatccggctggactgtagtggcataatcatgcctcactgcagccttgacctcccaggctcaaacttcagcattccgagtagctgggactacaagtgtgcaccaccacccccagctaacttttttcttcttttggatagagacagggtctcactgtgtcgtccagagcggtctctagctcctggccttaagcaatcctcctgcattagcttctgtaatggctggaatttcaggcatgagccaccatgcctggcctgggctagtcccatattctctagagttatctttactctgtgctagccaatctctcattatgctgttcacctgttataatgaataattctctgtattaaattttaccactttaaacttttgagtggtttatgcttcctgattggactctgactaatatgttaggaagggtcccaggaggtaaacccacacagatgggatttgggcataggtttggtttcccagggggcagtgctgagctctttgccagtgggaaatgggatgctggtgatttccagtaggtgacctcacagtgactcaagctaccacttactgttgattgtgacgaaatgccagctgaggcacatgccttgggagctaagtggttgctgcccttgaccactgtgaagactggtgtgggaagggtcgctttggatgcacttgagcaggggtccccaacccctgagccatggagccgcaaggagccacacagcaggaggtgagcggtgtcgagtgagggagtgagggaagctttgtctgtatttacagccactcccctttgctcacattcccgcctgagctccaccttctcagatgagcagcagcattagatgctcataggagaacgcaccctgttgtgaaccgtgcatgtgagggatcgaggttgcgctgtccttatgagagtctaatacctattgatctgtcactttctcccatcacgctcaggtgggaccatccagttgcaggaaaacaagcttgacacgcccactaattctacattatggtgagttctataattattttattatatattacagtgtaataatggaaataaagtgcctaataaatgcaaatgtgcttacatcttttggcccagctcctacctcccggcagcctctccaggcccagaactttctccagtcagcctctacagaccaagctcatgactcacaatggcctatttaggcccataccctacgtcacggcagcctccgcagatgaggctactgcctcacaacagcctccacaggcacagctccatcgttacaatggcctctttagacccagctcctgcctcccagccttctctccaggccctgaactttctcaagtcgacctcaccaggcccagctcatgcttctttgcagcctctccaggcccagctcctgcatcttggtggcccctccaggcccagcctctgcctcccgtcagcctctacagtcccaacgtctgcctcacagcagattcttcacgcccagcatctacctcactgtggaccccccaagccaagctcccaacctttcagcagct

SEQ ID NO: 20133 - DNA, 2300 bp, Homo sapien
gggattttaagggctaacccaaatcctgacccaaggggaaggatggaagggggaacagcctgcagcctcacctccaccctctatcctcccaggtctacctccacccctctcctgggtctctccctcttggcttggccccatcccacagcccccactgtcttccccccgctcccactttggcaggcccctccaagtgacctctcccttgctccccagcacacagtaggtgctcaatgaagaacaccgcctttccttgactccagtagatgttgcaccctctccatcttaggagaaaatgtgcgttggctgtcaagactacactgacagcagtggtcactcatttgcagacagggtgaagtgtgggggaaagcgcagtagtgacgctgaaccctacatttatgtagcattgatgctaggcaccagaaccctcacaatcctaattccgacgggagctagagcccccccaccccaccgtgagtgcagcaagggagcacctcaaccctgcccttggagggccacaggtcagcttgcaccgtcttcccacccagcaccactctgggtgcctttgctgtctcccaagagccccttgcccttggagttccctcatgatgcccccctgccccacgtgcaggtgtctgaccatccgggaagcagggtcgaggagctcccagttgaagtccagttgctgagacgcaccctgttttggtgttgctggggcagggggctgatggtggtgctgaacgggttttagaggagggtcagggtggcagcggatctggggcccagcagccttgtttctgaccccaggcctgccacttcccatttaagtgaccgtgagtggcagaggtcaaggctggactccggaaacgtgggtctgacactcctgaggcctcccggatggtcccagccgaaaggacccagtgtgggtcccttgggcctgggtttccctggctcaggtgccctcaatccccaggcaccctcagctcagggctccccacgacctggtgggggcacagaccccggcgccatttcatggggttcccagctcctggcgcccccgtgctcttctgtgaaatgggacagcaagtgcgctgataggaacggtgcctgggcacagggctgcgcctggacaccctacgccgtcgcaaggtgggtgccgaggaactcgagcttctaacgtgccaggggtccaaggacgcgccaggattttgagtattaggagaaaagaaactcctgaaatgaagccacgtcgccccttccactttaaggtgcctcctgctgtcggagtttccaggcgcacacggcgcggctgccactccctgaggaggaaagtcgggaaccgtcccgcggggccggtcccgccgctgctcgtcctccttctccacgtccccgcccggggctccgccggcccgacccgcggggaacctccagcctctgaggacctcacgccgctcggagacccgcacagcccgggtcagggccgggactccgggcggacgaggtccccgtggcgcccgcacgctcgccccacccgctcttttgggcgccgcggccaggcgggggcagagtccgcgcggtcccgggtccgccgcgccccgccccccccgctgctcccctgcccgccgctgccgtcccccctccctcctcccctcccccccttcttcccttccctccccctcccccctcccctccccgcccctagccctcccctcctcccctccccctccctcctcccctccccgcccctaaccctccctcctcccctcccctcccctcctcacctctcccctcgtgccctccccgcccctcccctcctccccttcccgcccctcccctcctctccgcgcggggcgggctccgcgccacgtgactccgcggccgggccgggacgcgacgggacgcgctgggaccggcgtcgggggtcgcggggaccatgcagcggaggtgggtcttcgtgctgctcgacgtgctgtgcttactggtcggtaagagccttggggacccgggtgttggggggaccctcccgggacggacacgcccccggctgcgcgcaagtttgcaggggaacgcggaggctgcgcgccctcgtccctccgaggaccctggaggcggggacctcgcgtgaggaccagacctccctccgcgccccgcactgcgcgcgccctcccaggctcgggggtccccgcgtcccaggcccagggggatgggggtcgcgagaggcccggggagccggggccagcatcccccgccccggcagcaggaagtctgtgcggaggggccgcgcgcgcgcctccatcccg

SEQ ID NO: 20134 - DNA, 2300 bp, Homo sapien
gctatttgcaggtgaaggagaaagccactgaggcctggcctccaggccaggctctgtccctgctgggagctgccctggcctcaggttcttcctggaagggaggaccaggcagctgggggcagcagcagatccagctatgaaagccgtgacaagaagttccttgaagtgtggtgggctgcagtcagcatatgtaggagacgaccccaatcctgaccctaatcctaattcttgctttccccaccagattttaatccttatcctgcccagggattttaagggctaacccaaatcctgacccaaggggaaggatggaagggggaacagcctgcagcctcacctccaccctctatcctcccaggtctacctccacccctctcctgggtctctccctcttggcttggccccatcccacagcccccactgtcttccccccgctcccactttggcaggcccctccaagtgacctctcccttgctccccagcacacagtaggtgctcaatgaagaacaccgcctttccttgactccagtagatgttgcaccctctccatcttaggagaaaatgtgcgttggctgtcaagactacactgacagcagtggtcactcatttgcagacagggtgaagtgtgggggaaagcgcagtagtgacgctgaaccctacatttatgtagcattgatgctaggcaccagaaccctcacaatcctaattccgacgggagctagagcccccccaccccaccgtgagtgcagcaagggagcacctcaaccctgcccttggagggccacaggtcagcttgcaccgtcttcccacccagcaccactctgggtgcctttgctgtctcccaagagccccttgcccttggagttccctcatgatgcccccctgccccacgtgcaggtgtctgaccatccgggaagcagggtcgaggagctcccagttgaagtccagttgctgagacgcaccctgttttggtgttgctggggcagggggctgatggtggtgctgaacgggttttagaggagggtcagggtggcagcggatctggggcccagcagccttgtttctgaccccaggcctgccacttcccatttaagtgaccgtgagtggcagaggtcaaggctggactccggaaacgtgggtctgacactcctgaggcctcccggatggtcccagccgaaaggacccagtgtgggtcccttgggcctgggtttccctggctcaggtgccctcaatccccaggcaccctcagctcagggctccccacgacctggtgggggcacagaccccggcgccatttcatggggttcccagctcctggcgcccccgtgctcttctgtgaaatgggacagcaagtgcgctgataggaacggtgcctgggcacagggctgcgcctggacaccctacgccgtcgcaaggtgggtgccgaggaactcgagcttctaacgtgccaggggtccaaggacgcgccaggattttgagtattaggagaaaagaaactcctgaaatgaagccacgtcgccccttccactttaaggtgcctcctgctgtcggagtttccaggcgcacacggcgcggctgccactccctgaggaggaaagtcgggaaccgtcccgcggggccggtcccgccgctgctcgtcctccttctccacgtccccgcccggggctccgccggcccgacccgcggggaacctccagcctctgaggacctcacgccgctcggagacccgcacagcccgggtcagggccgggactccgggcggacgaggtccccgtggcgcccgcacgctcgccccacccgctcttttgggcgccgcggccaggcgggggcagagtccgcgcggtcccgggtccgccgcgccccgccccccccgctgctcccctgcccgccgctgccgtcccccctccctcctcccctcccccccttcttcccttccctccccctcccccctcccctccccgcccctagccctcccctcctcccctccccctccctcctcccctccccgcccctaaccctccctcctcccctcccctcccctcctcacctctcccctcgtgccctccccgcccctcccctcctccccttcccgcccctcccctcctctccgcgcggggcgggctccgcgccacgtgactccgcggccgggccgggacgcgacgggacgcgctgggaccggcgtcgggggtcgcggggaccatgcagcggaggtgggtcttcgtgctgctcgacgtgctgtgcttactggtcggtaagagccttggggacccgggtgttggggggaccctcccgggacggac

SEQ ID NO: 20135 - DNA, 2300 bp, Homo sapien
tcagaccttaaaatatccttcactcttttttttttttttttttgagacaggtctcactctgttgcccaggctggggtgcagtggcacaatcactgcttaccgcagcctcgacctcctgggctcaagagatcctcccacttcggcctccagagtagctgggactacaggcacattatcgtcatgccctctaatgtttaaagttttttttttttttttttgaaacagtgtctcactctgtttcccaggctggagtgcagtgatcttagctcactgcaacctctgccttcccaggttcaagtgattctcttgccttagcctccacagaatagctgggattatgggcactcgccaccacgcccggataatttttgtatttttagtagagacagggtttcaccctgttgcccaggctggtctcaaactcctgacctcaagtgatcctcctgcctctgcctccccaagtgttaggattagaggtgtgagtcaccgttccaagccacaatacccttctcttcacccaagtcctcatttgacatctatgtgatgattcttgccaagccctctcctaagagtcttccctcgttttgccaggtggactcaagcccttgtcttcgggcccctccacctgttacagcacagcacctcactctcttatctgttcatgcttctccctgcttcacaggacctctggctacccagcacccagttgaggactgcataagatatgtgtttagttcactgaatgactgaatgaataataacaaatgaataataaaggaaggaaccaactcttgcacaaatcagtgaggactcttcaacacgagggccagaaccctcaatctcaatgatgtaaaccaaaaaaggagtgagggtagacccctccagagtggttcttctatctcttggttggtgaattctcagaggactgagtaatgattttgcatcaggaatcaaggctgatgcatgtcaagttctcactattcattggctgatcactgggaaacaggaatgagactcattctcttcttcctggtccccaattcccttcctcctggtccccaattcccttcttcctggtctccagttctcttcttcctggtctcagtaggaaccgccctccactcatttgcgcaagccagacatctggaggccatccttcactctctccagcttccctccatcagcgagtcttgtggtgtccaccttctcaagtctctctgcactctggtccaggccccacagctcccacctggcccctgcctcttcacgccccacccctgcttcctatcctctctctgcatcgtgcgccccgaagattcacggcacttatccgtctcaaatttaaggtgtggcgagtccttgccttcccatcctccactctaaacgccctgaagacaggcgttagggctgtctccttcaaaccctcaggatcagaacgtgcacgtgttccagaaatgttcaatctgcgaaacgacggactgcagaaccaaatggccctggggtcaagcccacctccctgcctcccgccttgggctctccggcgcggggccaccgtttctaaaacctctccgactggtgcgcgttcgcaagctccccgattggttcctccgcgcgctagtttgctcatcacgggtgcgaaagtgcagaaaattccagaaccacgcagcccggacaccaattctggctctatcactgacactctgggtggcccgtcgccctgggcctcagtttcctagtctgccacgcggggtattaacagcgagcagccgagggaatgaagaggtcacacaggaccacgtggtccccacgcaggtgtgattatcaggaattcgtatttttatggaatgcagtctcctccgccaaggccaaggccaagatcagggtccagcagagacggccggaaagacaccgcaagctcgccagaagccgccggccacgctcggctgcgcgcccgcgcccgcgcccgcgcacctactacgcgcccggcccgctctccgccccctccaggctccgccccctgccccgccctccaggctccacagccaatgagtgcgcggcccctcatccggggatcccggcgcggccaccgcctcccgcgcacacacggccatggcggaggtgagtgagcgggccgggggagccggccccccgcccccgcgcgtccgcgccccccgccgccgtggctcggcctcgtcgtgggccccagggacggagagccccgctctggagctctgaggccggccggggcgcctggcccgtccggggccggaggggcgcggggctccatcggcggccgcccc

SEQ ID NO: 20136 - DNA, 2300 bp, Homo sapien
taaatcattgagtgcaaggtaagggtttacgagacttccggccaagaaaggggattttcccatggcctccttgatgggaccggatcctccccggggcccttctgcctggagtcctccgagagacccctttcctgacagaggtggtggtgaggctgcgtctgggagcagagcatcagggagatgggatgggagctggagagggctttgtgtgtgtcgatgaactgggtctcttgcgtgccgagtggtcaccatgcccggagggccggccccacgctggtggcaggggtgagggacagagcagtcctcggggtgggctagcactgggtgggggtaggggtgggggtcctaggcctgggagcccagaaaggggagggatggtcagggactctccctgcgtgggggaccgacaggcttgagtcttcaatgatgagtagaaaaccaccaagcacagaagggtgaaaggctgggtgggggcacacagcacagagggggagaggctgggtggggcacagagggggagaggctgggtggggcacagagggggagaggctgggtggggcacagagggggagaggctgggtggggcacagagggggagaggctgggtgggggcacagagggggagaggctgggtgggggcacagagggggagaggctgggtggggcacagagggggagaggctgggtggggcacaggggggagaggctgggtggggcacagagggggagaggctgggtggggcacagagggggagaggctgggtggggcacaggggggagaggctgggtgggggcacagagggggagaggctgggtggggcacaggggggggagaggctgggtggggcacagagggggagaggctgggtggggcacagagggggagaggctgggtggggcacaggggggagaggctgggtggggcacagagggggagaggctgggtggggcacagagggggagaggctgggtgggggcacagagggggagaggctgggtggggcacaggggggagaggctgggtggggcacaggggggagaggctgggtggggcacagagggggagaggctgggtggggcacagagggggagaggctgggtgggggcacagagggggagaggctgggtggggcacaggggggagaggctgggtggggcacacgggggagaggctgggtggggcacagagggggagaggctgggtggggcacagagggggagaggctgggtgggggcacagagggggagaggctgggtggaggcacggggggggagaggctgggtggggcacggagggggagaggctgggtggggcacggagggggagaggctgggtgggggcacagagggggagaggctgggtggggcacagagggggagaggctgggtggggcacacagggggagaggctgggtggggcacagagggggagaggctggaaattcagctcctttggcgacgtacgaggaattcctgaaggcagcagcctggggaatactccagttataaccattattttgttgtgagggttggaacagcctattttgaagttatttctcatgagaggttggggctggaagcgtctgtatcacctagggtgcagttttagctgctaggaattggaaaccaagccaaaacgacttagtactaaggaaacttactgtttcaagtaacaagaagcctggacacagagtggattccaaggctgctaagttcagaggctcgacagccacatcaaaggcccacctttcagttcatctgccctcagatggcaggcctcatggtcacaagaaggctgcctgggctctggacattaccgacgggccccacagggacaggaacaggagacgcggtctcttccttgtgtctccttttgagagagggaatccatagctagatgcccctgcaggttcccgtcaggtctccttcctaaaccaatcctgggaggtcctgagtgagccgtgaccaccaggactgagtcctgatcccagcgcaagcccaggtgaccagcattggagacggcgcacgggttagaatgtggaccgtggggaatgtgacggacgctctcctgttgccgcggccaccacagacacatttgggtgccgggagagtgaggccgcgggggctgggaagggaccggtgtatgggggacagcaggcgaaggtcactcgggaaccagcccagctctgaggctgcgggcaggtcggaaagggagcaggacggcgacccccgtggcctccagagctctgtgtacgagagccggcgggtcacagaccccgaacgccaggacctggacaatg

SEQ ID NO: 20137 - DNA, 2300 bp, Homo sapien
caggggcggtggacagacccccaggatccgggcccagcagagacggtggacagacccccaggatccgggcccagcaggggcggtggacagacccccaggatccgggcccagcaggggcggtggacagacccccaggatccgggcccagcaggggcggtggacagacccccaggatccgtgcccagcaggggcggtggacagacccccaggatccgggcccagcaggggcggtggacagacccccaggatccgggcccagcaggggcggtggacagacccccaggatccgggcccagcaggggcggtggacagacccccaggatccgggcccagcaggggcggtggacagacccccaggatccgggcccagcaggggcggtggacagacccccaggatccgggcccagcagtgacggtggacagacccccaggatccgtgcccagcaggggcggtggacagatccccaggatccgggcccagcaggggcagtggacagacccccaggaccctcctcccgcctcaggcccagcaggggtggtggacagcagcccaagggtattctgcatggcagctggagctggggttcgggggccctgctagtctgtggtggggcctgcccaggcttcctggaggcggcggcggtgaaggggagaattcctcggtgtctgcctccttgtcagacttcggggctgcgtcgcggttgccccagcacaaaaatgagggctcatcaacgtttgctgggtgagcaaagcttagatggggtcacagctcctccgggtttcactttcccctctggacggcaggactctaaccccttattgcaagggtacgtggagagtggggaggcctcagcccagctctctcgccctcctggacccctcttctaccactgtggcagcagccgctcctcccagcttgggccacatccagacttggggacattcccagaatgcaggaggctcctggacaatcaataattcaataaagcgccaggcgtccgccggctccgggttggtcctggggatatgttatcttgctggctccaagcacgaggaggctgggaactgctcagctcggttccagaagaggaaactgaggcggggagggcagggagggagggagagaaggaagcagtgaaggccggggctggcagatcacgaagcagctggcaggaggggggtcggggcctcaggagggggggaccctgtggtctcaggaactgccaggaagcctgggtttggacctggtcttgccccctatgggtttctccatccgtgaatcacacgcatgtgccttctctcttcgccccgaccctcacgctttcctgctgtattcctgttccgggcgtcaccacccctgcagttctaagctgcacctgtacgctctgtgggcatcctgcccctgcatcaccagggctggggccacctccctccgtcccagctgtgtccccggtggccaggtcactgtccagcatcaagcgggtgctcaggaaacgtttgtccatgaaatgaaggagccccccccttccaggcttcttgtagggctgctgagaggttgcccatttagtaagacctgctgtcctagctgttcggtccttgtttctggaaggaaaccccccaccttcctcatctacagattgagaattgcagtaggacctgcgtactgggttgtgtgagagtcagagacccgccaggacgctgggaggctggcagggaggaaacgctccatcataaacccagctgcatttattactgttgccgtcatttaattcgtcgtcgttagtcgggaaagctcctcgccggcagcgagtagggggtctgggaccctcttccggtatacggaggcaggggcttgggagtccgacttcccggaatctgcgggcgtgagcgccgggggtggccgtcagccaaccgtgaccacctgcttgtctcccaccggcccccagtcagcccccgggccctggcgaggctcctccctgccaccagcctccgggggctgcggggagacggccccacccccttcccgcgggggcgggggcgcgggcgcgggcgcgggcggccgtactcggaggaatacggcggcggcggcggcggggctgggcggtttcccgccgcgggtgaatgagtccgactgcgctgccgccgccgccgccgcccgcatcgaagctccggccgcgtcccccgcgccagccccgggagcctgcgcgccgagacccctgcgtgtctgcgaacagacctccggcctcgggccatcaccccgggcaggtaagtccggggaccccgcccggtctgcggggacc

SEQ ID NO: 20138 - DNA, 2300 bp, Homo sapien
tccagattgttccagatgttgcctttgaccagctactgtagaattacaaagtattttccagtttatttttgagacagagtctggctctgtcacccgggctggactgcagtggcacagtcgtagctctctgcagcctcgaactcctgggctcaagtggtcctcctgtctcagcctcctgagtagctgggactacaggtgtgagccaccgtccccagctaagttttgtagagatggggccttgccacgttgcccaggctggtccccagctcctggcctcaagtgatcctcctgccttggcctcccagttgtaatctcaatcttatgatttcatccatcataagatgctctccccccccatttatcatgacttatgcaccttacaaatggtgatgtatctgagggataaatatggtattttcaggttctaatttatttgagggtgtacaaagtatgtctcaatttacaaggaattttgggatcaagttactgaattgcttcaattccttcttcctccctctctccctccctcctttcctttttttctctctttttcttttcttttctttttttttttttttttttgatggagtctcgcactgttgccccggctggaatgcaatggcgcaatctcggctcactgcaagctccgcctcccgcgttcaagcgattctcccgcctcagcttccccagtacctaggattacaggttcccaccaccacgcccggctaatttttcatatttttttagtggagatggggtttcactatattggccaggctgttctcaaacttctgacctcgtgatccacccgcctcggcctcccaaagtgctgggattacaggcgtgagccactgcgcccggcccttctttcttactcttttctctctctctcttttctttcttcttttcttcctttcctttctttctttcttgatggagtctcgctctgtcacccaggctggagtgcagtggcgcaatctcagctcactgtaacctccacttcccgggttcaagcgattctcctgcctcagcctcccgagtagctgagactacaggcgcccaccaccacgcctgactaatttttgtatttttagtagagacggggtatcaccatgttggccaggttggtctcgaactcctgaccttgtgatccacccacctcagcctcccaaagtgctgggattacaggcgtgagccaccgcgcccggcctaactgcttcagttctaagatatacactctccccgcctgaattttgatatctctagagtctggattttgtttaaaaaccatcaattgcatatttgaagtgcatcattattttacagggaggtttttctcttctctctcctcctggtacctaaaatcatggcgcatcttacagttgctctgggccaatgagatttagtaatctccagcttctaaagcatttaaaggtttacaaagcattttccaatttacaaggagttctagggtttatgaagcgttttgagcgtccgagggctgcacaggttatttcccaggtgaggaggtgctagagggttcggaggcctctcagagcgtaggaggcgttttcagccatccagctgaatcctcaggtggctcttgggctggtgtgagcctggtctctgcgtgaagcacacggcggcgggcgggcaggtgggggctcttgtgcaccccggcctgggacagagctggagggggcagggcttgggcgagagctgcctgttctcccagttcctgagccccctcagactgtttctggtgtccccgccactgcctagcctctagcctggtgtgtgatacctcagttctttcccaggccagattttctctgttaaatggatcgctggggtcagaccggcagccactacacctggagaagcttcagaacgtctaccagtaccttgttaaaaggcagattcccagctcccattcccagtgccacacagaaggacgtgattgtgccacaggcctaggaatgtgtatttgtccctgttccgcacgtgaagtgtgcacagggcccccagcctcacccgggaactgctcggcagccgtggatttacccctgcttcccacgtgaaatgtgcacagggcccccagcctcactcaggagctgctcggcagccgtgggacacagggtctcttggttttgcatccagttccagcgctcggtagcgctaagagggtctcgttcaaaaatgcagctggattttgatttggcgattcagattttcaggcctgtgtctccaggatttcaggggtgtgtttcctggagctgcaaaccaaatgaccacacacg

SEQ ID NO: 20139 - DNA, 2300 bp, Homo sapien
gtctcctgtcggaggccttgtctgatgggggtgtcctggactctgccttaaaaggggccagtctgacaggggaggcccattctctctagcgaatgcggccgagcagtgtaatgggtgaggcccagcccctcctacaggaccccatctcccggggcctccctgctgaacccccagtctggttgggaatgccgctggcccccgctctgtgagaagctccactctctcgggggtaacccacctgcctctgtcggaacccccggtctgaagggaggaggttcgtcattccttgaaagaatggtcagtgtggtgggaggctgcggccccgtctgtgaggccctccagtcaacaggggaagccagaccctcgccccatgggactccttagtctgagaggggaggcctcgtcttttctctgtgggaatcccggcctgctgggacgactgcctggcccgctggtcttgcacgctgactctgggtctccctagtctgatgagttttctcttcacgtgactccggggtctgaggattcttcctacggaaatcccggcctgatgggggaggcacagcttcctgcttgaaggaacgcccagtccaatgagggaggcttagtccacctctggacaaagtggctagtctgacggtgagcccgttccttccttccccgtggatgacccagcccgagggagcccccagccgggcggaggaggcttgtccttccttggctgaggtgtccagagttctctcctgatttcctgcagcctcgactctgcccttctccagcacggagaggtgttggctctgagctgccgggtagggtccttgcctgagctcaggatgcctcccaagctaactgcaaatttctccctttcctccaccacctgacaaagcagcttctcctcagcttcacaataatgacaccatctagcacctagtgggcgcctgctgtgtaccaagcactacgtgaagagcttgctcctcttggctcctcacagcagccctcagatgggaaaggaggggcttggggctctgagcttccctctgaggcaggctgtccctcagggtgaccagactgccaggcagccccggttgaggaagggtgtcttctcgtccgtcctccacgaagagtcctggggctgcctctgattcgccacgtgctcgtccccaaaccagtcgctggctgggagggggaggtgaacatgctgactggccaggctaggagttggagctggctcagcccccagggtcagggctggaggaccccccaggaccaggagctggaggggcgggagaccagggagcgagggtcagggcgggaggaccccccaggaccaggagctggaggggcgggagaccagggagtgagggtcagggggggaggaccccccaggaccaggagctggaggggcgggagaccagggagcgagggtcagggcgggaggaccccccaggaccaggagctggaggggcgggagaccagggagtgagggtcagggcgggaggaccccccaggaccaggagctggaggggcgggagaccagggagtgagggtcagggcgggaggaccccccaggaccaggagctggaggggcgggagaccagggagtgagggtcagggcgggaggaccccccaggaccaggagctggaggggccggagaccagggagtgagggtcagggcgggaggaccccccaggaccaggagctggaggggcgggagaccagggagtgagggtcagggcgggaggaccccccaggaccaggagctggaggggcgggagaccagggagtgagggtcagggcgggaggaccccccaggaccaggagctggaggaattcaaggccgccccagccacgggtagatgcatctccgtcagggctggggctccagcactgcagggtctgaaccatgctgctttctgcctggggacacgcccacccctgtttgacaatgaggggactgacactcagaggagagccttagagtggcctgtcggatgttggcattgttggaagccgttagaaaacccagggcagaacattttaacgctaggggcaagagaggggtgccggctgtcgtcttgagtatttagggcacattggaggccccgcggccaatgcagtaagaccagacaaggaaacgagaggcgtacgctttgggaaggaagcccacctgacaaggcaggaaaaagaaataggagttaacctctgaaagaaagagctgctgttaccctttgtacatgcttagtacgtgcctagaaaacccaacctggggagtccaggttgctacacatgtgagcccacc

SEQ ID NO: 20140 - DNA, 2300 bp, Homo sapien
gtttctctgcatgttggatataggtactgcgtcatccacacggtgttaggtttctgtgcatgttggatataggtactgcatcatccacacagtgttaggtttccgtgcacgttgggtataggtaccgcatcatccacacggtatgaggtttctgtgcatgttgggatataggtactgcgtcatccacacggtattaggtttctttgcatgttggatataggtactgcgtcatccacacggtgttaggtttccgtgcacgttgggtataggtactgcgtcatccacacggtatgaggtttccgtgcatgttgggatataggtactgcgtcatccacacggtatgaggtttctgtgcatgttgggtataggtactgcgtcatccacacagtattaggtttctgtgcacgttgggtgtagatactgtgtcatccacacagtattaggtttctctgcatgttggatataggtactgcattcgtccacatggttcaaaacatcatggagtttaaaaagccgttcaatgagcaatctctttcatacctgtctgcatctgttttctttgcctccctgatcaggcagccactgttagctgtcagtggctcctgagttattttcctagcttttcaacggatattcaagccagttcaaacgtgcgtcatagcccttgtttttgcagatagggtgtgctacccatccatcttccaccttgctgtgtccatggggcaaacatcaggggttcttcccacactgtgcacgccagacttcctcatggttacatcatttattccactcacgccctggtcctggacatctgcgttgattgcaggcctttgccatgacagacagcagtgtggtgaccttaaacggtccgcctgtgtgccaggactcaacaaacgcgtcccagggaggggcactcgggccatttcagtaggaatcagtaattgcccgctcaaccgacattcccaccgggcacttcgagctttggctttttgtttttgagacgtcttgctttgtcgcccaggttggagggcagtggtgtgatcatggctcacggaagcctccacctctcaggctcaagcagtcctcactcctaacactccagagtagctggaaccacaggcgtgcgtcactgcacccagcacatttttaaattgtgtggaggtgaggtctcactgtttcccaggctgatctcaaagccctgggctcaagagatcctcccttccctgtgcggggtgcaatttctcttccctgtgccgtcccctcccctgtgccatgtggcctcccttttcctgtgccgtgtgcagttcccccttccctgcgccgtgtgcagttcccccttctctgtgccgtgtgcagttcccccttccctgtgccgtgtgcagttcccccttccctgtgccgcccccttccgtgtgctgtgcgccgtcccctgtccccttacctgtgccgtgcgcaattccccttccctgcgccgtgtgcagttcccccttccctgtgccgtgcgcaattccccttccctgcgccgtgtgcagttcccccttccctgtgccgcccccttccgtgtgctgtgcgccgtcccctgtccccttacctgtgccgtgcgcaattccccttccctgcgccgtgtgcagttcccccttccctgtgccgtgcgcaattccccttccctgtgccgtgcgcaattccccttccctgtgccgtgcgcaattccccttccctgtgccgtgtgcaattccccttccctgtgccgtgtgcaattcccccttacccaagccattcctgatgggcattgaggatccttcccgctccctcaggtagctccgcggcaggcgcccctcgttcccacgagcccttctctccagtgcatgctgagccgggaactgccgggtcacggagcgccggccttaatcacgttaccggcggtgccagtccaccctggaggcggctgtgcagtcggctcgcccaccagccccgcctgcggctgcctgtttcctaacagccttgctaacatctgtgttgagctttttttagatcttcccaaacaatctggcatttcgctgccaagcgtcagagccctcgagctggtcagagaaactcgagccatcgagtgcccacccggtgcccagctgtgctctggtcctggcgcacgttcctctgggatgctggctgctcaccccggaccgggggctcgccagcgttccctgcccctgtgcccacacccgggctgttctcacttgcactcatgcccttcccgattctctggccaagaactcctacaaatgtgcccatagcgcgggtcc

SEQ ID NO: 20141 - DNA, 2300 bp, Homo sapien
aggctggcagggccggaggagtcggcctggggggacgaggaggactctttggagcacaattactacaacagcatcccggggaaggagccgccgctgggcgggctagtggactccaggctggccctgacacagccctgcgccctcacggccctcgaccaggtcagcctctgccctcggggggatggggacagggatgccccagctgctggttccctggacctacctccagctcttctttctgctcctgttctcctcgatcctagaggagggtctctcactcagactcactcactcactcactcatgatttcacttactcacagactcacaatctcactcacaatctcacaggctcacgatctcactcatgatttcactcactcacagactcacgatctcactcacttgctcactatctcacagactcatgatctcactcagtctcactcactatctcactcacagactcacgatctcactcagactcatcatctcactcacgatctcatgatctcactcactcatgatctcactcacagactcatgatctcagtcacgatctcactcactcatgatctcactcactcatgatctcactcatgatctcactcactcatgatctcactcaggatctcactcactcactcaatcacaggctcacaatggggcgccgtgtatctgcccggcctcctctatctctcactcactatctcactcacgatgaagcgccatctgcccggcctcctctaactctcactcacgatctcactcacgatgaagcgccatctatctgcccggcctcctctaactctcactcacgatctcactcacgatgaagcgccatctatctgcccggcctcctctatctctcactcacgatctcactcacgatgaagcgccatctatctgcccggcctcctctatctctcactcacgatctcactcacgatgaagcgccatctatctgccccgcctcctctatctctcactcacgatctcactcacgatgaagcgccatctatctgccccgcctcctctaactctcactcacgatctcactcacgatgaagcgccatctatctgcccggcctcctctaactctcactcacgatctcactcacgatgaagcgccatctatctgcccggcctcctctaactctcactcacgatctcactcacgatgaagcgccatctatctgcccggcctcctctatctctcactcactatctcactcacgatgaagcgccatctatctgcccggcctcctctatctctcactcactatctcactcacgatgaagcgccatctgcccggcctcctctaactctcactcacgatctcactcacgatgaagcgccatctatctgcccggcctcctctatctctcactcacgatctcactcacgatgaagcgccatctgcccggcctcctctaactctcactcacgatctcactcacgatgaagcgccatctatctgcccggcctcctctaactctcactcacgatctcactcacgatgaagcgccatctatctgccccgcctcctctatctctcactcacgatctcactcacgatgaagcgccatctatctgcccggcctcctctaactctcactcacgatctcactcacgatgaagcgccatctatctgccctgcctcctctatctctcactcacgatctcactcacgatgaagcgccatctatctgcccggcctcctctatctctcactcacgatctcactcacgatgaagcgccatctatctgccccgcctcctctatctctcactcacgatctcactcacgatgaagcgccatctatctgcctggcctcctctatctctcactcacgatctcactcacgatgaagcgccatctatctgcccggcctcctctatctctcactcacgatctcactcacgatgaagcgccatctgcccggcctcctctaactctcactcacgatctcactcacgatgaagcgccatctatctgcccggcctcctctaactctcactcacgatctcactcacgatgaagcgccatctatctgcccggcctcctctatctctcactcacgatctcactcacgatgaagcgccatctatctgcccggcctcctctatctctcactcacgatctcactcacgatgaagcgccatctatctgcccggcctcctctatctctcactcacgatctcactcacgatgaagcgccatctatctgcccggcctcctctatctctcactcacgatctcactcacgatgaagcgccatctatctgcccggcctcctc

SEQ ID NO: 20142 - DNA, 2300 bp, Homo sapien
agggggtctgagagaccagaagagagacccagggcgaggggaggccggaggtggagccaagcttttgagcaggcagccaggtaggcttcctggaagaggcaatattgaagctgggttttgaaggatgtataggagcttgaggtattctaatatctgccatcagtagctgcttgctatgttttggatattaataaagatcatctaggcttcatagcaactcaggaccaggggcatctactgagaggaaatggtgctttggagagactggacatttgtcctggggcatgctgtgagcccccacctcagtctgatgtcaggatttgaactctggatgttggactgagttcctgccactgtctccaagggacaggaaggaaacacaccgggggtgccgtgtgactgagccctctgtgtgccagggagggatggcacctggaccaccttacaaacctcccatccagaaagaccctaatcccggagcttgggagggtgcgacactgccccgggacctccctgagggatgcagcctgggaggcatgcagggcgcagagagggggtggtggggctgctctctcctcagcccacagccctcagcctagggccgccaaacctgtcccaccctttacccattaggtgaacacaccccaggacccagcagcctggatcccctgcatatgcctggacacgcacccagacacagcgtacaccctgcgcacaacacacacaccgcgcgcaggtccagccgcggctccagcccgaccaatcgcgcccacgatctgctcctcccgcggacgcgcaggggctgagtccgacacgcgccgcggcagagacggccgatcgcgaccgcgcgcctcgctcccctcccccacctccccggccccgcgggcggcgccggctgtgatctcatcccctgaattatcgatcgggctccgggcagcctcgcccctccctccctccccacctgccagcgcgtcccggcccctccctttgttcccggcaatcagccctgcttggggcggggcaggtgcaggggagctccagccaagtcgggccaggaggctgggtcccggggtgacagtgacaccccgttttctggtgcagaaggaaccgacccttgaggccagggaaggtgcggccggtctcggagaggttgaggctggggatggagcgaccggcctgggaggctgaggcccagagctcagatgagctggtgcgggactgggctccccagaagtgagggaagaagggccgcgaccctccagcccgctcccctgagttacagccggagaaactgaggccgggacaggccgcagagcaggggcccggctccgctcctagccccgccccccccccccacccccgagccggcactcctgggtttgagcttcgtctgtgagccctcggccgcgccccttcccctccccgcgcctcagtttccccactaagaaataggggtgaccctaaggtaccttctagctgcaacaacggagagggaggggctgaccttagggtctggggttctcttttccctggccgcgcctcccggggcctcagtttccccactaggaaataggggaaagaagggatgtggaatttctaagcttctccagctcggtccttctgcgaacttgggcggcgggcgggggtggggggcgcagcggggagggtcgctgacggggttctgggttcaaagccccgtcccgccttggctgcgggttccaggccagcgcccggtgtcctcggagggcctcagtttccccagcctcgcggccaggctccgggacgaggagggccggggtcccaggggcgcagccccccgcggctgcgcgctgggccgggcggatgacatcaccgggccggggggcgggagggagcgggcggagcgggagggcttcctccgcgccaggcgcagcgcccggtcgggctccgtcgggcggccgcggccatgacgcagggtccgggcgggcgcgcgcccccggcgccccccgcgccccccgagcccgaggcgcccaccaccttctgcgcgttgctgccccgaatgccgcagtggaagttcgcggccccgggcggcttcctgggccgcggcccggcggcggcgcgggcggctggggcctcggggggcgcggacccccaacccgagccggcgggcccggggggcgtcccggcgctggcggccgccgtcctgggcgcctgcgagccccgctgcgccgcgccctgtcccctgcccgcgctcagccgctgtcggggcgcggggtcgcgggggtcgcggggcgggcggggggcggcggggtccggggacg

SEQ ID NO: 20143 - DNA, 2300 bp, Homo sapien
acccaaccatctatccacccgtccatccactcatccatccacccacctacccacccacccctccatctatccacccatgcttctaccatccacccaaacatctatccatccttcaatccactcatctatccacccacctagcatccaccctcccaaccatccacccaccaactcatccatctatccacccatccatccaccatctacctaaccatgtatccacccatccattcactcatccatccacccacccacccatccagccatctatccacccatccatccaccatctacctaaccttgtatccacccatccattcactcatccatccacccacccacccacccacccatctatccactcatccatccaccctccacccaaccatctatccacccatccatccactcatccatccacccacccacccatccatccaccatctacctaaccatgtatccacccatccatccactcatccatccacccacccgcccacccacccatccatctatccacccatccatctaccatctacctaaccatgtatccacccatccattcactcatccatccacccacccacccatctattcacccatacatccaccctgcacccaaccatctatccacccttccatctactcatccatccacccacccatccacccacccatccatctatccacccgtccttccagcatccacccaaccatctatccatccatcaatccactcatccatccacccacctagcatccacccacccaaccatccacccatccactcatccatctatccacccatccatccacccgcccatccacccacccatccacccacccatccatccatctatccacacatccatccaccatccacccacccactcatccatccacccacctacccatctgtccagctatccacccacccacccatctatccacctacccatccatctgtccatcctttcacctacccactcattcatctatccacccacccacccacacaaccatctatctgcccatccatctacccacccactcatccctccacccacccatccatccacacacccatccacacaccgacctgcacccatccacccacccacctgcctgcccatctacctatccactcatccatctatccatccacccacctacccatctatccactcacccatccagccaaccattcacccatccactcacccatccacccacccacccatctatccacccacccactcatccatccaaccatctactcacctacccatcaatccacacacccatccacccgcccatccaaccacatacccatccatccacccatccacctacccattcatccatccactcactcatccatccatccatctacacatccatccatcccccatccacccactcatcatccatccatccatccatccatccacccatccacccgcccctccttccaccatccacccaacattctatccacccatccatccactcatccattgacccacctagcatctacccacccagccatccacccacccacccatccatccatccactcatcaacccatccatccatccacccactcacccatccacctatccatccttccacccacccatccatccatccatcatctatccacccatccactcactcatccatccatccatccgcccaccctcccacccattcagccacccacctacccactcatctatgaatccttccttttttccttctacctatcaaccgttccatccatccatccatccatccatccatccatccatccatcatccactcatccatccatttacaaatcccttcatgaaccattcactccccgctcaaccactcacctcctacctatcctgttcacccatcaactcagacagtcaactgctggagagttggagtaaatttgacatgccttcctttttatgggatcccagtctggtggggcagttagatgcaggtgcagaccatcccacctcagtgtgctcacgtctggagagaggggaaaacccaggctgtggggctctggaagggctgtgagggctctaccctggatgggctggggaaggcagcagggaggaggggtggaaaatgaaggcgtgcttggccctgggtccagcttgggcaaagtcctggaggcttgaaacacagaccatgtgtatggaggatggggaagggagagaaaggcacccaggctgcttgagaagcgttgtaagctccagggtgcatgtgggccatggggagccaggccgggtctctgggc

SEQ ID NO: 20144 - DNA, 2300 bp, Homo sapien
aggcacacaccaccactcctggctgatttttgtattttttgtagagatggggtttcaccatgttgcctgggctggtcttgaactcctgagctgaagcaatctgcttgccttggcttcccaaagtgcagggattacaggtgtgagccgctgtgcccagccttcttttctcatataaaaatttaaagcaaccattttccctctaagtacttctttaactgcatcctacacagtttaatatgttgattttttatagtcatttagtttgaaaattttctaacttcctttgtgatgacttctttgatgcgtgggttattcagaagtatgttgtttaacttctaaatatatttgggggatcctggatatcgtattgttggtgatttctattttaattcctttttcaccagataatatgctctgtaagtttcaaaagtttgatatgtactaagacttgttttatgatcctttatgtagactataccattttgattaaaaaattttaaaacatgcaatacattaaaattacattgcagggtgaaatgtataattgtatggtatgtgaattatatcaataaagctgttaaagatgacactgcaggccaggcacggtggcttacgcttgtaatcccagcactttgggaggccgaggtgtgtggatcacctgaggtcaggagtttgaaaccagcctggccaacatggagaaaccccatctctactaaaaatacaaaaaaattggctgggcgcggtggctcacacctgtaatcctggcactttgggaggctgaggcggttggatcacaaggtcaagagattgaggccatcctggccaacgtggtgaaaccccgtctctactaaaaatacaaaaaaattagctggacatggtggagtgtgcctgtaattagctactaaaaatacaaaaaaattagctagacgtggtggtgcatgcctgtaatcccagctactcgagaggctgaggcaggagaatttcttgaaccctggaggcggaggttccagtgagccgagatcgcgccactgcattccagcctgggcgggggagcaagactctgtctcaaaaaaaaaaaaaaaaaaaaaaaaaaaaaattagccaggcgtggtgaaaccccatctctactaaaaaatataaaaattagtcaggcgtggtggcgggtgcctgtaatctcagctactcaggaggctgaggcaggataatcgcataaacccgggaggcagaggttgcagtgagccgagatcgcaccagcgcactccaggctgggtgacagagtgagactctgtctcaaaaaaaaaaaaaaattacactgcaaaaggctccaaaaaatacagaaacaaacaaggaagagacaggaacgtgcatctcatctggcagttttctgagcctcttcttggagcctcacgcagtggtcgccttgaatgtatcaaaatccattgtggtttaaatctcggaggcatctgggaggcagtgaggacggctctcacctccccgctgtcctcgccgctgccccagggcctctgcacggctgcctcctcacctgctttgggactgttcagttttaccttctccgtggggctcacccacacccacactgctaccctgggccccaaacctgtctgcgttttccctcacgttcagtgcctcctcatacaccagactgtgttcacttatcacatttactgacgactttctctctcccatcctgagaacatctccttcttttccgtctgttcgtgtccagttctcaccacccccaacagaggctggtacacagtaggtgcccagtacatgctttggcaggaatgagtgacaggatgaggcagtgaatgcttcttggctcagagctgaaactcccagagttgtgtacttgctgtatgaccttgggctgtgcctcagtttccccaggtgtagaaacggggccacgccacccacgaccccgccaggccctcctgctgcaaggctgtgggtgtcatgtttgcaggtctagttccctggggccggccctggccccagctgcccagctctgccggctcccgggagacgcactctgctgacaccggactctttcctggaccatccagccgcctggccgacactcgatcccggccccacttccaggccagtgtccggccgaccagcctgccttgggccagggccccacgactccctgctgcgggacaagaggccgtctgtgcggctgtggtcgtgggagggtgtggtgaggccgtgaaggtggggacggtgcctgggcctgtggccgccagagctgctgcggctcagaaggtagcaccagg

SEQ ID NO: 20145 - DNA, 2300 bp, Homo sapien
gcaacctgcctatcatcatgctgcctgcccccttccctgccttttccttcttcccagcagcactctccacgcctcacctattgcagcggcggctggagctgctcatgccagctcctgagcccactgtgaagttcgcggcgatctgtgagctggttggctcatgttggcagccacgatgggagtatttacaacacagggggcggcgtgcgctgcaagtgagggccttttcccttggagagccagctgttcaacatttctccgcacagcaccacttcggtattatgcccgaggtttatggcataactagcctggctcatggtctctcttccctgctgctcactagaatgtaagctccttcgggccgaggtcagcccaccttgcactctgctgtctccttggcacttaaaacaacgcttggcatacagcaggcactcaataaagatgtgctggcagggcgcatgacgtgtgcctgtggtcccaacactttggaaggccgaggcgggaggattgcttgagctcaggaggcggaggttgcagtgagtggagatcgcaccactgcgctccagcctgggccacagagtgagaccctgtgtcaaaataataacaagcatgaggcaggggggatcagctgaggtcaggagttcgagaccagcctggccaacatggtgaaactctattaagggaggagaccatccctcatattgtcttatgcccaatttctgcctccaaagaaagaagtaaaaactaaaaggcagaaatgaaatccacaggcagacagcccggcgctgtgccctgggcctggtagttaaagagcgacccctgacctactgggttacgttatctatagattccagacattgtatggaaaagcactgtgaaaacccttgtcctgttctgttccgatctgattgccggtgcatgcagcccccagtcacgtaccccctgcttgttcaatcgatcacgaccctctcacgcggaccccctgagagttgtgagccctgaagagggacaggaattgctcactcggggagctcggctcttgggacaggagtcttgccgatggccccggccgaataaaccgcttccttctctaactgggtgtctgaggagttttgtctgcggctcttcctgctacactatctctactaaaaatacaaaaaaaaaaggccgggcttggtggctgaagcctgtaatcccagctcctcgggaggctgaggcgggcagatcacgaggtcaggagatcgagaccatcctggctaacacggtgaaaccccgtctctactaaaaatacaaacaattagccgggcgtggtggcaggcgcctgtagtcccagctactcgggaggctgaggcaggagaatggcgtgaacccgggaggcggagcttgcggtgagccgagatggcgccactgcactccagcctgggcgacagagcgagactccgtctcaaaaaaataacaagtaaatcagtgtggaactaacgagcgccctcgtccctcgcgctgctgggactgacgtccgggtacccccaacgcaaccacggcctcccggtgaccctgacccgcgaagcgggccggaagccccgcagcccctactccagaatccgcgtcccggaacctggatccccgaccgggccctgcggccccgacccccgcagcgagcccagcgccggggaacaggacccggcttcccagtctccgcccggggacaccaggctccttgggcgaacggccaggcctcccgggaccagcgcgctggaagactcgcggcggggacgccccctcggccgccccgtgccgggccccacgcaagggcagccggggcgccccgcagtgggaacgcgaggagaccgaccacggggcgagacagccgccagggcgtccgcgccgcccgccccaagcccgcatcagcccgccacgaactcggaggaccgcgggctagagcggccccgccagcgcgcaaagccttgtgggccacacgccccggcgccccgcgctccgcggcatggcgggagttgtggttcagctgcgggggccgcgcgggagctgccgggagctgtgggcggggtgggtgcgcgcgcagtggcagggccagtgagctgcacccgcggaaaaggagggggagcggctggtcagctgcgccctgcgggtcgagaatgtcatcagcagggatggcggcgctttgagtgctgagcgcggccccgaccgggaccccctacccttgacccaccctcgcaggccgagccccgactcccgacccgccgtcgcagcccgcggccccgacctctgacccgccctcgcag

SEQ ID NO: 20146 - DNA, 2300 bp, Homo sapien
aagggcccagcttcccgggaagggcctgcacctccggcctggggagggcccctcctcggagtctgctttccggtgaggcctttcccggcaccagcctgggcaggagggggatgggacccagggagacagggctgtgagctcacacacctgggccctcacctctgaggggactgtttccccaccccgggcctcagtttccctcctctaggcctcagtttctctcctttgcacccagcccctcctctaggcctcagtttccctcctcagcacccagcccctcccccgagcctcattttgcctcctctgcacccagcccctcccctaggcctcagtttccctcctttgcacccaggccctgccctggatctcagtttccctcctctggtcccagccccacccctgggcctcagtttccctcctctgatcccagcccctcctctgggcctcagtttccctcctctggtcccagccccgcccctgggcctcagtttccctcctctgatcccagcccctcctctgggcctcagttttcctcctctggtcccagccccgcccctgggcctcagtttccctcctctggtcccagccctgcccctgggcctcagtttccctcctctgacaggtaagccgattggcaatgcttggaaccccatggactggctgctgctttttattccatggccagggaaactgaggcacagacagaccctgaggtcagcaggaatgctccatcattttattcccgcgtgcctgcggtgcatggggtccagggtcacaggaccggcccctgggtggaggggagccagccatcacgactgccaccacaggccctcattgagctaggagcagagcaccctgggaaccacagcggaggagggtggggggcgagggggtgagggggtgggcagaacctgggtaaggtgaggagcagcccgggcagagtcccagaggccctgggagggtcccggtgatgcaggggggtaaacaagccaccagcggagacagaaccagtgtgcggggcttggaggaacaggtgggtggattccagtgcgtttggaagatgaggttcccaggactcgctgatggcagctgtgagtgggagtccagccagcatcccttccagatccctcttgtggaccgagatccaggtctcagtgtagaccaaggaacagaggcagcccctactcgggctcccaggctccagccaggcctgctaggtgggcggcctctgcccgtgtgatggaaggaagccaggctcagagatggggtgacttgtcccacgtcctggagggtctcacagctccaccacggccaggagacttcagtccagggggcctccatccccagcgaccttcacctgacccccaggggaccccagccaacaagacccggcctgcagctccggaacgggggagggctgctctccaccgcccctgtgcggccgcccgggaaagtgcaggcgggccgggcgcggtggctcacgcctgtgatctcagcactttgggaggccgaggtgggcggatcacctgaggtcgggagttcgaggccagcctgcccaacatggagaaaccctgtctctactaaagatacaaaattagccaggcgtggtgacgcatgcctgtaatcccagctactggagtggctgaggcaggagaatcgcttgagcccgggagacagaggttgcggtgagctgagatcgcaccattgcactccagcctgggcaacaagagcgaaactcagaaaaaaaagaaaagaaagtgcaggggacccgccgtcggggtgggggcggcgctgcccagcctctgtcccacttccatgcacttgacctcgaccctccggcctccgtctgcgatcttcccgtgcctgaatatgaggcttggaacagacccagaccttcctgcctgcccgtcctgagtggccccgggaccccgccccatctttggcccccagcccctgcctctctgccgcctccagggtcgggggtcaggccaggaaagccccttgggaagcccccggggagcagctggagcggggtcgccgggcggcgggaaggagtgggcgcctctatttaagcggcttccccgcggcctcgggacagaggggactgagcatggatttcggactggccctcctgctggcggggcttctggggctcctcctcggtgagaaggggagggggcgcgggagagaggagtgagttaggagggggctcaggagagaggagggggctcaggagaggggagggggctcaggagagaggagagggcccgggagagaggagggggcccaggagaggggag

SEQ ID NO: 20147 - DNA, 2300 bp, Homo sapien
agggctccggacagcagagggttgactgtgggtcctgccctgatggctccatctccctcatcccacagtccggggctggagaagaaagtgttagaaatgcttgttccccggtgccgtaaagaaatagcacttgaatataaatgtcatttcctcagcaaggccactgttttactttctgcagaaagggtacactggccagcagttttgccacgagagtatccagaacaaaggagacagggtcatttataacctgacgcgtccaccctactgctctgtccggtttccattggctggaacgggacggtttccattggctggaacgggacctcacattctgtatttatcccgatcggctagcagcttggaacttttaaaaagaggcaaaggcagaggagaacaaaggaaggaagaagtagcttgtggaatgctaagaaaggtaaaaacaccttcaaataaggaagaggaacaggttatgacctaatgcttgcttggaccagtataagcatgccagggcagatatttagcctacattgtgggcactaagaacataaagtatgttgatttccttattacattatatatattcaatataacattaacaattaattaacaaagaatgttagcacaggtcttttgtttgtttgttttttgagacagagtctcgctctgtcgcccaggctggagtgcagtggcgcgatctcggctcacttgcaagctccgcctcccgggttcacgccattctcctgcctcagcctcccgagtagctgggactacaggcgcccgccaccacgcctggctaattttttgtatttttagtagagacggggtttcaccgtgttagccgggatggtctcgatctcctgacctcgtgatccgcccgcctcggcctcccaaagtgctgggatgacaggcgtgagccaccgcgcccggcctaccacaggcctttgaatacattttgcttctaagagaagttactatttattcctaattagatggggaggaaagtctcatttgaagaggaacctctacttcacgttttacaaagggcatttggtctgcccgccagagattcctgtgctgggaggatggtggaacggtcccccggcaaacagctctcattgccccctgcccggggcaacgcccctgagggacggggacggcacccagcaagctctgcccggggcggggaaacgcgagggcttagtggtttcctcggtgagaagcttaaccaggagtccccgaaagcagtgagggaagatccacagaggtcgcctggggaaacacacccagaggcggcttatggaggagactgcttgtgttttgaggtggctgcgggctgcggagggttgggagggccgggagggcggccggaagcgaggtcaggcgatgaaggcctggaggtgccagcccgggggccctggagagccatggcagagtttacagctctggaggctgcggtgtcagaaagctccctctggcggtcagggggtaacagcgcgggatgctcgcccgtgtggccgccaataggggctcagcgcagctgcagcggagctggggagggggcttctcccacgaggtgagctacgcactcagacgttgactgagttaggcggaaggccaggctgagctcgacccccagcaccaaggctcagagatgaacatgagaaaagggtctgggggccgggcgcggggctgggtccagcagtcctgggcaggtccagccccgcgcatgctccgtcaggcttctctgctaaccagggagactggttgctaggagaccatgctaatgaaggactcgctcactacccaaatggcaagcaatccggctttgtgccagaaacgaagcacttccgaggcagccattttggagtctggcaaaattcaggaccgaggccaaagccaggagagccaatcaatatacacaaagagggaggagaagagagagtgccaataaggacacaaggaaagtggtagcgtacccttgtcacttcccaaagtctcccagcgggataccggtgccctctgcccttaatcaagatggccgccttgggggggctctagcgcacagtggaatatggcggtgcttccggtcccgctgccctcagcgaagatggcggcagtggagaagcggcggcaagcggtaccaccgccggccggtttcacggacagcggccgccagtcggtatcccgggcggcgggggcggccgagagcgaggaggacttcctgcggcaggtcggcgtgacggaaatgctacgtgcggccctgctgaaggtgctggaggcgcggcccgaggagccga

SEQ ID NO: 20148 - DNA, 2300 bp, Homo sapien
ccacagccagaaggccccactagtcccgagaccctccttttactccaggcccccagggtgccgggcagaggggcctgagggaggaggcccagaggcccttacgggtgaggacgcctcggcctcggccctggacagctctggaagtgaccgctcggcccagagctctttcttggatccctccctccctctccactcctgatgctgttttcctttccccagacaggtttgcctgctggtcctcttccggggaccagactcatgaagccggggccaggtgttggggcacctgcgggacagagtggccctggtcccagactggtttttgtttttggttttttttttttttgagacggagtctctgtcgcccaggctggagcgcagtggcgctatctagactcactgcaagctccgcctcccgggctcacgccattctcctgcctcagcctcccgagtagctgggactacgggcgcccgccaccacgcccagataattttttgtatttttagtagagacggggtttcaccatattagccacaatggtctcgatctcctgacattgtgatccgcccgcctcggccccccaaagtgttgggatcacaggcgtgagccaccgtgcccggcctgtatgttgatgcagctgtgtgtacccagggcatagcaacaatgccactggcacagtccgagggcagggccacccgtcacgggcacgactcaggggaggctgggctgccccgtcctcaccacggccagttctcccgaccaagcttcacagcaaggagcatgtgggtgtctgggcagccactgagccaggtcagaagtcaggtggggtcacagtgatgcccggaatcagctggggtcaagactcaggtgggctgggcgcggtggctcatgcctataatcccagcatttgggaggccgacgcagacggatccctttattagtccaaactgcatcctccccttcctttcaaaacctaacaacacacttgaggtcaggggttcgagaccagcctggccaacatggtgaaaccccatctctacttaaaatacaaaattagccggacgtggtggcgggcacctgtaatctcagctactcgggaggctgaggcggacactagcttgaacccgggaggcggaggttgcagtgagattgtgccactgcactccagcctgggccacagaacgagactctgtctcatttaaaaaaaaaaaaaaaaaaaagactcgggtaggacaaaggtcaggctgggaggagggcacagccaggctcgggctcagcttggggtgggggctccgtggggctggcgcctctcccgggtcaggtgctgagccgatgctggccggcgtaggcctctttcccagtttctctggggggcaggagcaccttgccaacctctgatggctccagcgcctgcactcgcctcacaccacatggtgacttcaacggggaccagggaagccctcgcccctcccacccctcagagccctccccgacctcgcccacttctcagagctcccgctgtcgggggaaccgaggcagcgccgcgcctggaagccaggtctgcggatcccgcctcgctcccgccccttcctcccttccgcgtggccagcgcgaccctaggacagacttcgcgcccgtcccctgcacagacggggaaacggagacggggacgcggggtcgcgccggatggaccggccctgcccctccggtcccggtcaggaccccgcgccgcgccccgttcaccgcccgcggccccgccccgcgccggcacgtcacaaaacaaccccaaagccgggggaccgggccggtgacggcgcagagcagccctgcccgcctccttgcgcacagcgtccgcggtgctggtcgagcagggggcgacggcggcggcctcggggatcggaagagcccggggctgcgcgctcgaaccctccctcccggcggaggcgctcggcgccgtaggcgggaccggggccgggactccacctcccggcgtcccctgcggccgggcgcgcaggcgcaagtcggacctggccgcggagcgcaggcgcagtcggggccaggcggtgcgcgcaggcgcagcggggggcggggcgcgcgggcccggccaaggcaagcgccggtggggcggcggcgccagagctgctggagcgctcggggtccccgggcggcggcggcggcgcagaggaggaggcaggcggcggccccggtggctcccccccggacggtgcgcggcccggcccgtctcgcgaactcgcggtggtcgcgcggccccgcgctgctccgaccccgggcccctccg

SEQ ID NO: 20149 - DNA, 2300 bp, Homo sapien
ccagcctgggaggcccaggtgtagcggtccgaggggcccggtcctgcctgtcagctccaggtcctggagccacgtccagcacagagtggacggattcaccgtggccgactcttttccctgctttggtttgtttgaaatctaaataaaactactttatgagaggccagagaagctgtgcttgggagggagaggcagcctccacgtccatgagtgactgcacacggccagtcccactgggaccctggctacgccaggtgtggatctgggaggcctgtcctgggaggcacggggagcagccgggtcccgcggcctgtacgttcccatgacttgggtcagacaggcctgggcagcatcccccagcctgcgggacaggggcggccagaaagcccccagagttcctcctccctgtgaccaggtgcatctagtgggacgggagctgcctctgcaggcatccagcaaagcttcgtcgcgggtccacagccgcctgggcgttgatctcagcgtctcagggctcccaggaccacagatgcccccgatcagcactccggcggctccagctccgtccaggcacaccctcggggtggggagccgtggccctgggcacacagggcaggcacctcacgtcctggtgtcaggaagtccccagcatcgttttattacatgtcatggaggaaagctcggagctcccatgccctcccggggcaccgccttccaggaacctgcctgcgttccgcttctgggcacccggaaagtcgctcagtggctgattcagggtcgaggagctgtgaggatgaggtttcccaccaagttgggacagaaaatggggccctggggtctcagcaaaccatggccctcgggaccaaacctggcgtccgcccctattgtgagtgaagtgttactggcacagccacacccaggtctcaggatcatccatagctgcttggtttggtttggttttgtttttgagacacagtcttgtgttgcccaggctggagtgcagtggtgcgatctcgcctcctgggttcaagtgattctcctgcctcagcctcctgagtagctgggactacaggctcccaccaccatgcccagctgatttttgtatttttagtagagatggggtttcaccatgttggccaggatggtctcgaactcccaacctcaggtgatcgcccgcctcggcctcccaaagtgctgggattacaggcgtgagccgccgcgcccggcctaaatttatttatttttgagacagggtcttgctctgtcacccaggctgaagagcagtggtgcaattacggctcactgcagccccaacctgggctcaagcgatcctcctgccccagtctctcaaagtgctgggattacaggtgtgagccaccgccttcggccagtgtctttattcatgaagaccaaaaactagaacagcgcaaatatccgtccgctggtgaatgcataaacacagcgtggtccagccacacaatgggatgtgacacagccacaaaaaggagcgaggctctgacacaggccacagcctggatgcaccttgaggacgtcatgctgggagagacgccaacgcaacaggtcctgtgtgattccactcctgggaggtccctagagaccaattcagaggcaggaagtagtggccgggcgcggtggctcatgcctgtaatcccagcactgggaggccgaggtgggtggatcacctgaggtcgggagtttgagaccagcctggtcaacatggtgaaacctcgtctctactaagaatacgaaaattagccgggcgtggtggtgggcacctgtagtcccactactcgggaggctgaggccggagtatggcgtgaacccgggaggcggagcttgcagtgagccgagatcgcaccaccgcactccagcctgggcgacagagcgagactccatctctgaaaaaaaaaaaaaaaaaaaagtgttactttgtcaggtgtgatgatggtagtgtggcttcatctcgagtcctctttgagaaacactttctaaaatgctcaaggatggagggtggagggtgtgcagcggtgggcggggctgtgaccgtcacctcacctcccccacaggaagcgcgtgtggggaggctcggggccggggccagcacccacactgggtctccacagcggcatggaggcctgcgtgtcttcactgctggtgctggccctgggggccctgtcagtaggtgagtgggagccgggatgcaggggggacactgaggcccagcgctctcggtgggtccctggatgggaggggtgggcgcgggcgccgacatcctgggtgta

SEQ ID NO: 20150 - DNA, 2300 bp, Homo sapien
acgaggtcaggagatcgagaccgtcctggctaacacggtgaaaccctgtctctactaaaaatacaaaaaattagccgggtgtggtggtgggcacctgtagtcccagctactcagagaggctgaggcaggagaatggcgtgaacccgggaggcggagcttgcagtgagccgagatcgcgccaccgcactccagcctgggcgacagagtgagaatccgtctcaaaaaaaaaaaaaaaaagactgagcgtggaacaaagggcttgactttgaagcgtgcagcggcgtgaaacttgcagtgcgggaaagtgaatttacagacgcaggacagaggcagttaatcgtacagtgacaggtttcgtaacctcagccgagcttgtgagcttgcggccgcattgagaaagaacaggagcttacaaaactggcagagtattttacggggagcgggaaacggaaggaggagtctggttcttatctttgcacggggggagtgcagtgctgggaggcgtctgggcggcattccttggggttctggctttttaaatggtgttttcaaggccttgcctgggggctttgcctgttgctggctttggggcgagtcagctttatacgaaaaaggtattttccgtttcttcaatttccgctttattccctccttgatgctttttataaataaggtttaatagaaagcatcactattttttatttacttctacagggggaagtagctcttttcctggcaggggtggacacgtagttatgggatgagctcggtggtactcggcctgtccacacgagcgtctctggctttgtcgatattcttgacaaggaggggaagagacaagagtacgaggcggactcccagtatggccagaactactcctagtaaggttttaaatcccccgagggatgaaaaccaaccacgggggggcggggggaacctggagaccattccggtttccaggtttgtgttggaacatgagctaagtctcgcattctcgcaattaattcatgacgtcctcctcattgtcatcgatttttaggcaacaattagttaaattaaactctccgcatatccctccttctgacatagatctagcgagagcagcaagaacaaagggaagagtagcatgtttgtacctaggatggacaagagatgtttgcccagaggagggggttgagcaaagcgacaggttaatagtaaaacaattaagatgacaaggaaaattactgggcttaagatttctaactacatttacttccttgacgaagcttcggccgtgcgtagactggtcagcttccggggtgactagagcagggctgtggtcactttcactggcatctgggtcctgtcgtaggatcagccggtttggatggtctgggtcttgctggctggtccacttgtcctgggctgctggtttcagccgactgtggagatcgaaggcacagttcctgaaacattaacagcagtgggagtggacaggatcgcagtctaggcccatcccatctgggtcccaaagtggttggattctatttctttttttttttttttgagacgaagtatcactcttgtcccccaggctagagtgcagtggcgcgatctccggtcactgcaacgtccgcctcccgagttcaagcgattctcctgcctcagcctcctgaatagctgggatgacaggggcacaccaccacgccccgctaattttgtatttttagtagagacagggtttcttcatgttggtcaggctgctcaaactcccaacctcaggtgatccgcctgcctcggcctcccaaagtgctgggattacaggcgtgagtcactgcgcccggccgatcttctttcaatatactttccagtttcttgggcaaactaagcttttttgtttggagaataacgtgggacctctgggaggggaggctccgggaggagaggcacagccagggcttcctctttagaatgtggtgtccttattactgcccgttttgcctcctcgtctgcctttgtttcctttggcctccagtgttcctgccttttgtgcaccctgcaacgcagaacagctacgtctttggggcccacacggcatcctggagctgtaaaatttctttttttttttttttttttcatatggagtttctctcttgttgcccaggctggagtgcaatggcacgatctcggctcaccgcaacctccgcctcccaggttcaagcgattctcctgcctcagcctccctagtagctgggattataggcacctgccaccgcgcccggctaattctgtatttttagtagagatggggtttctcc

SEQ ID NO: 20151 - DNA, 2300 bp, Homo sapien
gatctcctgacctcatgatccgcccacctcagcctcccaaagtgctgggattacaggcgtgagccggcagctgcatattttcttatctgtttattaagtctgtttaagaattccacgggcctggccaggcgcggtggctcacgcctgtaatcccagcactttgggaggccgacgtgggcagatcacaaggtcaggagatcgagaccatcttggccaacatggtgaaaccctgtctccactaaaatacaaaaaattagccaggcgtggtggcgggcgcctgtaatcccagctacttgggaggctgaggcaggagaatcgcttgaacccgggaggcggaggttggagtgagctgagatcgcgccactgaactccagcctgggcgacagagcgagactctgtctccaaaaaaaaccccatgggcccttcatgtttcctctgttgtacgttaaatgctcgggaagtattttgggtttgcagatctgattcccgaatccttgtaattatcccatctccgagatcgctcatgttttttaggtcacattgtcatcccacccaggatcttgggccaggaatttacgctccgctgaaaggacgttctgaccggggggtgttcacgctcccagactaacacagcggcctgtgaatcatggttctctctctcctgagacgagagtactgagggtagacattaattcagcccaagcgtacagctgtggccccagaaattggtcaatttgatccgcgaatccaaaagggtcatctaacagtggtttgagttcttttagatttctaacctctgaactggttaaagggggcatttacgaagtcaatatcccttcctcccggtggtccttccctaaaggggaaaagggctgaggcaggtctttttgagcaggaggcaaaaggaaagttctgtgggtttttgtttgtttgtttgttttttgagacggagtctcgctcttgttgccgaggctggagtgcggtggcgcgatctcggctcactgcaagctccacctcccgggttcaagacattccctgcctcagcctcccgagtagctgagtagctggaattacaggcgcccgccaccacgtccggctaattttcgtatttttagtagaggcgaggtttcatcatcgtggccaggctgccagtcctgaactcctggcctcgtgatccacccgcctctgcctcccaaagtgctggaattacaggcgtgagccaccgcgcccggccgaaagtttcgaatatccctttggcattgttctgtttcccgttggagctttcctgaggaaggggcatgttctagtggctgtccagcggggatgtgggtggcaaggtccaggtggttctataggggagggatggaggggcggaggagcgggtgggggaggggcggaggggcgaggggtgggtgggaggggcggaggggcgggttggggaggggcggaggggtggggtgggtgggtggggggggcggaggggtgggttgggaggggcggagggggtgggttgggaggggcggagggggtgggttgggaggggcggagggggtgggttgggaggggcggagggggtgggttgggaggggcggaggggtgagtgggggaaggtggtctagaggatcccacccttctttagatatggggcgtctctgctaaaaatacaaaaattagccgggcgtggtggtgcgcgcctgtaatcccagctactcaggaggctgaggcaggagaatcgcttgaacccgggaggcggaggttgcagagagtcgagatcgcgccgctgcactccagcctgggtgacacagcgagactccaacacacacacacacaaaagatatggcgcgtctcattcattcacaagttcctcttcaaaggtttggctcgttcagcgccctcgttcttcgtttcctacttccaaggccaacctgacttcctcaccctctgggcctccccgtctgagtctcagtaaacaagtttcccgccggtcctgatctgcagagatggcacctgccacccactctgcacatccccctcccgtcgccacgggctcttcccgccagtgtagccacattcctgcccctttccagttagcccttcgcgttcggcttagtctgcggtcctcttgcattgcgactccgagtttaacttccaacacacactttcaacctccaagagacgcccccacctgtgtcgccccaatagcgacttttctcaccgtggtcgccgcggaacttcaagggtccttcctacccgcgttgctgagagtctgggtttacgcgtcacctcgggcgggacccgat

SEQ ID NO: 20152 - DNA, 2300 bp, Homo sapien
gcgtgagccaccgcgcccggccgaaagtttcgaatatccctttggcattgttctgtttcccgttggagctttcctgaggaaggggcatgttctagtggctgtccagcggggatgtgggtggcaaggtccaggtggttctataggggagggatggaggggcggaggagcgggtgggggaggggcggaggggcgaggggtgggtgggaggggcggaggggcgggttggggaggggcggaggggtggggtgggtgggtggggggggcggaggggtgggttgggaggggcggagggggtgggttgggaggggcggagggggtgggttgggaggggcggagggggtgggttgggaggggcggagggggtgggttgggaggggcggaggggtgagtgggggaaggtggtctagaggatcccacccttctttagatatggggcgtctctgctaaaaatacaaaaattagccgggcgtggtggtgcgcgcctgtaatcccagctactcaggaggctgaggcaggagaatcgcttgaacccgggaggcggaggttgcagagagtcgagatcgcgccgctgcactccagcctgggtgacacagcgagactccaacacacacacacacaaaagatatggcgcgtctcattcattcacaagttcctcttcaaaggtttggctcgttcagcgccctcgttcttcgtttcctacttccaaggccaacctgacttcctcaccctctgggcctccccgtctgagtctcagtaaacaagtttcccgccggtcctgatctgcagagatggcacctgccacccactctgcacatccccctcccgtcgccacgggctcttcccgccagtgtagccacattcctgcccctttccagttagcccttcgcgttcggcttagtctgcggtcctcttgcattgcgactccgagtttaacttccaacacacactttcaacctccaagagacgcccccacctgtgtcgccccaatagcgacttttctcaccgtggtcgccgcggaacttcaagggtccttcctacccgcgttgctgagagtctgggtttacgcgtcacctcgggcgggacccgatcctccgctcctgaggcccccacaatgaagcagtcggacgcgtctccccaagaaaggtaaccgccagcctctcctgaaacagaatgggatccaaatgggatatttgggggcggcgagtcggtcccgcaaagagaaaccagcacttagaaaatttctcagcgagaccactttacttgtacggaagggggctgcctgcgtgggatgcaatctccagagcacacgggacaaaggaagggagcttctgttcctctgtcctttccctgttggctggggttggacgcccacaatctaagctgatcccggttggctaaaacttaaaacttttttaaaatagggtaaacgcgccacctgcgaggaaagaagaagggggtaaggttgattgacaactttagacctggaagttgagtttctgaagaggaacttacttgtcccaaccaaatggtgcacaggacgtttatactaagaaattattcattttctgagatccagattcaagtgccctttaagtatttttatttgggcggaggaggtcacttcctcccacctaatttattaatacgttcatatatatatatatatatgtacatttttaaaggcagagatgtgcgtctcgccatgttgccgcgtctggtctcgagctcccgggctcaagcgatcttcccgcctcgacctcccaaggctctgggagtacagacgtgagccacagcggccggcccgtgtttaactcagataaaatctgggtaacacactttcaacgcttcaaccccctcgggcgcaccgctctgcgctcattgcaactttgaaagcaggaaggaagaaatgcgcaggctccagccgcgtccccgcaggccccactcccgtttcctagcaacgccgggtcacgtgcgccgccgcccggattccgtagcgtgagcctgccggagccggcgcgtacatgcgagcgtgtgcgcgcgtgcgcaggcggggcgaccggcgtccccggcgctcgccccgcccccgagatgacgccgtgcgtgcgcgcgcccggtccgcgcctccgccgctttttatagcggccgcgggcggcggcggcagcggttggaggttgtaggaccggcgaggaataggaatcatggcggctgcgctgttcgtgctgctgggattcgcgctgctgggcacccacggagcctccggggctggtgaggagcgggtagggggcgggggtgcggtcctg

SEQ ID NO: 20153 - DNA, 2300 bp, Homo sapien
aaaaaaaaaaaaagaagaagaggagaaagaaaatggcgctgccaaaacttgtcaactgcgcctgcccagagctcacctgaggtgctcagacgtgaacattcctgtccccgtggccttgggggccgtgacctgtgcactgccacgcagcctcggagccgtgtgcacgcatatgcacgtgtgtatgtgttgtgtgtgtttgcagacgtgtgtccttgtgtgtgtgtgtgtgttgtagcggtgcctggggagtctgacctcagaaggtgctgtggggagggctgcaaggtcctggcgggaggaggcactccccacgcttccccttgggctgggctgttcctggcaggcgagtgctaggcacagtgtgaggttctgtgtggattctgctgtgctccttggcagctctgggggccttcccttgcatttcgaaggaaggggaggcgtgtggctggaggtgagaggccctgaggccctgcctggctcccagcttcccaaatccgcctctctctgggtcgccgccctcagagattgctgaggacacgagctttccacccacgggctgtcctaacggagccgggctaggggcttctggacagaggccgcctgcccctttgggctttggggtttgtttttctcagcagctcacccgggtctctggggtcagggtatcgggcagaagtcagaggacggtgcgcttgggacctgagctctgggcagccctcggggctcaggactcctggctcttctgcccagtttcatgtgttttgtgttttgaaaccacgtgtggtcccacagttgtgccctcagaagccgccgtggctgccgtgaggtagcagtggacgggacgcccacggtctttcccatgccatgctgtttccagccgggccccatcactctcccacaagctgaaaggaagtggcttctccaccagccctggctgggagtcctgtgggcgaggccttccccaggagctgccctcccaagtgccccaggcactaacaagaccccacgcgtgctctccccacagccggcttcgtccaggcgccgctgtcccagcagaggtgggtggggggcagtgtggagctgcactgcgaggccgtgggcagcccggtgcccgagatccagtggtggtttgaagggcagggtcccaacgacacctgctcccagctctgggacggcgcccggctggaccgcgtccacatccacgccacctaccaccagcacgcggccagcaccatctccatcgacacgctcgtggaggaggacacgggcacttacgagtgccgggccagcaacgacccggatcgcaaccacctgacccgggcgcccagggtcaagtgggtccgcgcccaggcagtcgtgctagtcctggaacgtgagtggcgggcacctccctccccgcctccctcagtttccctcctgtgccgctcgcctcccggctcctgctcagtagaacccagacgcctcctcccctctccgtcccgctgtgccccgttgggcccaccgcctggacggaggggcccggacctgaagggggtgggctcgccgcctgaccaccagcgctgggcggcctggctcggggcaggcagggctctgccctccagcaggtgggtcctcgtcctcccctcgaccctcgtgccatccgttccgtcgtttctgcttccccgggcgcctgcccggctccctccctgagcgtccatactgcaagcctgaggggccctccaagctcagcccaggcttgcaggtctcagaaccttctgtgtccttcgcagcatctcgttctaagggattttcaaatttcaattcctagcgggaatattgtaaactaaccaagaaccaagagatttgcttggttggggattggcagaagaaccggggtgctcccagcactgctggagtgccgtcagcctggggctggggggatgtggggccacctgagtgcctcctagagaagggcacgggagccttggccgggggtgctgtggctattttttttttttttcctggagatggagtcttgctgttcccaggtggagtgtggtggcacaatctcggctcactgcaacttccgcctcccgggttcaagcgattcttctgcctcagcctcctgagtagctgggattacaggcatgagccaacatgcccagctaattttttgtatttttagaagagacggggtttcaccgtgttagccaggatggtctcgatctcccgacctcgagatccacccgccttggcctcccaaagtgctgggattacaggcgtgagcctccgcgcccggccaccaccgcgcccagctggct

SEQ ID NO: 20154 - DNA, 2300 bp, Homo sapien
aattccagcactttgggaggccgaggcgggtgggtcacctgaggtcagcagttggagaccagcctggcccaacatggcgaaaccctgtctctactaaaaatacaataattagccgagcgtggtggcaggcgcctgtaatcccagctactccggaggctgaggcaggagaatcgcttaaacccgggagtcggaggttgcagtgagccgaggtcacgtcactgcactccagcctgggcggcgacagagcgagactccaactcaaaaataaataaatacataaataaacagataaatacagagtactccggcctgggcaaggggtcagagtgagtgtgccgaggccagggagggtccccgtgcacactgacaggcgctggcctgggtaagcctgtgggctgcagagccgtcgccaggatctggtgacaaggaccccgagccacagcctcccttgtgacttgcgggttctgccggcgcctgcaggaggcgtctttctgcttctcccactgccaggcatgggcggttctcgtgccgtgcgggtcccgcctcctccctgctcccagccgcgagccctggggctctggcgacctgcccggcctgacatcttcccagggtgaacataaaagaacccccttcagctggagcacgcatctgcctcggggcgggccacagcctggcactgccaactgtgccgcccgcccggcctctcccgcaccaccttgggacaaacagctgtcctgcccgcctatgcggaggtggccggcggggccggcgtgggggcgcagggatccccagggtgtggggcagccaggccgaggcgagagacacggtcgggctcagcccatccactgtcagccgggcacatgctggccctccctcaagtaccactgagtgcctcctgggtgtaggaagagggccatctctgccccggtggcctcgaggtgcagatgggtggggggcacccggcacacgggacatcgtggctgagaggacgtcaggccaggtgccaggagggtcccaggagggcctcctgcctccaggtggggatgttcagcctccacttcttcgagtgtgactgtctgtctcctctctctcacttgccagcttcctcacctgccccctcccggctgtctggtgggctgggtggctagggacagaggcctcatgtcacctggcaccaagcagcacccacgcccagccggcttcggcccagaagcagagccttgggaagcacctgtctcagagctggggactggaggcactgggggcacagctgcacccggagtccgaggggtcggggaaaggaggcaaccccggggcagggggctctggtacccgtgcgaaggcgctagtgggctttgggtctccctgtgaccccaatctaaagcccaccagacctagaggagacccccgccgcacggctccccagggcactgtttgaggggtgggtgggaaccccacaccctcgggtggcttttccagttttccttgtctggctgggcttggcctcagtttcctcaaatgcagaccagggagaggagtgcctgagtctcccagaacggcgcccaagccggcctgcccctccccacgcactcaagggtctctgtccagggcccacaggcgacccagcaagggctcctgtgacctttagaaacaccctttcgtcgtggaagtcttcaaacctcacagaaagcaaggaggcgctggccgtggcggcctctcccgtctcccaggcccgcgtccaccctccccgcgccggtgccctccggacagaggtggaagccgcggcgcaggagaggcggctccggccgggcagcggggcccggtgaccttgggcgcgtccttacacgtcgcgggcctcagtttcccctcctggggagaggcccgcgcggggctccgaggcctcgggccgcgtgaccttggggcgcccccgaccccgcggcccgagtttcccggcgccgagcggaggcggcgcgcggggagggggcgcagccgaggcgggtctcccgcccccgcccctcccccgcccctcccccgccgcgaggctccgccccccgcggctccgccccgccccgcccccgcctcccccctccctcgggctccggccggcggcggcggcggcggctccgctccgcactgcccggcgccgcctcgccatggacgcgcgcgggggcggcgggcggcccggggagagcccgggcgcgacccccgcgccggggccgccgccgccgccgccgcccgcgcccccccaacagcagccgccgccgccgccgccgcccgcgccccccccgggccccgggccc

SEQ ID NO: 20155 - DNA, 2300 bp, Homo sapien
tggccctggcaggaggggacctcgtagccgccctcggagctgaggctcccacagcagcgtggggggcggcaggggtggggcgaggaggcttctgggaacatttcctccccctgtactgatacctaacccaggatgtttggggaggggcggggcgaggggtggggcgaggcctgcaggagggtgggcttccctggacctcaagtggagggggctgagcgcagggccaggatgctggtcactgggtggccctgtgagctcccctcccttcaggagtcctccgctctgccacaggaagggcctgaccttcgtctctgtgcacgactgttactggactcacgcagctgatgtctccgtcatgaaccaggtgcccccgtagtctgagcctcagtccacccatgggtggggcccccacactggggcgttgggtaggggtggtgcccagagcctgcctgatcacccctggggatcctctgactcctgcccaggtgtgccgggagcagtttgtccgcttgcacagcgagcccatcctgcaggacctgtccagattcctggtcaagcggttctgctctgagtaaggcgctccctgaccccaactacctggattccccccccaccccaaaacctggcctcagcctcaccccaccctgcttccaaccccaggccccagaagatcttggaggccagccagctgaaggagacactgcaggcggtgcccaagccaggtaggcgggtgggcagcctcgcaagggtggctcgaactgcgggccagggcggggctttcccgccacccacgccgtccgctctgcttcctccgcaggggccttcgacctggagcaggtgaagcgttccacctacttcttcagctgacaccccgtgagccttgtcagtgtgtaaataaagctcttttgccacccccaggagccactgtcttcaggaagggtgcacgccctgcgggtctcgggcaatcacacgcggccaggcttggcgccaatgctgtcgtttattgcgcggaatgggggtgtgggggttaatggggcgtggggggccacggtgggggcactgctgcctcggctcgtcagtacattcatcacggcggcgggaccccagcctcccccccgcgccctgcgcagccaggcctgcctctcggtgccagtgctggagggaggcggggtgctgctccccgaggtcaccgggggacgcgcgcggacgggggccgggccggttattgcgtgagcgcgatgggggcagcgggaagccggcgggccaagtattgcacttagaaaacgatcctcctcggacgggggccacctagagggtggggggcgggcggggctccacagccggctcctctcagccactgggccgccccgtccctgtcttacagctgggggaactgaggcaccgaggtgaagggagccccctcgcacgcgaggccgccgccgggggcaggggcgatgggggtgggcgcggggcgatgaggggggacggccgggggcgcggagggggctgccccgccggccctgcccgtccgtccaactacggctacctacgtctcgtctatggcttctgggcggactggcggccggggcagcgcaatggcatggctttggtctggatgacggccccgcccccggcccgcctgggcccgcggggcggtcggcgagggtcacaagttggacgagaggcgcgagcgcgcggagtcctgggggtccaggccgccggcggcgccgggtgaggccgagtccctgcggtccgggctgggcgcggcggcccgggcagcgggcgtgggccccaagcgcggtgtggagctgctggccgggcgtgtggaggccgcggggccgggggcgccgtgaggcagcgagggctgcgaggcggacagtgggcgcgacgcgcggctcaggcggcgcgcgggcagggcgggcccagcaaggggggcggcgggcaggccgccgtagggcgaggtccgcggtgcccgggggctggcgggcgcgcccggggggctggcggggggcgggggcccgggtgaggcggcggcaggtgcgggccccgggggcgggcggcgcacgaggcgcggcgagccgagcgccagcggccccacgagcggccgcgccacctgcgggcagaagctcatggccgccgcctgctgcagcgtggcgatggccgaggtgacctgcggcggcggcggcggcggcgggaagaggcccacgcgctgacccagctcggcctgctgcaccatctcgcggtcgtacttgacgatctcctggatgatggcgttctcctggttgttgaatacgcccgag

SEQ ID NO: 20156 - DNA, 2300 bp, Homo sapien
cgccgaggtgaggctcgcaccccctctcctcctggctggggccagtggtgggtgggcgctctccctccctggagcagccgggtttgcacccaagcttcagtctgttcatctgtatgcttgggctgacagatgccccaccgggcgtcaggcacgggcggtggggcatctagctcaggggccccggtgcccagcgccctgaccgccctgtcctacaggtgcccgagccctgcctgccgcggcagtactgggaggagctgggggcgcccgaggccctgcgggagcagccctggcccctgccagtgcagatggagctgggcaagctgctggcggagatgctggtgcaggctacgcagatgccatgcagcctggacaagccgcatcgttcctctcggcttgtccccgtgctctaccacgtgtattccttccgcaacgtccagcaggtgccaggcagtgccctcctgagctggggggcatcccgctgggaggaccagggaccccatggggttggcgcctttgggcggagccttgatctcagcgcagccgtcagtacctcccaggactcgggacacaccatgggtgtccatgcaggtgtccggccgtttctggaggtggcttctgttcgtgggaggccacactggtttcttgttggccggggagccggcccctctcacccaagtttaaggggtgggaacaggaaagccccagcaccggggccctgacccgtctgcctgtcgcaccccagatcggcatcctgaagccgcacccggcctacgtgcagctgctggagaaggccgcggagcccacgctgaccttcgaggcggtggatgtacccatgctttgccccccgctgccctggacatcgccgcactctggtgctttcctgctcagccccaccaagctgatgcgcacggtggaaggcgccacgcagcaccaggagctgctggaaacctgcccgcccaccgcgctgcatggcgcactggacgccctcacccaactgggcaactgcgcctggcgcgtcaacgggcgcgtgctggacctggtgctgcagctcttccaggccaagggctgcccccagctaggcgtgccggccccgccctccgaggcgccccagccgcccgaggcccacctgccgcacagcgccgcgcccgcccgcaaggccgagctgcgccgtgagctggcgcactgccagaaggtggcccgggagatgcacagcctgcgggcggaggcgctgtaccgcctctcgctggcgcagcacctgcgggaccgcgtcttctggctgccgcacaacatggacttccgcggccgcacctacccctgcccgccgcacttcaaccacctgggcagcgacgtggcgcgggccctgctggagttcgcccagggccgcccgctcggcccgcacggcctggattggctcaagatccacctggtcaatctcacggggttgaagaagcgggagccgctgcggaagcgcctggcctttgcggaggaggtgatggatgacatcctggactccgcggaccaacccttgacggtaggggcggggcccccgcattccccgccctcccggcacccccgcgccctcccccggcgcccccgcgccctcccccggcgcccccgcgccccctgcccgtcttcctcctcccctccccctcccctggcgccccctgcccgtcttcctcctcccctccccctcccctggcgcccccacgtcccccgcccgctctcctcccccgcgccccctgcccgtcctgcttctcccttctcccctgccccagggcccccgcgttccccacgttcccccctcccctgcatccgccgagctgcttcctcccccggcgcccccaggtcctctgtccaccctcctcccccggcagctccggacacgcttgtttcagcccggtccacccgcagctcccatcctccatccgtggctatggagaactcatccagccaccgccccgtctctcgcccacatgcgtcccgtgttcactatcacgggtgtgcgtctcctccccatttcccacctccccgcaacacagcctcccagcgggctcagggatcgggcccgggcctcactgccccccatccgctgtccccgcagggccgaaagtggtggatgggcgcggaggaaccctggcagacgctggcctgctgtatggaggtggcgaacgctgtgcgcgcctccgaccctgccgcctatgtctcccacctccccgtccatcaggtgagccagctgggtctggcccccgaggccgtgcagtgtgcactgggcctggggctcgacttgagggtgtgagatt

SEQ ID NO: 20157 - DNA, 2300 bp, Homo sapien
cagaagtcggtttccacccaagtttctggctctgccagcctgcaggggtgcagggggtgtctgtaggtcttggcacaccaggcctggctgattcagggccaggcaggtgaccccagtagtgggtgaggtctgaggtcacagcccgctggggcaccctgaggtggactgaggcaggtgagggagggtgctgccgtctgtcgaaaacattcccagccggtggcatcagtgcgctcacgcaggcgtcggcagcagcgtctggaatgtgctgtaaggaggctgccaggcccttccagagtgaggtcgagtcctcgttctgggctgatggggaaactgaagtgccagggtttggggatggaggatagcttgagctgaggcccccgagcccccgtgtggtcaggccccctaactgagccccagctacatctttgctccctctccccagccccactctgctcaaattgctcctctgtccacgcttgttcctgcctcagggcctttgcacttgttttgttttgagacagggtcctgttctgtcaacccaggctggagtacagtggcgccatctcagctcactgcagtctaaacctcctgggctcaagcagtcctcctgcctcagcctcccgagtatctgggaccacaggtgtgcaccaccatgcctggctaatttctttttttcctttggtggagactgggtctcagtatctcggttgcccaaggcttgtctggaactcctgggctcaagcgatcctcccgccgcagcctcccaaagtgctgggattacaggcctgaggcactgaactgacctccctttgcacttttttttttttgagacaggttctcgctctgtcacccaggctggagtgcagtggcgagatcttggctcactgcaacctccgcctcccgggttcaagcgattctcctgcctcagcctcccgagtagctgggattacaggtgcccgccaccacccccggataatttttgtatttttactagagacggggttttgccatgttgccaggcatgcttgcgtatttgccaagctggtctcgaactctgaccttaggtgatccgcccgcctcagcctcccaaagtgctgggatgacaggcctgagccaccaaaccagctcccctttgcaactgggatattagcctggaacacagttacccccagatattcctattctcacccttcccaagcctactgccccacagcaggcgctcccgcctctggcctgctgccccggctgaacgacacaggtgggcacaccttccaggttccattctaaagctcccgccctgctcctcctaggcaggatcacgcggagaccagggcaggctctaggctccgaggtttatttcattcccttgacctcaccccacttagcaggtgaatccaagcctgccgctccattcggctcctgcccctgagggcttggggattggagggtaaactgaagctggaggctgggagtctcgcggactggggctttctctccttgcagcctccctgaggtcgcacgtgctgtgtcttccagcaacttggtggccctctctgagcctcagcttcctccatgatagacggcatcctaatgactcttacccaaaagttgtcgttggagcaatgaaggttgcggacaggaatctctaaattgcagatgctgtcctcgttattagatgagtatgccttgaaaaaaaaaaaaaaaaagccgggcacggtggcggcgtctgcaatcccagcgctttgggaagccgaggggcgaggatctctttaccccagcagttcgaagctgcactgagctatgatcacgccactgcactccagcctgggccacaacgcgtccaaaacaaaaccaaaaaagaaagaaaaacagaaaaaaagtccggatttgaggtcctcgggaaaacagcctgagagtgcctcccagttgccacggcaacagctctgtcccgccccctccctttaaaaacagcaggaggaaccaatcagagcgtccaccggcgcatgccttcgcgcctccgctgcatcctgggagtctacttccggctggggtttcccttcgcagcctccgtcgaccatgaaaccacaactcccggcaggcggcgcgggcgcatgcgcaggcgcgggccggtggggtggcctggagcggcgtgcgtaatgtcggcactttgctggggccgcggagcggcggggctcaaacgagccctacggccttgcggccgcccgggactccccggcaaagaaggtaacacaaagggagacggccaggcagcccgggggccacggcgtgggctcctcccc

SEQ ID NO: 20158 - DNA, 2300 bp, Homo sapien
acacagaaggacacacagtgtgtgatcccctttatatgaaatgtccacaacaggcccatccacagaggcaggaaggggatgtgtgggtgccgggggctggcagaggggatgagtgacagctgatggggcttcttcttgcggtgatggaatcttctggaactagacagtcgtggtggttgcacaactctacgaggtactaaaatcactgaactggctgggtgcagtggctcatgcctgtaatcccagcactttgggaggcagaagcaggtagatcacgaggtcaggagtttgagaccagcctggccaacatggtaaaactctgtctctactaaaaatacaaaaattagctgggtgtggtggcaggtgcctgtaatcccagctactcaggaggctgaggcaggagaatcgcttgaaccagggaggcagagtttgcagtgagccgagatcgcaccactgcactccagtctgggtgacagagccagactccgtctcaaagaaataataataaaataaaatcactgaactgtacagtgtaagtgggtgaattgtgtggtatatgagtgatgtttccgaggtgtcattaaagaaactcagacgcctggggtggggccagtctcaccgctgtgggtcccatccccatcatttctcacaaggccctcagatcacccttccgcggtggggggcggacactctaagaagggaagacctgggctcctgctggcgagaaggcggtggacatttcttcagtgtctggtgccgcgccctctgcccagcgtgctccgtggagggtctcattgtcttcctccagacgtctctttactggcccattttacagaggcggaaccgaagcttggggtgttggccacagggctctagtgtgggaagccaggccaggctggacctcagccatggggacccctgtccctgagactgtggcacctgccacaccctctgtgtgacccgcctaagccaggaagagagggtcaggagatgcctgagccaccaagaaggcatcccagcgtccagccagaccggttatccctccagagggctccccggcaggacaggctggtcgccatgtcttcagcctggtgctatttaaaggtgggtgccacctggggctgtggccgcagggccaggactgggctgctgggagctgtgtccccacagcggaggtcgccgcccctctcaggcctcggtttccccagttgtcaatgcctccacttggctgtgagtctgtgagggtcactgtgctcaccttttggggcccagcgcatggggcaggcagaggaagggtgggggccagccgccttgctgggtggttccccgtggggcctggggtatggctctaagggaggagcaagtgtgggtgcgaatggggccgccccattcctgccgcctccgacgtgccccgccagccggccaccgacaggtctacgtggctatcctccctcctgcccacctacctgcccaaacacacgtccccagtcgtcacctgcccacccacccgcgcattcccacacccttgtgggcctggctttcgggaaactacaatttgcggggagagaagtcccacgagggcatgccccggagcctggctggtcccacggctgacgcacgcggcaggacctcccgtgtccatctctgtccccaagcatctccgcctctgcccctctctgtctctgtgtctctctcgtctctcccggtcatcttccttgtgtctcttgactgccgccgtctttctgtctctgtctccctccgggtctctgtctccctccaggtctctgcggcccgcgtctcacactcccgcccccgcaacccgaggtcctagcccgcccggggactcggctgactcacggacacgccccgcgagacaaacaacaaacgcgcggaggccgagcgcggagtcccgcacggccgcgcccctgtgcacctggcccccgcccccgagacgtcccattggccggcgccctagcctggtcccgcccaagtggaccccgcccccgccccgaggcaccccattggccggcgtccccgccccagcgaacccggccccgcccccgaggcgccccattggccccgccgcgcgaaggcagagccgcggacgcccgggagcgacgagcgcgcagcgaaccgggtgccgggtcatgcgccgccgcctgtggctgggcctggcctggctgctgctggcgcgggcgccggacgccgcgggaaccccgagcgcgtcgcggggaccgcgcagctacccgcacctggagggcgacgtgcgctggcggcgcctcttctcctccactcacttc

SEQ ID NO: 20159 - DNA, 2300 bp, Homo sapien
gccacgcggtccctcttcccgagaggtcgcgccctgacctgcttccaagtgccacccgtctcagccttgctgaggagcccttggagcattttgtcactggcaggacccgaccctcacagtagcccaccagccggagcacggcccccccattccgccgtcagggcactcaggagcgcggcccccccccccattccgctgtcagggacccaggagcgcgggcctccgcccattcccccattccaccgtcaggggacccaggagcgggggggccgcgtgggctccacagtgatctccgaccccgggcgggctccaaggggcccagggcccaggacaaacgcggcctcggtgcttttgcaggtcctgcagcctcgcgtttcagagccccgggccgggcccccgaggagctcccggcactctcgcctcttgtctttcagctcctcaatcagtttgaaaacacaggccccccaccggcagataaagagaaaatccaggccctccccaccgtccccgtcactgaggagcacgtaggtatgagagctcagcctcccgagtagtgggaattacaggcacccgccgccacgcctggctcatacttgtattttcagtagagacagggtttcaccatgttggtcaggcaggtctcgaactcctgacctcaggtgatcctcctgcctcggcctcccaaagtgctgggatgacaggcgtgagccaccgcacccggcctcgagcatttccctgaaggtgggctgggaggagagggttctgtccaggtcccctctggcagcccgggggacacacacacggcttttctcccctcgctgggctcaggggcggcctccggctgaggctgtggagtagcctgcccttgaaggctcggcaggccccccacgcccgctgtgaccgcagctgcacactcccgcaggctccgggctcgagtgccctgtgtgcaaggacgactacgcgctgggtgagcgtgtgcggcagctgccctgcaaccacctgttccacgacggctgcatcgtgccctggctggagcaggtgagtgccccgcccacccgcccccccaccccgaccgcggccctcccgcctctaacctgccccttctcccgtccctgcctctgtccccacaaagcacgacagctgccccgtctgccgaaaaagcctcacgggacagaacacggccacgaacccccctggcctcactggggtgagcttctcctcctcgtcgtcatcgtcctcctccagctcgcccagcaacgagaacgccacaagcaactcgtgagcccacgtcggccgtcgggaaagcacggggcctttcccacccaccctcagccagcgccacacggcacccacagactgggtgccccggcggcgccacgcttggctggtcagcgctgcaggtcccgcctgttccagggcaggacccgggcccggcccaccggccccctggcttgggaaggcgtgggccacatggtcccctctggggcgtccccagcctccccgtcctctgtctaacctcaccctctaaacgttcagcggtggaaagatttttataattttaaattattactgctttgaaataaacggacgtttgagctcacgtggcggccatgcatggtttgtggcggaagacggggcccagcggctcccccagcgctgaagcacggggttcagcggctcccccagtgctgcaggtgccgccaggacgggccacgtgggcccccagcctccccctcggccgcctccacgacccggagtaggggggctcgggaccatgaggatgaccagcaaaattcaagaacaaaactgctccaacagacttttttaaaggaaaaaatatgtgtatcttgaaagctatttaaaatacactacttacaaagagaagccggtgctgtggctttccttctgcgcccgtgcgtcaggaaaaggccaagctgggaggctggtcgggctctgcagagtccggtcctgtctccaggggtctgcgcctcctgcagggcttggcacccagggccggctagcaaaactgctctcccgaagttaagcccaggagggctgctggcgaggtagcagggtggcagtgtcactgggtcgtgaaatttaaaaccagaaacaccagcgttaaagcgccagggcccagcgcctctgccccacgcttcggtcacacctcagccacgcgggttcctggccccttctgaaaagccggaccccactgctcaaggttgctggatgcctggcccggggtgcagccagctcgggcacagctggcaaggcgtggggacctgcgggctcagggggcc

SEQ ID NO: 20160 - DNA, 2300 bp, Homo sapien
agcctctcctgccacggccagtggggacagaaagctggaagaggcaagagcgagacccctgggagacagaggagtaaggcaaggctcagtctcagctccccaaccttcgccccacacccgagatttcactttatttgttcctcctgctggggaggggaagccctgtggcttcagtagagaggaaaccacacctctctctttccactcctgggcctggccccgctctcccgccatgccccaactctagcactcgctcctcctctgtgacccagagacaggcggcttctcctgactccctccagccccttcctgggtctctactcccggggaactgcactgcttctggggggcttggacttctcttacgggtcaaagcgtagcaacagccgggcggctacgtacacagcacagtaaatcctcaatgcctgcagcctcttcccctgggcacagggtggggagtccagacccctccacctcctgcggctgctcccctcaagctggccaagcggctcccgactgagccggctctgccactttcccgctgagccaccacgcgcctcagtttccccatctataaagcacgggtggctcgactaaatcaccactttgcacgtcagcctggcgaagggcaacacgggttaaaaatgcagaccaccgccgggcacggtggctcacacctgtaatcccagcgttttgggaggctgagccagaagaatcgcttgagcccaggagttcaagaccagcctgggcaacacagggagaccccattcctaaaaataatattagaaatgcagactgctgagcgcattccacacctactgactccgaaaccctggaaaaggggcctggaaatagcaccttcaacgagcgctgctcccacctcccccaaggtgacatcaggtccgcgtgggaaacactgccctaaacgagcaggaagtagcactcggcacgcccaggcccagggtcctcttcggtgaggggcggctgtaaacacctggaggaagggtgggctgcgcagccaagccccgggaggggaggaacgcaggctctgctcacaaagccccgccggcgggccgcggtcggaccccgggacagtgcctggggcgttccgggcctgggcctgcctccaaggcggcggccagggctccacgaggcgagcctgcagcgaggcgccggcgcccccaaccacgcgctcggcgggggtcccctggcgttattctcggggtccgagccccgccaggcccagcccctgccccgcgccgcgccaccgggcaataccctctctctgctcgccgggcctcagtttctccgtttgcaaaaccaggctcaccgggcttagggatcccacctgggatcctcgcggcctctcgggtcgggaacgccgcggatgtggggtcacccggccgcgatcccgctgcgccgctccggccaggccctgcctcccgcccgggcctcagtctcccgcatgtacaggacggggttcgcgcgcgcaccgcccgggctccccgcggattcagcctgggccggcgctgccccgagcctcagttttcccgtcgtggtcagctcgcgcaagaggcgggcgcaagcgacccccaccccggccccggccttgcctcaggcctgcggcgcagaccctgccgcccgccgccccggcccgggcctcaccggcaggcgcgggacgatctccacggagcagcagtggcagaagtaccgtccgggatgcggcgacgcctcggccatggccgccgccacctactccgcgccgcccgccccccgcgcggcacccgccgccggccgtttgctgctccctcgccggccgacgcgcccgcgcacgctcacgcacggcacgcacggcacgcggggcggagcgggggcgcgggagcggcgaaagctgcgtactcggcgggcagcggcccgggcgacggtggccgctgagagacaaactaggcccggccgttgggcggggctccaagcgggggcggggcttccggcgggggcggggccaaagcaggcggcggaagagacgagaagcggggcgtgcgcggggcggggccgaggccctcctcccctcccgaagctgcccaggccttcgtgtccctcagtgcttccctacctcatcgccgtctcccctcacggtacttcagcccactgtccccaccgttcctggggctcgccaggcgccctctcccccgcccgctgcccggtgcagcgctctcccgacgcccgcgtggctttcttccaggtctttgctcaaatgtcagcttacaaggtcttctctgctgccctcctgctccgtggca

SEQ ID NO: 20161 - DNA, 2300 bp, Homo sapien
ggcaggcagcagagcacagagagggctgaggaggtgccagcggtcctcatgtctgctccgagccaacggaaaaccgtcaggttctgccgccttctcagaggttaggccacttgcctagggacacacagccagttcgtggtttggcgtcgtttgaaccaggcctgctgctcctcctgcacttgcggagcgtgaaggctggtgcaggggctgcgtctggcaagcctcgcccctccccagcctggggttttcctggattcccagggacggggcccgtgcgctctctggtggtcagagcaggaatgactggattcgcgctgctgcaaagacgactggaaggaggctgaagcccctgtccccaacctctggacattcaaaaccctaaatgcaggccgggcgcggtggcttacgcctgtaatcccagcactatggcaggccgaggcgggcggatcacctgaggtcaggagtttgagaccagcctggccaacatagtgaaaccccgtctactaaaaatacaaaaattaggcgggcgtggtggtgcccagcctgtaatcccagcaactcgggagcctgaggcaggagaatcacttgaacccgggaggcggaggttacagtgaaccgagattgcgccattgcactgcagcctgggcaacagagccagactccatctctaaaaaacaaacaaacaaacaaaaaatctaaatgcacaggctccaactcttaattcctcaacagtctcgctccaatgcctcattttgcaggaagtccaactccaaccaaatcctattcatccctcagccctggttccaatgtccttacccctcggaagccctctctctctttccccaggcagagccagagtcacccttgagttccacgctcctgtccaatctcatgggactgggggtatctgcgtgcattcagcatagggtctggtgtgcagtagttgctcaatgagtgttgagtgaagaaagaaatacacgcatgaggccgggcgcggtggctcatgcctgtaatcccagcactttgggaggccgaggcgggcggatcacgaggtcaggagttcaagaccagcctggccaaatatagtgaaaccccgtttctactaaaaatacaaaaattagccggtgtggtggcgggtgcctctagtcctagctactcgagaggctgaggcgggagaatcgcttgaaccctcggcaggcggaggttgcagtgagccgagatcgggccattgcaccccagcctgggtgacagagtgagactccgtctcaaaaaaaaaaagaaaaaagaaatgcatgcatgattgggccagaactaacctcagaaatgatcctggcctgtgctgggtgatgataccgtttctactgattaaatttggaagcaggggttaggtttcctgccttctccgcacccgagaggcgcctgggccgtcagcccgtggagcatcttggaaacaaggccacaacccacagacctcagcctctgtctgaccccacgggtcccagtgaggcccagacagcgccctgagccccgggtctgcctgtattccgcagcgctgagggaatgcctgctgtgtgtcaggcgctgctgcgggtccaaaaatccctttgctgcgcagctgacctgacagtgcatcgggagggaatcagtgccacggagcaggagggcagcagagaagaccttgtaagctgacatttgagcaaagacctggaagaaagccacgcgggcgtcgggagagcgctgcaccgggcagcgggcgggggagagggcgcctggcgagccccaggaacggtggggacagtgggctgaagtaccgtgaggggagacggcgatgaggtagggaagcactgagggacacgaaggcctgggcagcttcgggaggggaggagggcctcggccccgccccgcgcacgccccgcttctcgtctcttccgccgcctgctttggccccgcccccgccggaagccccgcccccgcttggagccccgcccaacggccgggcctagtttgtctctcagcggccaccgtcgcccgggccgctgcccgccgagtacgcagctttcgccgctcccgcgcccccgctccgccccgcgtgccgtgcgtgccgtgcgtgagcgtgcgcgggcgcgtcggccggcgagggagcagcaaacggccggcggcgggtgccgcgcggggggcgggcggcgcggagtaggtggcggcggccatggccgaggcgtcgccgcatcccggacggtacttctgccactgctgctccgtggagatcgtcccgcgcctgccggtgaggcccgggccggggc

SEQ ID NO: 20162 - DNA, 2300 bp, Homo sapien
cctctgggttagggaagacagagccgggagcaggaggccactggcagctggcctcggtttccccggagagggccggaacccacgccagccagacaatgaccctttgattcgcacagcccaggccggagtggccaagccacggcggggtcaggtcttggccaaggtcacactgtccagcccccgcacatcctcagtgagaacacagggtcccatccctgccccactccccaatcccgggagagtcccgggggaatgccagaggccaaggccaggtcgagacggcggggtgtcccccgtcagtgagaacacagggtcctgtgcctgccccactccccaagccggggagattcccgggggaaatgccagaggccaaggccaggtcgagacggcggggtgtcccccctcagtgagaacacagggtcccgtccctgccctgctccccaagccggggagattcccgggggaaatgccagaggccaaggccaggtcgagacggcggggtgtcccccctcagtgagaatacagggtcccgtccctgccctgctccccaagccggggagattcccgggggaaatgccagaggccaaggccaggtcaagacggcggggtgtcccccctcagtgccactaaggcagaacttggcccctggccactggctgctgggggacacaggctgggcagctaaggtggaggaaagggtacaggtgtgtcttctgtgggcacagatctcactcaggccagagaaggggctgtgccgtggggctgctggacacgtccgtttccacctgcggggtgggcaatgccggcacagcgagtggccagacacaggcatgcccagcagacacccaaccgctctccaccacctcaaccttctgtattttcctgaaagcatttaccactccttgaagttatagattaatttgtctctgcattttgttgtccaaaccaggagctcggtgagggtgtgatggggtctgccttggtcaccgtggcaccccagcaccccgcagggtccctctggccaaaagagatgttcactgatgccctagaagcaggaacagaggggctcccctgcgctcgccaagggcgcctgacaaatctggaggcccccatgacagaatcagctccagagtaggaaatgtgtctggctgcacgaaagccccctcgggcgcagcgcctccaggcccacgcagatgtcgctgtcatacattgttggaaacgcctctgctggaaacagtgtttgctgaatcttggagggagaggaaaaaacctagtaaacattcttgttgaggtgatctgggggaatgtctgcaaaggcttggagggctgatggggcagagctgcccaggggcccaggacaaaggccaggcgtgcgcgcgcacacacacacacacacacacacacacacgcagtggcctccctgggggccgtggctgggcgaggcctgctgttgtccgagatgctggaaggagctgtgtctctgggtctgtcccggccgcaccccgttctgtcccacacccaaccactccccacccacaggccggctccagcggccaggtggacgggtgcgcggcccgcgctgtgagcagggaaccatatccagctgaggttttgggtgtgtggggcgggtcgggaacaaggaggccgggttggggggctcagaccacacttggaccatgaaagtgaccacatgcaaatcacagaaacgggatgcagggatccacagacgtgctcctcttgggtccccgttacctcaccgccacccctgaaactgaagacccccaaacccactttaattcctggagacggcccctcgatccacccaaaaggctgccaccacctcgaacccacacccctgtcccggttccgccctgggtccagccacatctccccaaatgcattctctggctccggaaggggacccgggcgctcgcccccaactgccccccgcagcggccgggcccggcgcctgcccaccccgcgcgggacacggcctcgcccccgccactcccgcgccgcgccccgccccgcgccccgccccgcccgcggcccgcgggacctttatagggagcgccggccgcgcgctgggaagtcggtgccgctgccgtctctgcgttcgccatgcgtcccggggcgccagggccactctggcctctgccctggggggccctggcttgggccgtgggcttcgtgagctccatgggctcggggaaccccgcgcccggtgagtggggcggccagaggggcgggcggggcgggccacccacgtggggctgcgcggaatgcggccggggggacgt

SEQ ID NO: 20163 - DNA, 2300 bp, Homo sapien
aatttattctctggcagtgctggaggtcagaagcccctgcaggcccttctgggctaacgtcagggcatcggtagggctggcttttcccggaggctccaggagaaaattcgtttcctgccgttttttagcttccagaggccgcccgcatctcgcagagcccgagttcgttgtggggccttttcataccttcctttccacgcatttcctgttgcttcatttcacttcattctttattgagaacactttacatttggtaaaacacaggtctggagcgttcaatgatgactttttttttttttttttttttgagatggtgtctcgctctgtcacccaggctggagtgcaatggtgcaatcttggctcactgccacctccacctcccggttcaagcgattctcctgcctcagcctcccaagtagctgggattacaggcacctgccaccacgcctgactaattttggtactttaagtagagacggggtttcactatgttggccaggctggtcttgaactcctgacctcaggtgatccacctgcctcggcctcccaaagtgctaggattataggcgtgagccactgcacccggccccagcctgttcattattaagcgctgacgagcaccccactgctagccactgccgtgaacgccatcacccggctgtgtgagctgcaatttacgacctgaactttgccactaagaacgctcccactgaaaggtgaagacctgccgggctgggcgcggtggctcaggcctgtcatcccagcactttgggaggctgaggcaggtggatcacctgaggtcgggagttcgagaccagcctgaccaacatggagaaactccgtctctactaaacacacaaatttagcggggcgtggtggtgggcacctgtaatcccagttactcaggaggctgaggaaggagaatcccttgaactcaggagacagaggttgcggtgagccaagatcgcgccactgcactctagcctgggcaacaagagcaagattccttctcaaaaaaaaaaaaaaaaaaaaaaaggccgggcaccgtggctcatgcctgtaatcccagcactttgggaggccgaggcgggcggatcatgaggtcaggagatcgagaccatcctggctaatatggtgaaaccccgtctctactaaaaatacagaaacaaaattagccggctgtggtggcgggcgcctgtagttccagttactcgggaggctgaggaacgagaatcactcgaacccgggaggtagaggttgcggtgagccgagatggtgccattccactctagcctgggcaacaagagcaagactccatctcaaaaaaaaaaagaaaagaaaaaaaaggtgaagacccccatgtacagccatgtcccactggactccggatcccacagaacgtcagtgctacaggctggggtgcggtcactgcctcatcctcacctcctagcatgaggtctggtatacactaggcactcaataactgctgaataaaggcagaaatctgccaggtgcagtggctgtcttctgtgatctcagcactttggaaggccgaggagggaggatcgctggagcccaggagttcgagaccagcctgggcaacatagcaaaaccccacctataaaaataaaataaaataaaggcagaaatcatcagagcttcccaggagaccggccttcctcgctgtccccacagccctgaggtcggccctgggtttggagatgggaagactggggtttgcggggtgggggccggaggcgagctgcgggtctcgagtgccgctgtgacctcggttcctcggaaagctccccacacatgctgggccacgtggaggctgggtaaactgaggcacagaagggtcaattgccttcccgaggtcacttgcagccccagagctgtctcctcctctccctgtttccggactaggggacaatgattattatcaacatgattattaccagccaccacctgagaccatcgatttctcagaaacgcccgcctgggctccaggcgttgctggtggggcctcccgaccacaggccacagccaggctccccctttccggccgttggctgagggtgggagccacggcccgaagacctctgcggggagacgccagcctgcgtctgccatggggctcgggttgaggggctggggacgtcctctgctgactgtggccaccgccctgatgctgcccgtgaagccccccggtgaggagccccccgggatccccacccaggcccccgccaagtccccgtacgggggccacacccgggaacccccagtcccgggagaaccct

SEQ ID NO: 20164 - DNA, 2300 bp, Homo sapien
cccagctactagggaggctgaggcaggagaattgcttgaacctggtagacggaggttgcagtgagccgagatcgcgccattgcactccagcctgggcaacaagagcgaaactccgtccaccccagccaaaaaaagaagtggttttgccatgttggccaggctggtctctaacttttgacctcatgatccaccagcctcagcctcccaaagtgctgggattacaggcgtgagccaccgcgcccggcctggtctcaaacttttgacctcgtgatccaccagcctcagcctcccaaagtgctgggattataggcgtgagccacggcgcctggccgcaaaaatggaacttctgcatcacaggtgactaacggtgccaggcacacagtaggtgttcaataaatcactttggactaaaagaacacagaggccaaggggaagtgaagaaacgactcacaggtcagttttattgggtgcctagtgcaggggtcagtacactacggccctcggatcagctctggccctctgcctgtttttgtaaataaagttttattgggtgcctagtgcaggggtcagtacactacggccctgggataagctctggcccactgcctgtttttgtaaataaagttttatgggcacagagccatgcccatggttttacatattgtctctggctactttcactctgcgatggcagagcagagtcattgccgcagagactgtggcctgcaatgctgaaaatatttactctctggccctttacagaaaaagtttgccaaaccctgagctagtgtgtgctgggccctgtgccaagccctttgtgtgtgctcactcagttaaccctcccacagccttaagggtgggggcaggggggtgggggggaataaggctccgagaggttgagaaacagacccagggtcacacagcttggagatgggtgagctgggaatcagacagacccgggacccctgatattctttaggatcttagctttgttaacctttgctaatttatcttattgtcttaaatgctaaaatgaatacacattcattgtaaaaagggaggaataaagaaaaggtgttgacggccttcttcagcctggggtacatcctgccgtatctttctccacagctcatccggggctactttcctttaaatctacagccattcagcaaacatcggcagaggagaaccgttttataagaaaactaagaagtttggaagaatctttccttcctgcccaccctggacccccatgagtaggtgtgctggggctggtctgcagtgttctcacgggaaaccaggaagctgggcccaaggcctacatgttggggaagacaggtcctgcctgtctcctgctgtggctccccagtgctctgaggacaaagcctgagctctccctgattctccaccgtccctctcactcactctggtcgtctggtcgctgggcctttagtgagtgtgccatgggggccctggggccgattaaattccagccccggggaccaggctcagctcccagccagggcacagacagatcagcacctgcggttgtctccaccccaacccccggcctttgcaggcacagcgccctccaccagatactccggcaaaggaggcctggggaccctgcgagcggggccgggggtgcagggagctgtcagctcctcgcagcggcctccccaggacccccctatcccctcgctcgccctgaaatgtgtgtccctctcggcgtctgggctctcgagaaaggcctttgcttgtctgacttcgcgagggtcccggctctggcccaggagctggggaggggcgggacttggtgacagccgggtcccagcaccgcgcccagacctaggcccttctcaggggtgccccggggcggggcgcgcggggcggggggcggcggcggcgcagccggcaggaggcgcagcgcccgctcgcagcgcggggaggtgggaggggagcggggcggggagcggggcgggcgggagggagaggggagcgcgccggagacgcgcgcgcccagcccaccccccgcgcccgccgccgcccggacaataaacagcagctttgcgcggggcgatgcccgagccggtgccgccgcccccgcgccgcgcagccccggccgccaggccttagcccgccccggcccccgccaggccgcgtccccctcccctcccctcccccgcgcgccacccgcgcccgcccccgcccggcaccgcggacccacccggacctcggcggggagatggagtgagtaggcgcgctcgggccgcggggctgggggcccggagctccgggag

SEQ ID NO: 20165 - DNA, 2300 bp, Homo sapien
ccctgaactccgtgtgaaccacggggctgcagacagatgaggagaggggctctgcaccagcttctggagctgcagggcgaggttgctgtggggaggtcagagaaccacagaattcctcggttctttcctgggcgagtgagcgtgtggtgggtgcctggtgggggtggcgagggcttcggtttctggacctccttcccacaccacaaagggccctgtatctttgaagcctgaagcccggtcccttcaggcgtatccggcaacagtggtattcattcattcatttattgtttgtttgtttgtttgaggtggagtcttgctctgttgcccaggctggagtgcagtggcgcgatctcggctcatgcaacctctgcctcctgggttcaagccattctcctgtctcggcctccaagtagctgggattacaggtgccgaccaccacgcctggctaatttttgtatttttagtagagacgggggtttcaccatgttgggcaggctggtctagaactcctgacctcaggtgatcctcccacctcagcctcccaaagtgctgggattacaagcgtgagccactgcgcccggccattcattcatttttgagacagagcctcatgctgctgcccaggctggagtagggtggtggggtcatggctcactgccccctggacctcccaggctcaagcagtcctcccaccttagcctcccgagtagctgggactacaggcgcacaccaccacaccttgataatattttttatttttatttttggtagagatggggtcttactagattgcctaggctggtctcgaactcctgggctggagtaatcctcccacctcggcctcccaaagtgctaaaattacaggcgtgagcagctgtggttttgcttttgttttgttttgcgacagggtctcactctgttgcccacgctggagggcagtggcgcgatctcggctcactgcagcctcgacctcccgggttcaagtgattctcccacctcagccttctgagtagttgggagcaattctcgtgcctcagcctccacgcccagctaatttttgtatttcttggtggagacaaggttttgccatgttggccaggctggtctcgaactcctgacctcaagtgatccgcctgcctcagctgccccctgatatttgttaagcgcctaccacataccagccctgggaggtgaggctacagctgcactgggtgggctgttttcaaaagacaatgattgggccgggcgcggtggctcacgcctgtaatcccagcactttgggaggccaaggcgggcggatcacctgaggtcaggagttcgagaccagcctggccaacatggtgaaacccctgtctctactaaaagatacaaaaattagccgggcgtggtggcaggcacctgtcatcccagctactcaggaagctgaggcaggagaatcgcttgaacccaggaggcggaggctgcagtgagctgagatcctgccactgcactccagcctgggagacagcaagactccatctgaaaaaacaaacaaaaccacaatgattggataagagcgagtctggggttgaatccggacttggatcctttgctgtgcgtccttgggaggctcgtctccctgtctgggcttttgcaagcccaggcttgggaggtggggctggtgggtctttcatcctctgtttgcccctcctggggctgcagagtaggtcttggtgggcaggagggtgcagagaggactgtcctgatctgtcttatggtctgggccaggaggtgatacacttccttcttcccgaaacacccttctctggcctttgatgcctggtgaactcctatgtatccttggtggccctgcctcaatgtccccttctccccaaacccttcctggtcgctaggcagagcctcgtcccctcctgtcctggcttccttggccgctgagggggcagggagggccccactttacagaaggggaaactggggttcagagatgaaatcccttgccctggttacccctaggggaagaggcagagctgggatttgaaccgcgtctgacggacagcagggctcagtgaaccagagcttgaccttatctccctcccgcagggtcctggcggcagagaccacgtcccagcaggagcggctgcaggccatcgcagtgagtttccgccgccccgcagacggtgtggtcagggtggggaagtggggggacctggggtctcgggccctggacctgtcctaggacctggaaccagggcatggtgggtggtgagttatttgcttgggaaacttggatcctgctgacc

SEQ ID NO: 20166 - DNA, 2300 bp, Homo sapien
gaggcaggagaatcgcttgaacccaggaggcggaggctgcagtgagctgagatcctgccactgcactccagcctgggagacagcaagactccatctgaaaaaacaaacaaaaccacaatgattggataagagcgagtctggggttgaatccggacttggatcctttgctgtgcgtccttgggaggctcgtctccctgtctgggcttttgcaagcccaggcttgggaggtggggctggtgggtctttcatcctctgtttgcccctcctggggctgcagagtaggtcttggtgggcaggagggtgcagagaggactgtcctgatctgtcttatggtctgggccaggaggtgatacacttccttcttcccgaaacacccttctctggcctttgatgcctggtgaactcctatgtatccttggtggccctgcctcaatgtccccttctccccaaacccttcctggtcgctaggcagagcctcgtcccctcctgtcctggcttccttggccgctgagggggcagggagggccccactttacagaaggggaaactggggttcagagatgaaatcccttgccctggttacccctaggggaagaggcagagctgggatttgaaccgcgtctgacggacagcagggctcagtgaaccagagcttgaccttatctccctcccgcagggtcctggcggcagagaccacgtcccagcaggagcggctgcaggccatcgcagtgagtttccgccgccccgcagacggtgtggtcagggtggggaagtggggggacctggggtctcgggccctggacctgtcctaggacctggaaccagggcatggtgggtggtgagttatttgcttgggaaacttggatcctgctgacccgcagagaatggaagtggagaccccctgagtcggcagctcctggacccccggcctcgctctgcctgatgggtcggtggggaaactgaggctggcattccctggaaccctgccctcgtcctgcaggaaaataaactttggtgatgggagcacagatgtgctttggtgccatcttggtggcctctggcccaagaaggccctcttggtgtccgcagacccctctctgtgacccgaccctcctgtgacgtggcccgattcctgggttcaagtgactctcctgcctcagcctctcgagtagctgggattatgagtgaccgccacgacgctgggctaattgttgtatttttagtagagatggggtttcaccatgttggccaggctggtcttgaactcctgaactcaagtgatcctcccgccttggcctcccaaagtgctgggattacaggcgtgagccaccgtgcccggccagtcattgattttcgagacagggtcttgcgctgctgtcccgggctggagtacagtggtgcgatccgctgtcacctggaagccagtgggccacgaggatccccggacagaggaagcaggatcgggctgggcagagccttgtgtgggggtgggggggtctccgggacccccacgcccatccctgaccccacccggccctccccacaggagaagcggaagcggcaggcggagatcgagaacaagcgccggcagctggaggacgagcggaggcagctgcagcacctgaaggtacgagcggggcagggacccagggtcagggagtgcaggcggctgtgaggcggaggccccggactcctgcccaaccctgaccctgaccccaatcccaacctgaccctgaccctgcctccagccctgaccctgaccccgaccctgaccccgaccccgaccccgaccctgaccccaacctgaccccgaccctgaccccaacctgaccctgaccccgaccctgaccctgatctcagtcctgactctgaccctgacctgaccccaacctcaatcctgaccctgaccttgactctgacccagaccctgacccccaacctcgattgtgattctgacctcagcactgatcccaaccataaccctgaccccaaccttggtcctgcctcaaccccgaccctgatcctgaccctgacctcagtcttaagtcttaaccctggccctggtcctgcccacgactctgacctggatccctgctgctcagtccaaggcactgcgggagcgctggctgctggaggggacgccgtcctcggcctcagagggggatgaggacctgaggaggcagatgcaggacgacgagcagaagacacggctgctggaggactcggtgtccaggtgggggctgcagcgtgggtgccaccgggctgggtggggcctcgggggccgctggctcccgggaggg

SEQ ID NO: 20167 - DNA, 2300 bp, Homo sapien
tattcaggaggctgaggcaggagaatcgcttgaacctgggaggcggaggctgcagtgagctgagatcgtgccactgcactccaacctgggcgacagagcgagactctgtctcaaataaaataaaataggccttcggagccctgagtgggaggccagcctcagcctgggcgtgggacgtctccacagtgcccccagctcatgggcgatccagcctccaccctgctggggcctcagttttccccgatgaggtggtgagtgtggtggagagcactgctgagggaactcaggttccaattccagcctaaacccccgccattcctgaggcgcgattttaagctttccgtacctccgtttccctatctacaagccagggagaaaaggacgtgaagggggtggcgggaggcggcggtgggaggcgccgtgaggccgcgcaccctgagctttcacacacccagcagcgttaggtgccacgctgtcctttgggggccctttatccagatttgtccttaaacacccccatcttggccaggcgccgtggctcgcgcctgtaatcccagcactttgggaggctgaggcgggggcatcacctgaggtcaggagttcgagaccagcctggctaacgtggcaaaaccctgtctctactaaaaatacaaaaatagctgggcgtggtggctcatgccagtaatcccagctactagggaagctgaggcaggagaattgcttgaacaggggaggttgccgtgagccgagatcgtgccactgcactccagcctgggtgacaagagcgagactccgtctcaaaaaaaaaacacaaaaaaagcacccccctcctgagcagccctgctggattcgtagctgggggcctttttactcgaagaagagactgaggttcagaggggctccacaagcagcccctctggcgtaggtcaggacagagccccagcctggggaactgaagtccctgccccctcagctgtgttccctgccctcatagacggcgctaggcccagtggcccgacttccccacagatgctgggctccccacagtcccagcaaggcctctgcaccttgactaagaatccaggaggaccatgggcgcctgagggcctctgcgtccccatctctcggggtggcctgggtcttttgacggcctcgtgcggttcttttttttttttttttttttttttttttgagttggagttttgctcttgtcgcccaggctggagtgcagtggtgtgatctcggctcactgcaacctccaactcctgggttcaagtgattcttctgcctcagcctcccaagtagctgggattataatagcgtgccaccataccccgctaaattttgtatttttagtagagacggggtttcgccatgttggccaggctggtctcgaactcctggcctcaagtgatccgcccgcctcggcctcccaaagtgctgggattacaggtgtgagccaccaagtccggccccctcgtatgggtttttatgtggatggggcctagggaattcctcccagcagccctgagggagcccgggcgtgatgttcccccacgtcccggaggagaaaacagggctaagagaggtcaggtgggatcagaacccaggccacaccaaacccccccgagtctgccaaacctggtttatgcaagaagggggccatctaggggagttgccccaaggggtgggctgggccagaaggcacggacgggattgggactcagcccctccggccccccaggagacacaggccactgtgcacgctgagctgctgtgtggccctggacacctgctgaccctctctgagcggtgctgagaggcggtgggagggccaggcagccaagggaggtttcggctgagttctggctcctcggggccacctggaggccctgggggtggaggggcagccggcagcgggcacggtgcccgcccttgcccagcctggtatcctctttctccctcctcctcctctggactttgtttcctgatcccaggtggggctggggggagggggcacacctgcctcccctgggtggggcctctgttccctggcaacctggcgggcagggcggagctgggaggcctctgtgcccatcgaggagtcagagtggaggctgcagactgtggagccgggagccggcaggtgaggctgggggcgccccgggccgggccgggcggggatcctgtgtggggcggttggatccacatttggcgtgggagcgtcatgtgtctgtgggcggggtctgcttgcctggcggcacttgggatccagggaggccccctgccccaccccgtca

SEQ ID NO: 20168 - DNA, 2300 bp, Homo sapien
ggacattcctgatgagtgaccctggctgcagatggctcttggtgagtctccgttgaccgggtggttcgggccaaaggaccttgccgtgcgatgcctccatggagctcggcggccacccctaatccgggctggaatcctctggcaccagacgcccggcggggctccaaggctcctgggcccacgccaggccccggcctgaaacgcagcactgctggaataaaacacgccagagaagcagggcgctaggctcgcctggatttggggaaacgagaattgtcatgtcttctccctccgtaggttggtgttaatgaaaaacccccttttcagcatggactaaatcccgctaattctatttagggagcagtgtctactccgggccgggaactgctccggtttccaaccgcagcctcccgtgagggtcccagtgtggagggccggggtcatcccctcactctgggatggctcccaacccgctgacctggcctccccgtcaggcaccctcacagctctgtcagactcttcatgtgatcagcgctcctgggaacattagtttagggtgttttctgctgctgggatggtggcccgggagggaccctcctggtgaccctgctgggcctggccctcagtttccccagccgtaggctggcagcctcgaactgtacgagctccaggccacagtttccccagctgtaggtcagtgggccagggactgtagggggctcgggcctcagtttccccagctgtaggcgggtggcttgggcctcagtttccccacctgtaggcgggcggccttggattgtatggagcccgggcctcagtttctccagctgtaggcggatggccgtggactgtgtgtggcctgggcctcagtttcccccgctgtaggcagatggccgtggactgtgtgtggctttggcctcagtttccccagctgtaggcggatggccgtggactgtgtgtggcccggacctcagcttccccagctttaggcggttggccgcggactgtgcaaagtccaggcctcagtttccccagctgtaagcgggcggccgcccactgtacaaggtccaggcctcagtttccccagctgtaggtgagaggccgcggactgtacaaggtccaggcctcagtttccccagctgtaggcgggcggccaaggactgcaaggtccaggcctcagtttccccacctgtaggcgggcggccgcggactgtacaaggtccaggcctcagtttccccagctgtaggtgagaggccgcggactgtacaaggtccaggcctcagtttccccagctgtaggcgggcggccgcctactgtataaggtccaggcctcagtttccccagctgtaggcgggcggccgcggactgtacaaggtccaggcctcagttttcccagctgtaggcagccggccgcggactgtgcggggcccggacctcagtttccctatctccgcagtcgggattcgctgttccggggcgaacaaagaacggtcgggggtgaccccggatcatggcgcgcccgcagtatctgtggccactgtggaaacagccctggcgtgtccgggacgcgacgcggcctttccctccccgcgcgatcacccagatgtgagcgctcagtttgaatcggactttttggccatgtgcccacaaccaacatggagccctgagggtttcctgcccgactccaagatggcgatgcgactccctttgccctcacggcccaggcgggcgggtcctgcccacttgcaagatggcggcagcctgggcaaagcacgcttcccgccgcctgactcgccacgtacccactctcaagatggcgtctcccgcaaagccacgcgccagctgactggctcagacgccgtcacgtgatcccattttctccccctcccccgactacacaagccgtttccgccttcggccttgaggaataaccgcctcccccaataggcgcctgcgatttctctgggtcccgcccccgggcggccttctggccagtgggaggtgctggcgggggcccgcggggctctccccgccccctggctgcagcgggagccaatgggcagcgcgcgcgggggacgtgtgcgggcgtctccgccattttgtgagtctataactcggagccgttgggtcggttcctgctattccggcgcctccactccgtcccccgcgggtctgctctgtgtgccatggacgggtgagtcgcacgtcgccccgcgccccaccgccctccccgcgccgcagccctgcccccgccgccgcgccggcctccccggggccgatctcgccccctctcgggcgg

SEQ ID NO: 20169 - DNA, 2300 bp, Homo sapien
tgaatgaatggctaggtgatggatggatggatggatgggtactgttgggtgcatgggtggagaatgggtggatggatgatgggtgggtggatggatggatgaatgaatggctgggtaatgaatggacggatggatggacggttgggtgggtggatagatggatggtaccattgggtgcatgagtggatgatggatggatggatagatgaatgaatggctggatgatgaatgggtggatgatggatggatggatagatgaatgaatggctgggtgatgaatggatggatggatggatgggtaccactgggggcatgggtggaggatgggtggatggatggatgggtgaatgaatggctgggtaatgaatggatggatggacggttggatggatgggtaggtgggtagatgggtgggtgggtgcatgggtggagaatgggtggatggatgatgggtgggtggatggatggatgaatggctgggtaatgaatggacggatggatgggtgggtgggtggatggatggacagttgggtgggtggatagatggatggctgcatgggtggatgatggatggatggatggacagatgaatgaatggctaggtgatggatggatggatggatgggtaccgttgggtgcatgggtggagaatgggtggatagatgatgggtgggtgggtggatggatgaatggatggatggttcccagtggatggatgggtgggtgatgggtcggtgagtgggtggatgttgggggcataggtgtttgggtggatggaggatgagtgagtgggtgtgtgatgtgtagatggtcgagttacagatggagcatctgtggatggatgaataactcatgggggaaagagtggctgggagcgggttggatctgtggataggtgagtgagacggtggatggccctgaattcatggagggctggacagacgcctccgcgagggagagcagggtgaacctggcccaccttgtccccacagctgcccatagtggcttcttccatcgtatccttgtacttcctggagctgaccgacctcttcaagccggccaaggtgggcttccagtgctatgaccgcactctctccatgccctacgtggagaccaacgaggagctcatcccgctgctgatgctgctcagcttggccttcgcggcccctgccgcctcggtgagcacctgcaccggggcctgtgccagcctgtgggcaccacggctgggagcccacccccgccacctcggtgaacatccacactggggcctgtcggtgaacatccacaccggggcctgtgccagcctgtgggcaccgcagccactgccacctcggtgaacatccacaccggggcctgtgccagcctgtgggcaccacggctgggagcccacccccgccacctcggtgaacatccacaccggggcctgtgccagcctgtgggcactgcagatgggagcccgcctgagcgccccctccctgtgggcaccgaggcctgagcgccccctccctgttggcagatcatggtggccgagggcatgttgtactgtctgcagtcccggctgtggggccgtgccggggggcccgccggggcggagggcagcatcaacgccggcggctgcaacttcaactccttcctgcggcgtacggtgcggtttgtgggtgagttgcgggacgcgccccgaccctgagctacctccacatgcagggggtggggctgtcccgggtccccagctccccgcctggccgagccttccgccctgcaggtgtccacgtgttcggcctgtgtgccacagccctggtgacggacgtgatccagctggccacgggttaccacactcccttcttcctcaccgtctgcaagcccaactacactctcctgggcacgtcctgcgaggtcaacccctacatcacgcaggacatctgctccggccacgacatccacgccatcctgtctgcacggtgagccggacccccaactcccctgactgggagccttcttccgccccggtgaacatgcggggaaacagagacacagagaggccactggagctggggtccccaggtgggcggggctcacgctggacgcctcttacaggaagaccttcccgtcccagcacgccacgctgtcagccttcgccgcggtctatgtgtcggtgagtccggcccctcactgcccttcccaggccctcttgctgacccgtggggagccctccctgaccccaacccccatgccccagatgtacttcaactcggtcatctcggacaccaccaagctgctgaagcccatcctggtcttcgcct

SEQ ID NO: 20170 - DNA, 2300 bp, Homo sapien
ccgagattgcaccactgcactccaggctgcgtgacagagtgggggaaaaaaaaaggcttgaggccatggctgggtgcggtgcctcacgcctctaatcccagcactttgggaggccaaggcgggtgtatcacttgagcctaggagttcgagaccagcctgggcaacatgacgataccctgtctctactaaaaatacaaaaacccaggaggcagaggttgcagtgagttgagatggcaccactgcactgcagcctgggcaacagagcaagactgttgtggatggacagatgggtagatggatgagtaggtggatagatgggtaggttggtagatgggtgggtgggagggtggatagatggatggatggatgggtgatcaatggatggatgggtggatggataggtggatgggtgggtgggtggatgggtggatggatggacagttgggtgggtggatagatggatggctgcatgggtggatgatggatggatgaatggatagatgaatgaatggctaggtgatggatggatggatggatgggtactgttgggtgcatgggtggagaatgggtggatggatgatgggtgggtggatggatggatgaatgaatggctgggtaatgaatggacggatggatggacggttgggtgggtggatagatggatggtaccattgggtgcatgagtggatgatggatggatggatagatgaatgaatggctggatgatgaatgggtggatgatggatggatggatagatgaatgaatggctgggtgatgaatggatggatggatggatgggtaccactgggggcatgggtggaggatgggtggatggatggatgggtgaatgaatggctgggtaatgaatggatggatggacggttggatggatgggtaggtgggtagatgggtgggtgggtgcatgggtggagaatgggtggatggatgatgggtgggtggatggatggatgaatggctgggtaatgaatggacggatggatgggtgggtgggtggatggatggacagttgggtgggtggatagatggatggctgcatgggtggatgatggatggatggatggacagatgaatgaatggctaggtgatggatggatggatggatgggtaccgttgggtgcatgggtggagaatgggtggatagatgatgggtgggtgggtggatggatgaatggatggatggttcccagtggatggatgggtgggtgatgggtcggtgagtgggtggatgttgggggcataggtgtttgggtggatggaggatgagtgagtgggtgtgtgatgtgtagatggtcgagttacagatggagcatctgtggatggatgaataactcatgggggaaagagtggctgggagcgggttggatctgtggataggtgagtgagacggtggatggccctgaattcatggagggctggacagacgcctccgcgagggagagcagggtgaacctggcccaccttgtccccacagctgcccatagtggcttcttccatcgtatccttgtacttcctggagctgaccgacctcttcaagccggccaaggtgggcttccagtgctatgaccgcactctctccatgccctacgtggagaccaacgaggagctcatcccgctgctgatgctgctcagcttggccttcgcggcccctgccgcctcggtgagcacctgcaccggggcctgtgccagcctgtgggcaccacggctgggagcccacccccgccacctcggtgaacatccacactggggcctgtcggtgaacatccacaccggggcctgtgccagcctgtgggcaccgcagccactgccacctcggtgaacatccacaccggggcctgtgccagcctgtgggcaccacggctgggagcccacccccgccacctcggtgaacatccacaccggggcctgtgccagcctgtgggcactgcagatgggagcccgcctgagcgccccctccctgtgggcaccgaggcctgagcgccccctccctgttggcagatcatggtggccgagggcatgttgtactgtctgcagtcccggctgtggggccgtgccggggggcccgccggggcggagggcagcatcaacgccggcggctgcaacttcaactccttcctgcggcgtacggtgcggtttgtgggtgagttgcgggacgcgccccgaccctgagctacctccacatgcagggggtggggctgtcccgggtccccagctccccgcctggccgagccttccgccctgcaggtgtccacgtgttcggcctgtgtgccacagccctggt

SEQ ID NO: 20171 - DNA, 2300 bp, Homo sapien
aggcctgccccatctccaccactggtgatcctagggggagaagaccctgagactcccccagatcttctgttggacccccaagctgccaggagggtccccctgcacactctcccactcctgacctcagaaggctcctgaaaatcaattgcattttcctcctcctcccccagagagctgtttgtggtcaccttgcaacacccagattcccaacggccactctggccccgcctctcacaggccaggaaaacagccgcagccacagcaggcaacgtcccccttctccagggctgttggggaggaacaggatcgcatcgaatgggacccacctgtgaccaactgctcacagggcctccccgagcccccctgcaggaaccggggggccaaagacccctccccaggcagtccgtgcagtcctgtcccaggaagctgggctgcctccgagtccatccaaaggtagcaacaccattgagttcccatcctattcccatcgccatttaactgtttccgcatttatggcaggcgaccctcttcccgggggcagcagtgcctgttatgagcaaactaaggtatctagcagggctccaaccctctggagtcactgtttgtttgtttttttttttttttttgagatagagtctccttctgtcgcccaggctggagggcaatggtgccatctcggctcactgcaacctccgcctcccaggttcaagcaattctcctgcctcagcctcccatctggctgggattacaggcgcctgccaccatgtccggctaatttttatatttttagtagagatggggtttcaccatgttggccaggctggtctggaactcctggcctcaagggatcctcccgcctctgcctcccaaagtgctgggattataggcctgagccactgcacccagcctggaagtcactctttgtttgtttgtttgtttgtttgttttgagacagagtctcgctcttgttgcccaggctggagtgcagtggcacgatctcggctcactgcaacctccgcttcccaggttcaagcgattctcctgcctcagcctcccgagtagctgggattacaggcatgagccaccacaccctaaaaatttttgtatttttagtagagacggggtttcaccatgttgtccaggctggtctcgaactcctgccctcgtgatccgcccgcctcgacctcccaaagtgctgggattacaggcctgagccaccgcgcacggcccaaaaaccgatttttgtaaatcctgccgtttggggcccggagacctcggattgcgacccagggtgcccaagcctcagtttccccatccctacaacgggggtcaaccagcccctaccccgcagggctgcgcatatggaggaggaaatgcacgcagacagcaggcactgcccgagtgcgggtcccgagggccctgcccgcatcccgcagcccccagcccccagccccgcgccccgcaatcccgccgtgcgcaccgagcggctgcggccaggcggagggtggaccccggcgcggcggagggggcgagggtgagtgcggggggaagggagggaggcaccgggagaccccccagtccccctcccccagctcttttgtctccgatgctccgggcgccctgggagcctcgccatggaaacgcgcaccagcgagcggcgggctccgcggaggggcgggcggaggcgcggggcgggggcagtcggagccggcgagagaccgtgagagacacggagacagtcagagaccccgaaaccccaacccccgcccccgcctccgcccccgtctcgatggcgccccccgggccgaccgcagccacccgggaggggaggacgggaccgtcaccgccgcaggcccgaagggaggaggacgcgacccccgagccccgccagccgctcgcgcagacctgagacccccgagacccccggcggtgggaggcggcgccagggaggcggggacggtgcgcggggcctgcggaggacgcgcccagacaaagagcccccgcccctggctgcggcgtctgggctgcggcgtctgggcgcgcgcgggggtctccgggccggaccctcccctcccccgtccccctccccttcccggctcccggccccgccccacggaggagacgcgctttgtgctgggcgccggccgcgccaggtgaggggctgtggggctgggggcgcggacccagtctcctccgccgcccggaaccccagttctcccggatgccccccaccaccacgcggggactggctcccgcccggagaccccccgccctcctcggcgatcccggccccgaccccc

SEQ ID NO: 20172 - DNA, 2300 bp, Homo sapien
taatcccagctactcgggaggctgaggcaggagaatcgcttgaacctgggaagcggaggttgcagtgagccgagatcgtgccactgcactccagcctgggcaacaagagcgagactctgtctcaaaacaaacaaacaaacaaacaaacaaagagtgacttccaggctgggtgcagtggctcaggcctataatcccagcactttgggaggcagaggcgggaggatcccttgaggccaggagttccagaccagcctggccaacatggtgaaaccccatctctactaaaaatataaaaattagccggacatggtggcaggcgcctgtaatcccagccagatgggaggctgaggcaggagaattgcttgaacctgggaggcggaggttgcagtgagccgagatggcaccattgccctccagcctgggcgacagaaggagactctatctcaaaaaaaaaaaaaaaaacaaacaaacagtgactccagagggttggagccctgctagataccttagtttgctcataacaggcactgctgcccccgggaagagggtcgcctgccataaatgcggaaacagttaaatggcgatgggaataggatgggaactcaatggtgttgctacctttggatggactcggaggcagcccagcttcctgggacaggactgcacggactgcctggggaggggtctttggccccccggttcctgcaggggggctcggggaggccctgtgagcagttggtcacaggtgggtcccattcgatgcgatcctgttcctccccaacagccctggagaagggggacgttgcctgctgtggctgcggctgttttcctggcctgtgagaggcggggccagagtggccgttgggaatctgggtgttgcaaggtgaccacaaacagctctctgggggaggaggaggaaaatgcaattgattttcaggagccttctgaggtcaggagtgggagagtgtgcagggggaccctcctggcagcttgggggtccaacagaagatctgggggagtctcagggtcttctccccctaggatcaccagtggtggagatggggcaggcctggccatggagggcacgttgcttggctgaggggcctgggcttgagtgtggggcctgggcttgagtgatgggagagttccgagcaggccggaggggttgagcgtaccagacgctgctcaaaacttttatttaaaaatgattattattattattactattattttgagatggactcttgctctgtcgcccaggctggagtgcaatcgtgcgatttcagctcactgcaacctcccacctcctgggttcaagtgattctccctcctcagcctcccgagtagttgggattataggcgcctgccaccacgacgggctaatttttgtatttttagtagaaagaggatctccccatgttggtcaggctggtgttgatctcctgacctcagctgatctgctgcctcagcctcccaaagtactgggatgacaggggagccacggagcccagcctttttttttttttttgggagacggagttgcactctgtcgtctaggctggagtgcagtggcgcgatctcggctcactgcaagctccacctcccgggttcacgccattctcctgcctcagcctcccgagtagctgggaccgcaggcgcccaggactatgcccgggtaattcttttgtatttttagtagagacggtgtttcaccgtgttagccaggatggtcttgatctcctgacctcgtgatccgcccgtcttggcctcccaaagtgctgggattacaggcgtgagccaccgcgcccagctttttttttttttttttaatagagagagggtctcaccatgttgccaaggctggtctcaaactcctgggctcaagtgatcctcccacctcggcctcccaaggcactgggattacaggcgtgagccaccacgcccggcctcaaaaacttttcagaatatgaaccccactccatgctcagcactgttctgtctagaaggcagagtctatccctgtctcagggcacactgacgtgcagacagcgagctcgccctgaggtcatgcgactgggagggacagagcttccggctcccggcagaggggaaatggggcctggcccacgggagagctgaggcccacgtttggccaggacagggtggatggaggctggggcctccgcagggaagatggacaggtaggatccggggtgggcagagagggagagctggcttggacggaggcagggatctgggggctgtgccatggaccctgtgaggtggctgggctgtgaaac

SEQ ID NO: 20173 - DNA, 2300 bp, Homo sapien
caaactgccctcagagggctcccacaggcccagacacaaactggtgtccccaagggtgtgggggacacggtaagctccagacctcagtttcaccttggaaatgagcccctttgtaaaaaatggaggtgagtttggacgcagtagctcacacctgtgctcccagcactttgggaggccgaggcaggtggattgcttgagcttaggagtttcaaaccagcccgagcaacatagtgagactccacctctacaaaaaaatacaaaaattagccgggcatggtggcatgtgcctatggtcccagctacctgggaggctgaggcaggaggattgctggaacccgggaatcggaggctgcagcgagctgagatcgtgccactgcactccaccctgggcaacatagtgagatcccatctctacaaaatatacaaaaattagccgggcacggtggcgggtgcctgtggtcccagctactcgggaggctgaggcaggaggatcagttgaacccaggagattgaggctgcagtgagctgagatggtgccgctgccctccagcctgggcaacagcgagacctcaactctgaaaaaaacaaaagaaggagatgaaatttacataacttaaaattagccattttgaacggtacagtgaagtggttttcggtgcattcaccgacttgtgcaaccatcactgctgtccagtcccagaacattccatcaccccaaagaaggaagccccatctccatccatcagccatcaccccctgccctcccccggcccctggcaaccacagatccacttcctgcctctgcagatttgcttgttctggacatttcgtctatttatttttatatagtttttaatttgtttttatttattttttttgagacggagtctctctgtgtcacccaggctggagtgcagtggcgcaatctcggctcactgcaacctccacctcccaggttcaagcgattatcctgtctcagcttcccaagtagctgggactataggcgcccgccaccacgcccagctaatttcttttttttttttgaaatggagttttgctcttgtcgcccaggctggagtgcaatggtgcgatctcggctcgctgcaacctccgcctcccaggttcaagtgattctcctgcctcagcctcctgagtagctgggattacaggcatgtgccaccacgcccagttaattttgtatttttagtagagatggggtttctccatgttggtcaggctggtcttgaacgcccaacctcaggtgatctgcctgcctcggcctcccagagtgctaggattacaggtgtgagccaccgcacccagcttgtcaattatatctcaataaagctgttgaaaaagtttaaaaaaatcacccaatcgggcacagtgtttcacacctgtaatcccagcattttgggaggccgaggtgggtggatcacctgaggtcgggagtttgagaccagcctggccaatatagtgaaaccccatctctactaaaaatacaaaaaattagccaggcgtggtggtggacaactgtaatcctagctactcaggaggctgagacaggagaatcacttgagcctgggaggcggaggttgcagtgagtcgagatcacaccattgcactccagcctgggcaacaagagcgaaactccgtctcaaaataataataataataataataataataatcacccatacagacgcgcaggactcaacgcaggactgccagctccactgccctgagccccccggtgccaggcccagcgggcagtgctggagccccagtggcttgggatggggagactgggactctgagctggcaatgttcctgggtgctggctgcatgcccgccatgtgctgggctccgggatccactggttcctgacaccctcacctgcccctgggggtgtggccatcttctagagagggaaactgaggatcagtgcagaatgtagggggagcccaggctggcccagggagcagttggcggtggaggccttgggcaatttcccgtgttcccactgagtggggctgtccctgggcctgggcggggacgccaccaactgccaaggcctgtgtataagggcagccgccgccttagccacagacctgccccgccatgacccggctgacagtcctggccctgctggctggtctgctggcgtcctcgagggccggtgagtgcctctctgtgccggtggtcccccatctgtgctagggcccggctgccagggcagaactcagacttaaagcacagagaaggcaagcggcttggcctgggtcacacagccagcccgg

SEQ ID NO: 20174 - DNA, 2300 bp, Homo sapien
atcgcaccactgctctccagcctggtgacagagcgagactctgtctcaaaaaaaaaaaaaaatccaaaggggaaaacagtaactggacagtgcaggaaccggcagatgccctgaccacgtggtcaaggttattaccatcagcacgagacaggccgaagccatgggcttcgacgtggggggcctgagacagacacacgccacgcccgggactccctccattgagtcctgaggccacccaggaccatccccacggagggacgctctgcagagtgaccaccagctctcctcaatggtcccaagggctgagggagggcagagggactgcgcccgctggaggagaccctgacatctgaagatgggtggcttgtgtacccaggacccagcaaagggtggctggtgatactcagggggctggggcagagggggccatttggaatcaactttcgcgccctggcttcgatcacagcctggagggttgagcaagaggacagaatttagggaagctgggggagggaggccgggggagggagtttggggagcggggagggagtttggaccctttggacttctgtaagcgtgaaatcctttccaaatgaaacgttaaaaagctttttttctttttggcctccaagttcattcagtgcttctctccatttcactgtaggtttaaaccgttcagttataaataaataattttatcctctgtcctcggctttcccccgtttccggcactgcagacatgggggctggatttgtctctgcggcggggccatcctgggcactgcagggccctgccaggagctccctccaagtcgtgacaaccacggatgtctccaggcctcacacagggacccctgggggcagaatcaccccagggttagaggattccacagaccccaagagactctgagtcccatgatcctctgccctgctgaggtcccaggaggctgcacacattgaaatccacaccctgagtgggagggagagaggaggcgagtcccgggagctggggtcccccgggtttatgccgtacgccccatcgggagtttattctggtgtccggtgtgagcagggggcagactggattttttattttttatttttatttatttatgttttgagatggagtcttgctctgttgcccaggctggagtgcagtggcacgatcttggctccctgcaaccttcgcctcccaggctcaagtgattctcctgcctcagcctcctgagtagctgggactacaggcgcccgccaacacgcgcagctaatttttgtatttttagtagagatggggtttcactatgttggccaggctggtcttgaactcctgacctcaggcgatccacccgcctcggcctcccaaagtgctgggattacaggtgtgaggcaccgcacctggccatttttttccccaaataatgaacactggtctctcccctgggccctgtggacatcggggctggatccttctctggggcaggcccgtcctgggcactgcagggtgctaggcatcatccttggcctccacccactccatgccaggagctcccctttcgtgacagccacaggtgtcctcagacctcgcccagggtcccctgggggcagaatcacctcttgattgagaatcctggccttaaagggggaagaaaacccccagacaaaactggcaggaggatgttcgctggggcctcaggtgaggcactgagggcactcgtggtggggccctgccttcccgagctctgcatcctgtcccctgctacgtcctgctgtctgtccgtttccagctcacccacccacgggacacacctgccacggccggctttgctggggccacagggacctcgtcagggaggcgtctccttgtgggtggcacgtgggcatgtgttgctctgagggctgtggccatgttgcccacctggccagggacccccgacttgggtgggtgacagccagcctccccgcccccacaaaggttgggaccttgagcccaaagcccccacctcctccccggagtccgttctgactcccaggctcccaaggcaaaaggaggaagtggggacccagcctgggcattgggcaactcaacggcctctggcattgggctataagaggagcttgaccgtgggtgcaccctggaccccaccatggctcaccggccccccagccctgccctggcgtccgtgctgctggccttgctgctgagcggtgagtgagccacgtgcccatccatccagcctccaggccccggtggattgtggggaaatatccaccacgaggtccatccaaagcccttctggcac

SEQ ID NO: 20175 - DNA, 2300 bp, Homo sapien
cttaataatgactgcacgtgagaatgtagtatacagctggtgctcaataaatgcagctgacgccaagtctgatctccgtgctggaggccaagccccttccaaagatacggcgtcccccacccctgaaatccccccacccccgacttgaaacagggctgtgtagacagtaggcgcttactaagtgcactgtggtgatgttaaggcagcaaggtgggaaccctgccaaaaggggaggggagaaggcagggtagtgtgtgtctgattaagctgaggacagggcagacatggactgagcgcctgctgtgtgccaggctctgggagggcagggccattgtctccctaacccgagagccatgggggtccacttgcctgtggtcacgtcaggactccagcctggcccaggctctgcgtgtccccgggtgccctcgccccgcctattcctggagacaggcccgttggttcccttcccctccccttgtcctggagccaggaggacgttggttcttgcgacagccttggcccggccgttgcagctggaacatcgtgggggagatgggaagaggaacggggcccggagcccggggctgggtcctgggaatccctttcccgcagctgggactccagctcccctgccagttcctccaggcggaagccctcaggcttggtcctcactccagcctcccggcctggacaggaattctctctccagcagccctgccagatgcccgcccagcccctgcctcaggcggggagggcttcagggaagctcaccaaggcagaagggcgggagagattgtcagagccccagctggtgtccagggactgaccgtgagcctgggtgaaagtgagttccccgttggaggcaacagacgaggagaggatggaaggcctggcccccaagaatgagccctgaggttcagggagcggctggagtgagccggccccagatctccgtccagctgcgggtcccagaggcctgggttacactcgcagctcctgggggaggcccttgacgtgcctcagttcccaaacaggaaccctgggaaggaccagagaagtgcctattgcgcagtgagtgcccgacacagctgcatgtggccggtatcacagggccctgggtaaactgaggcaggcgacacagctgcatgtggccggtatcacagggccctgggtaaactgaggcaggcgacacagctgcatgtggccggtatcacagggccctgggtaaactgaggcaggcgacacagctgcatgtggccgtatcacagggccctgggtaaactgaggcaggtgacacagctgcatgtggccggtatcacggggccctggataaacagaggcaggcgacacagctgcatgtggccggtatcacggggccctgggtaaactgaggcaggcgaggccacccccatcaagtccctcaggtctaggtttggcaggtttggcaaaaacacagcaacgctcggttaaatctgaatttcgggtaagtatatcctgggcctcatttggaagagacttagattaaaaaaaaaacgtcgagaccagcccggccaacacggtgaaaccccgtctctactaaaaatacaaaaaattagccaggcgcagtggctcacgcctgtgatcccagcactctgggaggctgaggcaggcggatcacccgaggtcagatgttcaagaccagcctggccgacagggcgaaacactgtctctactacaaatacaaaaattagccgggagtggtggcaggtgcctgtaatctcagctattcaggaggctgaggcaggagaatcacttgaacctgggaggcggaggttgccgtgagccgggatcacgccaccgcactccagcctgggcgatagagcaagactctgtctccaaaaaaataaattaaaaaacccacattgattatctgacatttgaatgcgattgtgcatcctgaattttgtctggaggccccacccgagccaatccagcgtcttgtcccccttctcccccttttcatcaacgccctgtgccaggggagaggaagtggagggcgctggccggccgtggggcaatgcaacggcctcccagcacagggctataagaggagccgggcgggcacggaggggcagagaccccggagccccagccccaccatgaccctcggccgccgactcgcgtgtcttttcctcgcctgtgtcctgccggccttgctgctggggggtgagtttttgagtccaacctcccgctgctccctctgtcccgggttctgttcccacctctccatagagggccccaccagtgtgggtccctcatcc

SEQ ID NO: 20176 - DNA, 2300 bp, Homo sapien
cagggggccaggcatggtggctcatgcctgtaatcccagcactttgggaggccgaggtgggcggatcacctgaggtcagaggttcgagaccagcctggccaacatggcaaaaccctgtctctactaaaaatacaaaaagttagcccagtgtggttgctcatgcgtgtaatcccagctactcgggaagctgaggcagtagaatcgcttgaacccgggaggtggaggtcgcagtgagccgagattgtgccactgcactccagcctggacgacagagcaagactctgtcgcaaaaaaaaaaaaaaagcaagaaagaaagaaaaaaagaaggaaagagaaagaaagaaagaaaaagaaagggaaagaaagagaaaaacagagaaaggaaggaaggaaatgaggctaggcgtggtggctcacacctgtaatctcagcactttgggaggccgaggcaggcggatcacgaggtcgggagatcgagaccatcctggctaacacggtgaaacccatctctactaaaaatacaaaaaattatccgggcgtggtggcggacgcctgtagtcccagctactccggaggctgaggcaggagaatggtgtgaacccgggaggcggagcttgcagtgagctgagatcgcgccactgcactccagcctgggcgacagagcgagactccgtctcaaaaaaaaaaaaaaaaaggaaagaaaagaaagaaatgatccatggtgaagagaaaagccgggggaacctcgtgtgctgctccccctggggacaatgtctgaggtcctccccacaaggtatccccatccttctggtccccgcaccatggattaatgcaacgtgaatcccgctggcccctgtggggcagatgtgaaaaatggagctacaccatgagcaggcctgcagtcccagcacttctggaggctgaggtgggaggatcacttgagccccggaggtcgaggaggctgcagtgagctatgattgcaccgctgcactcgagcctggatgaaagagcaagaccctgtctgtaataaaacaaaaacaacacacacaaatccccacctcacaaaaggccctatggcccagattctgagaagtattttattttaatttttttgtagagatggggtctcgccgtcttccccaagctggccttgaattcctgggctcaagagatgctcctatctgggtctctcaatgtgccgggatggtaggtgggagccactgtgcccggccagccctgactctgttcatcagaacctgccctcagtgaacagtttgggagggggcgtgtgatccaggctccaccaacccaaggcacccttgagacttggctggagtgaggaagaattttaggaggggcccactgagccactgggttgagtgtggggtccctggaaacacaccaggggaggctggtgaggaaagaagccatcagagaagaaaggagaagccagaagcagacactggacattgttcaggcacctggatcaagccacacctgaaggcggacatccctgaactttccatataactttcatgattcaggctccacccagtttgtctgggttttcctgtcccttgtagccagtcttcccagctgcctctgccttggcctttccaactttctattcgtcagggtgtcaagccccagaggccacagggacagagacaaaggtgtcaagtgaccttcctacccccaacagaccttctctctaatatagaggaggaaaagaagggagggtagcaggacaagaaagtgggttgtttacacgctgtggcctccagctaggattgtgaaacaccctgggggactctgggtgtggtgaagttggggccggggtgggtgcagcccccctctctgcctcctgcccatctgagggactgccccccaccagggccagcaggctgtcaggctcacagaggcccgagggtctcccagcgacttgtcgactctggtgtgagtctggcaggaggtaacccagtcccggggagggcggaggctgggcgggcgagttcccctttccccagctgggccgctgcccacccggggagcggcccgccccctccaccctcataaaagcacccccagggccctgcctgggtcagtgtctcagccacagcggcttcaccatgcacagctgggagcgcctggcagttctggtcctcctaggagcggccgcctgcggtgaggaggcctgggcctggggtgagggacagggctgtgtaggggcgtggtgctcccttccgtcacacggacggtcctccagcccctccaggtgggcaggaagggggtgtctctcc

SEQ ID NO: 20177 - DNA, 2300 bp, Homo sapien
aggaggctgcagtgagctatgattgcaccgctgcactcgagcctggatgaaagagcaagaccctgtctgtaataaaacaaaaacaacacacacaaatccccacctcacaaaaggccctatggcccagattctgagaagtattttattttaatttttttgtagagatggggtctcgccgtcttccccaagctggccttgaattcctgggctcaagagatgctcctatctgggtctctcaatgtgccgggatggtaggtgggagccactgtgcccggccagccctgactctgttcatcagaacctgccctcagtgaacagtttgggagggggcgtgtgatccaggctccaccaacccaaggcacccttgagacttggctggagtgaggaagaattttaggaggggcccactgagccactgggttgagtgtggggtccctggaaacacaccaggggaggctggtgaggaaagaagccatcagagaagaaaggagaagccagaagcagacactggacattgttcaggcacctggatcaagccacacctgaaggcggacatccctgaactttccatataactttcatgattcaggctccacccagtttgtctgggttttcctgtcccttgtagccagtcttcccagctgcctctgccttggcctttccaactttctattcgtcagggtgtcaagccccagaggccacagggacagagacaaaggtgtcaagtgaccttcctacccccaacagaccttctctctaatatagaggaggaaaagaagggagggtagcaggacaagaaagtgggttgtttacacgctgtggcctccagctaggattgtgaaacaccctgggggactctgggtgtggtgaagttggggccggggtgggtgcagcccccctctctgcctcctgcccatctgagggactgccccccaccagggccagcaggctgtcaggctcacagaggcccgagggtctcccagcgacttgtcgactctggtgtgagtctggcaggaggtaacccagtcccggggagggcggaggctgggcgggcgagttcccctttccccagctgggccgctgcccacccggggagcggcccgccccctccaccctcataaaagcacccccagggccctgcctgggtcagtgtctcagccacagcggcttcaccatgcacagctgggagcgcctggcagttctggtcctcctaggagcggccgcctgcggtgaggaggcctgggcctggggtgagggacagggctgtgtaggggcgtggtgctcccttccgtcacacggacggtcctccagcccctccaggtgggcaggaagggggtgtctctcctcactaatggaaggctctgaacgctgaaaaattctagaaaattcagattggaaatcggaactttctggagtcagcttttcttgcagacagagtctgaacgtctgcgtggaaaacttcatctgcgtggctgactgggctggcccaggcactggctgggtcagccccatttctcttatgtccaactggaaggcactgcgcccagggtagggcgctgggatctgcccccggtccccagcccactgtgggttctgtactctggggcattcccgcccgagggtatctgagtttgcaacgctgaggggccccaagacggaaacgggattcttttttttctttctttttttttttgatagggagtctcgctctgtcgtccaggctggagtgcagtggtgcgatctcggctcactgcaaactccgactcccgggttcaagcgattctcctgcctcagccttccgaatagctgagattataggccacgccgactaaattttgtatttttttttaaagtagagacggggtttcaccatattggccaggctggtcttgaactcctgacctcatgatctgcacccccccctccccccccgcccccgcgcggcttcacaaagtgctgggattacaggcgtgagccaccgcgcccagagatgggattcttgcggggagcggcctggggggtgagagctgggatcccgtcaggcagcctcgcccgggggaggagtccaccccgcggccctcacgcgcccgcccacccacagcggcgccgccccgtggtcggatcctgggcggcagagaggccgaggcgcacgcgcggccctacatggcgtcggtgcagctgaacggcgcgcacctgtgcggcggcgtcctggtggcggagcagtgggtgctgagcgcggcgcactgcctggaggacgcgtgagtgcccgcgccgcgcgggggaagagcccgggtgcggtg

SEQ ID NO: 20178 - DNA, 2300 bp, Homo sapien
ggtggtctcgaactcctaacctcaggtgatctgcctgtcttggcctcccaaagtgctgggatgacaggcgtgagtcactgtgcccagcttcagtcccttctcatcacccgaaaaggaaacccagtccccatcctgcatcaccctgatccatcccccaccccagcccccgagacccagttgtctctctggatctgcctgtcctggacattcatagaaacaggatcacacactgcgtagccttctgtgtctggcatctcttactgagcgtgatgtcctcaaggtgcatccccgctgtggcctgagtcagagcctcgctttttaaaataaccaaatacattttttttgagacagagtcttgttctgtcaaccgggctggagtgcagtggtgcgatctcggctcactgaaacttccacctcccaggttcaagtgattctcctgcctcagcctcccgagtagctggaattacaggcacgcaccaccgcgcccggctaatttttgtatttttagtagagacggggtttcactatcttggccaggatggtgtcgaactcctgaccttgagatctgcccgcctcggcctcccaaagtgctgagattacaggcgtgagccaccgcgtccggccaaatttttgttttttaattacattaataaaaggcacatgtgctcctttaacatagtctcagacatgccagcctgcgacccacacagacgtgtggtgtggacaccagatgagtcgtcgccatggcaacccctcaccaccaggcctggcttgcttcctggacttctggacctgcttcttgctataagaagtgtttttttttaacttgtaacttagaatggagccgtacgatacgtatgatacacttctcttcctcgcattttttcacaacgtagagacatttttcttgttctttttttttttgtttttgagacaaagttttgctctcgttgcccaggccagagtgtaatggtgtgatctcggctcactgcaatcaccacctcctggattccagcaattctcctgcctcagcctcctgagtagctgggattataggcacccgctaccatgcccggctaatttttttgtattttttattagcaacaggcttttactgtgttggccaggctggtcttgaactgctgacctcaggggatccacctgcctcagccccccaaagtgctgggattataggcgagagccaccgtgcgcagccaagaccccatcttttaaaagactcacgttgaaagaagggtggatgtttccgtatgtcaataatgacttgacaaatttgatttgaaatcaaatagtgcccgcagcagccgctggtgcttacacagcacttcctgagtgctatagctcaggtctgcacagtgcggcccagggcctgacggcccccgcctgggtttgtgagtgtggctcattggcaccagctgcctgtgtgccgccacggcagagccagagccaagtcgttgcaacagggaccacctggctcccagaaccgagcatgctgctgtctgtccctttacagaaaggggaggtgactcccgttgcgcacacgttcacccgtttaatcctccccactgtcctctaaagcaaaggtgccgttccttccaccttacagatgaggagacggagggtcagaggggatcacatcccacacggctcaggtggccgagtcaggatctgaacccaggtgcacacactcctggcttctgcgtggttcttctgtgcgcgtgtttctgggggtcatggggcagcccccatgagcctgagcggcccctcctccctccctcccttctccacagtcgggcgcctccagcttcggggagaagttctcccgagtcaagttctcaccgtcgctcacgctgttcggcggcaagcccatggagggctggatcgcggtgacggtcagcggcctggtcaccgtgtccctgctgaagcccagcgggcaggtgctgacgtccaccgagagcctgtgccggctgcgcggccgcgtggccctggccgacatcgccttcaccggcggcggcaacatcgtggtggccacggcggacggcagcagcgcgtcgcccgtgcagttctacaaggtgtgcgtgagcgtggtgagcgagaagtgccgtatcgacacggagatcctgccctccctgttcatgcgctgcaccaccgacctcaaccgcaaggacaagtttcccgccatcacccacctcaagttcctggcccgggacatgtcggagcaggtgaacgggcgcaggccatcacgtgggctggcaggcttggaatgaagcactgcttctcag

SEQ ID NO: 20179 - DNA, 2300 bp, Homo sapien
cacattctgaggtagtgggagttaggaattcaacctctcttttttttttttttttttttttagacagggtctggctctgttgccctggctggagtgcagaggtacaatcccagctcactgcagccttgacctcccagactgaagtgatcctcccacttttgcctcctgagtaactgggcctacaggtgtgcatcaccccacccagctattttatttatttatttatttattttgagacagagtcttgctctgtcccccaggctggagtgcagtggcgcgatctcagctcactgcaacctccacctcttgggttcaagtgattctcctgcctcaacctctagagtagctaggactacaggcatgtgtcaccatgcccagctaatatttttgtatttttagtagagatgtggtttcaacatgttggccaggctagtctcgaactcctgttctcaggtgatctgcgtgcctcagcctcccaaagttcagggattacaggcctgaaccaccttgcccagcgcccctccctccccaaccctgctaatttttaatttttttttgtagagacggggtctggctatgtttcccaggctggtctcaaactcaagctgtcctcagaccttggcctcccaaagtactgggattacaggtgtgtgccaccacacccgggccgctaagaacgttaaatccctacctgctgcctgggaatggggattttctgtaaggtcactgcgtggccctcttggagaactgaaccctgatccagaaaaaacactctgatatttgggccattgttaacctgtaattttagaacagttttatatttgcagaattcttgcaaaaatcatgcagtgaggccgcggtggctcacgcctataatcccagcactttgggaggccggggtggaaggagggcttgaggcctggagtttgaaatcagcctgggcaacatagtgagaccccatcgctattaaaattttgaaaaaacaggctgggcgcggtggctcacgcctgtaatcccagcactttgggaggctgaggcaggcagatcaccaggtcaagagactgagaccatcctggccaacatggtgaaactccgtctctactaaaaatacaagaatttgttgggcatggtggtgcgcgcctgtagtcccagctactcgggaggctgaggcaggagaatcgcttgagcctggaaggcggaggttgcagtgagctgagatcgcgctactgcactccagcctgggccacagagcgagaccctgtctcaaaaaaaataaaaataaaaatagaagagcaccacatccattgcattaaactggcttttggaggaggaggtgggaatagggttggaagtaggaatactcaacggggtcggtgacttcgcttacagtttccccactcttggacattagaaaatggaagaaaggccgggcgcggtggctcacacctgtaatcccagtactctgggaggccgaggcgggcggatcaggaggtcagtagatagagaccaccctggccaacatggcgaaaccccgtctctaccaaaatacaaaaattagccgggcgtggtggcgcatgtttataatcccagctactcgggaggctgaggcaggagaatcgcttcaacccgggaggcggaggttgcaacaagctaagatcgcgccattgcattccagcctgggcaacagagcaagattccgtttctgggagggaaaatggaaaaaaaaaaaaaaatatggaacgcttcacgaatttgcgtgtcatccttgcgcaggggccatgctaatcttctctgtatcgttccaattttagtatatgtgctgccgaagcgagcacgaatattgagttccaccaccagctatttaaagcccctggaacaaatgtctgtacacataggccgacttctcttaaatgacctagagatttaacctctatttatattagcccaatgtgtaatgcaactaacgtagttattgactggagttgagaaagtgctcgttgttctaccaaatatagctacggtggctgctgggaattactggaaatggtcgtatgcaaatagccccggaggcggggcagagcctgagccgcaccgccctcccagaagtctttgggaggcggccccacgcctcaggcgactggttgttaccgaggaagatggcggcgccagacccgaggcgctagggaagatcgcaccgcggacgcccgctgagcttggcgcacgggccgaccaggtgagtgcggggctgcgggggcccggcgagggcggacggacccctgaccgtgtccacggacccgagg

SEQ ID NO: 20180 - DNA, 2300 bp, Homo sapien
acctgagattgcatcactgtaggctgggtgacagagcgagactctctcaaaaaaaaaaaagaagaagaagaagaagaagaaggtacagacaggacaggcccaggcccctgaagggaagccctggaacccagaatgggaggaaggcccaggaagttctctggagttgcctccctctctcacgaataaatgttcaggtccattctttgagcatctacccttaccctgtgcctgatggatggggaaaccactcattcccgatgcccagctcccctgccagtcactcctgatacatctctccattgtcctttttcacctctttgcacatttatctacaggaatctcacagtgcacgcttttttgagtccatccacagtttctcatccttttctttttcctccttactctttctttctttttctttctttcttgctttttttttttgagacagcatctcgctctgtcgcccaggctggagtgcaatggcacaatctcggctcactgcaagctctgcctcctgggttcactccattctcctgcctcagcctcctgagtagcaggaactacaggcgcctgccaccatgcccggctaattttttgtatttttggtagagatggggtttcaccgtgttagccaggatggtcacaatctcctgacctcatgatccacccgcctcggcctcccagagtgctgggattacaggcgtgagccactgtgcctggctattttttttttttttttttttttttttgagacagagtagtcttactctgtggcccaggctggagtgaagtggacggctccctgcaacttttgcctcccatgttcaagcgattcttgtgcctcagcctcccatgtagctgggactatgggtgcataccaccacgcccggctaatttttgtagttttagtagagatagggttttgccatgttggccaggctggtctcaaactcctgacctcaagtgatccactggccttggcctctcaaagtgctggtattacaggtgcgagccaccgtgcccagcctccctcttgctttattttattttattttatttttttgagatggagtctcgctcctcgcccagactggagtgcagtggcacgatctcggctcactgcaagctccgcctcccgggttcacgccattctcctgcctcagcctcccgagtagctgggactacaggcccccgccaccacgcccggctaattttttgtatttttagtagagagggggtttcactgtgttagccaggatggtctcgatctcctgtcctcgtgatccgcccacctcggcctcccaaagtgctgggattacaggtgtgagccaccgcgcccggccctttctttttattttagagatgggttttcatcatgttgcccaagctagtctcagacacctggactcaagtgatccactggccttggcttcccaaagtgctgggattacaggcgtgagccaccacgttggccaccaggcctaattttagagaagagtaaactgaggctaagcaggggaaggggttgcctagccgaggctccagggctgggaggggcaggtggaaggaaggctcgggcagttttaatttccgccatcctctgcctccaagaagaacgtcccctccctcgtcgatgctcaggccttagtttccctgtccgtgtctcctcgcctccctgggctggattcctggctcagtccgcagcccggatcgggacgcagggttgtggttgagttttcgacccctcgcctaggtgtccctccttcccggagctagatttctgggtgtagggatcgtggccggccccgcctcccgcctcagtctccccgttcgtccccccaggggctggatcccggccccgcctgcctcggtttccccgttcgttccctgatggctggatcccggccccgcctgcctcggtttccccgttcgttccctgttggctggatccccgccccgcgcgcctcggtttccccgttcgtccccccaggggctggatcccctccccgcgcgcctgggtttccgcgttcgttcccggcagccgggaggtgggcgcccccgccccgccgcgcagccccaggccccgcccctgcccgcctccgggcgcccgtcacttcctgcccggcccggtgaaggccctgccgggcggcggcggcggcgacagcgtgcgagccatggtcgcgctggagaaccccgagtgcggcccggaggcggcggagggcaccccgggcgggcggcggctgctgtgagcgcgggcgggcggggcgcggcgggcgccgggggcgggctgggctccctcc

SEQ ID NO: 20181 - DNA, 2300 bp, Homo sapien
tctgtaccttcttcttcttcttcttcttcttttttttttttgagagagtctcgctctgtcacccagcctacagtgatgcaatctcaggtcattgcaacctccacctcctgggctcaagtgattctcctgcctcagcctcccaagtagctgggattacaggcaccctccaccaagcccgggtaatttctgtatttttagtagagaccaggtttcaccacgttggccaggctggtctggaactcctgacctcaagtgatccacctgcctcggcctcccaatgtgctgggattacaggcatgagccactgtgcccggcctattcattttttttcctcccttttttgtctttttttatgcaaatggaagcacctttttcttcgctgtgtattactccatgatgaccaaatgtcttggactctgttgcaggatggactttgggggaacctcctggatgtcatcctggggtacacttccagctgtgggattatggagtcaaggttgtgctgaccaggctgggtggctcatgcttgtcatcccagcactttgggaggctgaggcaggaggactgcttgagctcaggagttcaagacaagcctgggcaacctagtgagatcttgtctctacaaaaaaatttaaggggggaggggggagggatagccttaggagatatacctaatgctaaatgacgagttaatgggtgcagcacaccagcatggcacatgtatacatatgtaactaacctgcacattgtgcacatgtaccctaaaacttaaagtataataataataaaataaaataataaataaaattaaaaaaaaaactttatttgcaaaaaaataaaaaataaaaaatttaaaaataaattagctggaccgggagcagtggctcacgcctgtaatcccagcacgttgggaggccgaggagggtggatcacctgaggtcaggagttcgagaccagcctggccaacgtggtgaaacctggtctctactaaaaatacaaaaattacccgggcatggtggcaggcacctgtaatcccagctactcgggaggctgaggcaggagaattgcttgaacccgggaggcggaggttgctttgagccgagatcatgccactgcactccagcctaggcaacagagcgacaccctgtctcaataatgataataaaaggccgggcgcggtggctgacgcctctaatccaccactttgggaggccgaggagggtggatcacgaggtcaggagatcaagaccatcctggctaacacggtgaaaccctgactctactaaaagtacaaaaaattagccgggcgaggtggcgggcgcctgtagtcccagctactagggaggctgaggcaggagaatggcgtgaaccagggaggcggagcttgcagtgagccgagatggagccactgcactccagcctgggcgacctgagcgaaactctgtctcaaaaaaataaataaatacataaatcagtaataataataataataatgaggctgtggcgtttgcaaggtgccctccacctggttcccgctgctagtgtccctgcgggtatcagacaccccttgtcagtcatgtgggacacattcagtcccaaaccaccagatcggggacgtccctcacctgccctgaactttccatggctctccagggtcctggggacaaacccaagctatcctcactcagggtctccgctgagggctggcctccccgccaggctgggcccaccccctggagccccagcccctacgagggtcaaagcccttcccatattcacaggccttagagttcgcgccttggctgggctcctagtccgggctgagcgtctactcgctggttaaggtcggtccttccaggtccacagcggcctccacgcggcccaccccctgcctgctccgccccctccagccccctcccgcgctctcactccgaccttgcaccgggaggagggaataggggggttgccgctgggtgaatagagggcgcgtgggcaggggagggagtggcgagcggctgccggagaggcgggaaggcaaggccaggggaggggggcacgggctataaacgctcggccgcagcggcgccggcagaggagccgccgagcccagcacagctgccctctggaccctgcggaccccagccgagccccttcctgagttccacaggcgcagcccccgggcggtcgggcggaggggtccccggggcggtgccagggcgcaatcctggagggcggccgggaggaggaggtgcgcgcggccatgcacaccgtggctacgtccggacccaacgcgtcctggg

SEQ ID NO: 20182 - DNA, 2300 bp, Homo sapien
tccctttgaacaaagggcagcctaatccagaacaggatggtgaaagggttgaattaacattggcccattttatagagggataaactgaggcacagacaggcccatgcacctgccctccaggtgcctttcgggtctgctggcctccaggtgctccatcgtaggtgggagggacttcctgcaccttcagacctgagctgggtcctggcccgagaagggggtactcccacacccctttatcccgctgcagggagcgtctctccaaagcacccccaacctggggcaggtgtctcaggcctctccatcggagataggggtggcagctgggtttggtgtttaatatagccttatggtggaggcctctcagacacctgccgccattaggttacacgtggccctggggctggaaggctggattcaggccttgttgtcgggggcagctctcctgccggcagttttttgttttgttttgtttttgaggtggagtctcactgtgtcacccaggctggagtgcagtggcgcgatctcggctcactgcgacttccacctcccggattcaagcgattctcctacctcagcctcccaagtagctgggactacaggcgcgcgccaccatgcccggctgatttctgtatttttagtacagatggggtttcaccttgttggccaggctggtctcgaactcctgacctctgatgatccgcccacctccgcctcccaaggtgttaagatgacaggcgtgagccaccgcgccggccccggttgcagttttgtggagggaggaggtgcaactaggtggaaggacagagagaaagttgcaatgccgtgtgctagtctagggaaaggggagggagacgactacaaccccgcccccaacactcaggaccggggacccgagcccgccagagaccctccacaagtgagggtcccccggggtggcccctgcccgccctccaggctcccctggggctcacgtccgggctggagcctgggcctctgcgcttagccccctggggtcgcttcccgcgcacacagctccctgcagagcacgcgtccccctcccgaccgccttccttgcaccccgctcggtgcctcagtttcctgctctgcgcagtggcgacaagaaggttgccaactacagagaggagtgagggctggagacgtgcagggacctccctggagggaggcgcggggcacgtggttgggcaagcgaccgctcagaccgtgtaagtcatcaccaccttcacgggggggtggtgggcagccgagctcccgacgctggtgacagccgggccgggcagggtcgtcctggtttcacaaaggggctccgggtcccagcgcgcacctccccacgcccgcgccgagcccccgtctgcagcccgtccctccccagagggaggccggcgggaccctggttccctccctccgacgccgcccgcccagctctgcaccgggtctttcaagcccatttctcagacttggaaacggcggctccggagagtgaagtcactctctcagggtctctccgtctaaggggcgaaggtgaaactccgagtccacgaggcccagcgtaggtgctccgtaagaagggaagagacttggtcccggatctggctccgatgcctccggccagcccgcccaggcggagccccagtcagtcccctcttcttcccccggggcgctcccgccccagcccctgcccccggcaccctctgcgcttggggccgcgtcgcgcactttgcccaccgtccctaggccgggggcggggcctcccgcggcgctgttccccttcccgtttattatttattatcctttaaaggggccgcgacctgaaaatttccgtccactctgcccggctccccagcgcccccgggctggttgcgcgtcgtcagaccgcgggaggggggcgagggggcgtgcggggaaaagtggggagccctggcgaggccctcccgcgcccgggccgcggcgctgaatcaccggccaggtatttgcatccgagagcgactcgtcccctggtgatttgtctgggggtgggggaggggcggggcgggggccggccgcgcgcggggcgcctcttaccaatcgggcggaggggtgtagacgcggacgcggctggcggctcggtgagtcggcgcgcggcacagccccgtgggtcgggggccgggagccagcggcgcgcaccggcggctggaagccaggcgggcccgggcaggccgaccccaggcgcggggcgcgcgccccactacgagccgccctgcgcggtaaggctggggagcgcgctggccgttcccagcgcgggt

SEQ ID NO: 20183 - DNA, 2300 bp, Homo sapien
tccaacgaccacccagcgccccgtcccagcctctcccttggggctgtcataaaatgggggtgggggtcgaggacaaagggctcttggggggaggggtctgaagggggtgggcgtagctagtttagggttatggcggcgatgggggggcacccagccctgacctaggggggaatctgggatccccacctgccccctccaccggccccaacgtggaggtctgtcctgctcccctcccccacccggcgacccggaagggtcattaaacccagcagggctcggagcgggctggtggggggagtggcttcctttggcctcttccttctgtgcccccaaagagggggggctttgcttggagctcttccgtggggggggccttgtcttgaagttgtcccaggtgggggaggggcgacagacccgaccagaccctgagtcagaaatgccccctcagcactttcttgggttgggtgggtggggggtgacctccagcctggggatggggggctgggtgccgccctggtggcctccggaccgccaggctctcctggtcacaacccagcgctatggccctgaggtctttgtgacctgggacctctgtccccacaacagatggaacagaggctattttggaacatgccctcctcgctttctcccaggggccacccacctgccccccactgccttttcacccatggggccgaaagactcaggggtctgggtaaagggtgtctagggcagaggggccacaggactctcttgtccggtgactggggaggcttgggggtgtctgctgtgcaacactgacctgggtggggtcgggtcacaggagggatctgagtcccaggggtccctgcctcctcgtctctccaggccttgtctgcccaggagctgtgtatgagtcttgggggctcctttgccagggtaagggttgggggtggcctcctgggcccagctgcctctcgggagggtggagctttgccccctccgctgtccccatgatgtgccttccctctggggtgtcactccaggcctgttgggttctgcccggcctgttttattggcggcctgggcgggtggaggtgtggcctgggctagggggtggctcgggtgggacccaggccccaggagtctctgttcttcacccaggccattaggactggccctgggtggaaggcactctaggctgggtgagtgtgttgccgtccgagacatctggcccactcgggatcccagaggaccgggaaactccagacccctgttgccctgcagagattgtggggtctgcgtgggaggctctgtggtcacccagacctgggttcaaatcccaccgccatgtctccaagcagaggatccctgagcctcagttgtcctcaaccatgaaatgggaccgccctggtgcccccttctctgacacctgttggtgcccaccttaacctcctgaactcgattcatccctccttgagtgccatgggttgggggggtactgttacccacactgttttgcaggtagggaacctgaggtccagagaagttgtggcttgggcgttgctgttgagttgtgtgatggggggagggttagcccagggcccgtatacaacaggcgctcaatctccagtctggcctgagatgggaggatacctagatacctggaggccaggctgggccgctccaacagggactcaggcagcgactggaacttagaacccacctgactggggcccggagcccgctggccaatcacaggccaggaacgcccattcccccaccctgcttgtgaagcaataatccaagatctcctggggcagacagtctggccacagcgtgtttctctgtggccccgtgcggggcgaccttgctacccaggcccacagtaggctgtatgcgaagagcctgcgcctctgcctccaagaaggcctccaggtctgcatcctgcatgagatggacatgagagctgatccccagggccttcatggggaaggaaggagggggcttgaggagctcaggcctgctctgactgtgccttttttccccctcaggtttctgcaaatgcgtgaatgagccggatgccagcctctgtcccctggagcccagcgtgaggaagaggcatgccccatcagccttcagcttgagcccggcggcccccgcccccgccccctgccaccctgcactgccccggctcccccgcggcccccacgctgcagtgcggccgggccccctccccgcaggggccgcccccgccgcccacccctagcgcccgtggtggtggtggtggtggtggtggtggtggcccgggccgcagggcc

SEQ ID NO: 20184 - DNA, 2300 bp, Homo sapien
aaattagccaggcgtggtggcagaagcctgtaaacccagctactcgggaggctgaggcaggagaatggcttgaacctgggaggtgaagattgcagtgagccaagaatgtgggttttttttttttttttagacagagtcttgctcttttcgcccaggctggagtgcagtggcgtgatctcagctcactgcaacctcctcctcccgggttcacaccattctcctgcctcagcctcccgagtagttgggactacaggcgcccgccaccacgcctggctaactttttgtatttttagtagagacggggtttcaccatgttagccaagatggtctcgatctcctgacctcatgatctgcctgccttggcctcccaaagtgctgggattacaggcgtgagccaccacacccggccaactttgtttcatcttagttaacttaaagcaacctagccaccgatggctacagcagattcagcggcaggggcagataaaatctgcagccggctggacctgcatagcgtgtgggtccccccagggctggctgagggctcacttgctgtgggatcctggcctccaggaacccgcatcttcctgggaggacctgagcaagcaaagatgctgggcgcagtggctcacgcctgtaatcccagcactttgggaggccgaggtgggaggattgcttgagcccaggagttcaagaccagcctgggcaacctagtgaggccccatttctacaaaaagtacaaaaattagtcgggtgttgtggcatgcatctgtggtcccagctactcgagaggccgaggcggaaggactgcttgagctcaggaggtcaagactgcactgagctgtgatcacaccactgcactccagcctgggcaacagagaagaccctgtctcaaaaaacaaaactggccgggtgcagtggctcatgcctgtaatcccagctactcaggaggctgaggaggagaatcgcttgaacctgggaggcagaggttgcagtgagccgagatcgtgcctttgcactccagcctgggcaacaaagtgagactgtgtctcaaaaaaaaaaaaaaaacaaccaaacaaaacctagcagcaaagaagcaggtgatatcaggttgtacaaacagctgccaatggctgggcgtggtggctcacgcctgtaatcccagcactttgggaggccgaggtgggcggatcacgaggtcaggagatcgagaccatcctggctcacacggtgaaaccccgtctccactaaaaatacaaaaaaattagccaggcgtggtggcgggcgcctgtagtcccagctacttgggaggctgaggcaggagaatggcatgaacccgggaggcggagcttgcagtgagccgagattgcgccgttgcactccagcctggacgacagagcgagactccctctcaaaaaaaagacaaaaaaaaaaaaacggctgccaagaaagtctaggagggtgccgtggaggggcagtggcgagggtggggcggatttcagatggcggtgggagaattctccctgtggagggaaggggaggtggagctgggacagcatgcatggtgcaggatgcaggaaccagcctgccgtaatgattccctttttttttttcccaagagagtcttgctctgtggcccaggctggagtgcagtggtgccatcatagctcactacagcctccatctcctgggctcaagggatcctcccgccttggcctcccagagtgctgccgggattataggtgtgcgccaccgtggctgcctgcgtgatgcttttcaaggccccaaaattcacgctgtagggacggcttgtgctgttctgggctaattggaaacaaagtgggcgtcacgggtgccccacgctgtgctcatgagcgctctctgcagtctgagctggcggcggccggctcttcctatttccagagagggaaactgaggctgggcggggagtgggtctttccttgggctgggacgagccagcaccttctcccctgactcctgccctctgctcaccccaggaagcccaaatgggaggaggaggagatggaggaagacctcggggaggatgaggaggaggaggaggaggattacgaggatgaggaggaggaggaggacgaggaggggctgggccccccaggccctgccagcttgggcaccacggcactgttcccccgaaaggcccagccaccccaggccttccgcggcgatggcgttcccagggtgctggggggccaggagcggccggggcctggccctgcccaccccggaggggccgcccacgtagccccgcagctgcagcc

SEQ ID NO: 20185 - DNA, 2300 bp, Homo sapien
gtgctgggattacaggccggagccaccacgccccgccgatttttttaaataatgttttttaaataatgttggaggccggcctcagtagctgacgcctgtaatcccagcactttgagaggccgagacgggcagatcacctgaggtcaggagttcgagaccagcctggccaacgtggtgaaactccgtctctactaaaaatacaaaacttagctgggcgtggcggctcacacctgtaatcccagctactcgggaggctgagacaggagaatcgcttgaacccgggaggcagaggtagcagtgagccgagatcgcaccattgcactccaacctgggccacagagcaagactgtcgcaaaataaagaaagaaaataaaaatgaggttggaggaaactctggaggcacagcaggtccttggattggactccctccctccctcccaggataaaatgaaatccaggcctcgttcacacggccctgcacggcccggccccgctccgtggtcctgccccagggccttcgcacgggcctgccccgcacacggttctctgggggtcgctggctccccgctcaaacggcccctcctgccgaccaggcgggtccccggggccgccctccctctggcctgggctcggggtcggtggctcgcgcctgccacctggcggccagcggggctgcggcgccgcacgctctggcaccagcctcctgccccggccgtgccctccgccgggagccgcggaccaggagtcgcaccgcctccggggaccgcaccccgcatgcagcctccagcccctgcctcttgctgctcgagggcacacgacccaggtcagctgcaacccccgggcggaaatcccgacttttaaatgaatgctccctttttatccctttttaaggggttggcaactaattgcacattttaaatcatactgtttttaggccggacgttgtggctgaagcctgtaatcccagcggtttaagaggccaaggcctaagcccaggtgttggagaccagcctgagcaacacagtgagaccccccatctctactagatatatatttagtataaataaataatagatatatgtttttctttgagacagagtctcattcgcccaggctggagtgcctgggatctcggctcactgagacctccgcctcccgggttcaagcgattctcctgcctcagcctcccaccacgcccggctttttgtactttttgtaaagacggggtttcgccatgttggccagggtagtctcgaactcctgatctcaggtaatccacccacctcggcctcccaaagtgctgggattacaggcctgagccaaagcgcccggcctttttttttttttgaatgccgttttcagacatggtccgtgacgggcagccgtgacatgaagttagaccctgcttggctcggacagaactggcgacttgtttgacctacaccaagctatccgactaataatttagatgttgaggcccctaaagaggggtcaagggggaggcagatgtcgaccaataaggaaacactgggccgggcgcggtggctcacgcctgtaatcccagcactttggcaggccgagctgggaggatcacttgagctcaggagttcgaggccagcctgggcaggacagtgagaccctggctctacaaaactaaataaataaggaagcagtgaattccaatgtattcatcgccaactagccatgttgctgggtgtgcgctctctcttttaggcgcaatgtgtcatttaggcctgtgacgtcggaactttattatttgaacatttaaaaataaatgaatccaagagcttgagtcacttggccaaaaatgcccaggaggaaaaggccaagtcaggtaccccggctctagagctactaactgatcgccggagaccctgggccttggaagaagtcgcctccccagatctctaagcaggccgcgcgaccctcgagtctcaggtaagcgggaaatcccacttcacaagaaagcccctctctccgaggcacgggcgcatgcgcgggtcggccacccgctggggccgcggggccgccgctctggcccgcgtggggcagtcgtccgcgtctcgctcatgatgacgcacgtccggggcggtggggaaggcaagatggcggcgcccatggaggtggccgtgtgtacggactcggcggccccgatgtggagctgcatcgtgtgggaacttcactcgggcgccaacctgctcacctaccgcggcggccaggcgggaccccgcggcctggcgctgctcaatggcgagtatctgctggcggcgcagctgggc

SEQ ID NO: 20186 - DNA, 2300 bp, Homo sapien
cccacaaccccctccagagcatctcagtcctcgaacccacaaccccccccagagcatctcagccctcgaacccacaacccccaccagagcatctcagccctccccaggtgtcctggaaggggctccctgtcctcttcctcagatggagctgcctggcttcctgccggagcttaagctgccaccaccctgggtcaggccaccacagcctgcccagaagcgacttcctgttgaatggtgggagccgcctgcaggtcctgagtgcagccgttcctacggggcccacacaggacgcctggggtcaggctcacaggggaccagcacctccctgaggcagcagggaagggcaggaaacttgccccttcctgggccatcatgcaggtggggacgaggcgggaacaggtgcccacccagcccaggcaggggcgcgacgaggccccgctgtacctgctggccgctgccctgacagggtcaccccgcagtcctggggcagggcaggcagggggcgacagtgtggccatggccgtgcagtggtgggttcctggggctgcagcccccctttcctcccctggggctttcctcccctgacctggataccctctgcccctcacaggtctccaccgggaaccttctggtcatcctgagtcgacactaccaggacgtctcctgccttcagttcacaggggacagcagccacttcatctcagggggcaaggactgcctggtgctggtttggagcctctgcaggtagcgccttgcgcactcaggcctgcacctggaactgcacccgggctcaggcggggagaggaggcgccaaggcccctggcgggaaggggcttctctcttgggggctggagtgcagaggacggagtgatcatcccaggggtcctggctgcccacactggggtctggtttgttctgggggccgtgggggcccagccttgagtttactcaggtgaggcaggccaggctgctgagtggaggcaggtgtgtgcgtgaggtgggtgctggaggcgtggactgccctgttccctccgctccccgcctgctgagcacctgccccaccccgctcagcgtgctgcaggccgacccctccaggattccggcgcccaggcacgtctggtctcaccacgcgctccccatcacggacctgcactgcggctttgggggccccctggcccgggtggccacctcctcactggaccagacggtgaaggtacgccgcccccaccccaccacggtccatgagcggagcccagcagccgcaggtcctcagccaggaatgcaggaatcgcctcctcccgctccctgctgtcaggactccagacggcttttaatcccctggtgctctgagcccaaggacgtccagggaggtctgccagcctggaaattcctactcattcaccgtttctggcccggctccctggccaagcctggggaatcggaggtcatcactatgcttgagtcgtgaccggtggtcctgggagggagaaccaggggtcatcagccggagaccaagctccatttcagcacaggccatgtcccctggcccccaagacccacatggtgacggctttcacccaaagtcgcaagccctagggccagaggacagccgacgcctgacctccctggtgcccctgttcccatggggtcctcgggttccccctgccgggccgagccccacgccctttgcccacccgcagctatgggaggtctcctcgggggagctgctgctctccgtcctctttgacgtgtccatcatggcagtgaccatggacctggctgagcaccatatgttctgcgggggcagtgagggctccatcttccaggtcgacctcttcacctgggtgagtgccgcggtctgcgggctgcaccctgccctggggctgagggcatcgggcctgcggctcacacacgtctcggccttcgcagcccggacagagggagaggagcttccacccagagcaggacgccgggaaggtcttcaaagggcacaggtggggacgtgggaacggggcgggggctcccaggcacgtcctgtctggcacgtcccaggtgacccctgtctgtctgtccaggaaccaggtgacttgcctgtcagtgtccactgacggcagcgtgctgctctcaggctcccacgacgagaccgtgcgcctctgggacgtgcagagcaagcagtgcatccggacggtggccctcaaaggtgggcgcgcctctgctcggcccgcggccagcgcgcaggggaaaaagccagcaggagctccgggcttggcttgggtgggggcggggactggtttgctgtg

SEQ ID NO: 20187 - DNA, 2300 bp, Homo sapien
gtccatcagcggttggatgggtcaccacaacacgagtcctctgcacagtggaatattattcagccttgtaaaagaacgagaaggctcaatgcagtagctcaccctgtattccagcactgtgggagctgaggcaggataatcgcttgagcacaggagtttaagaccagcctgggcaacatctctacaaaaccccatctcttcaaaaaatataaattttagccaggtgtggtgtgcacctgtggtccccgctacttgggaaatcaaggcaggaggatcgcttgagcccaggaggttgaggctgcagtgagctatgatctcactactgcgctccagtctgggcaacagagcgaggtgcagtctcaaaattaaaaaaataaaataagtgaggctcagacacaggccagagcatggttgcaccttgaggacatcacactcagtgagagacgccagacacaaaaggacacgtcctgtctgattccactcctaggaggtccctagagttgtcagattcacagagacggagaggataggaggcgtcagggctggggaggggacggggagtgagtgtcccctggggacagagtttcagtttgggaagatgagaaagttctggacaggagggtggtaagggctacatagcaaggagtgtgcttaatgtgcctgagctgtgcacctagaaatggccaagatggcaggtttcatgttatgactattttcccacaataaaacattttttaaaagtctcctccacgtggccacttgttccacatggcagctgggagtaggaacgcctactgttgcccgtgtacagatggggaaactgaggcagggcacgagggtgagttcccggagggcagacacagtctctgcccctaggaactcttgctcctcagagggagccgaacccagggagggacggggccccagtggtccctgaggacaccaggacccagcacctctcgcagacccagggaggggaccccttgtcctgcccccggggacacctggccagggggctggagggggtggcctgcgggttcctggaaccgagccatccctccctccgtccctccccagtcgtctcaaaatccaatccattttactggctggcacttggcattttattcatttcatggaggatttttttcctacctctccaacgctggctccaaaaggagatgacgtttggggtgtgtgtgtgtgtgtgtgtgtgtgtgtgtgtgtgtgtgagaaaatcgccggagtgtagatccattaattagagctgaatgttcccaacacagcggctgttctgctgccccgcgggatctggggagacaccgtcgggaggacaggatgaggaatgcctgggcagggaggaggtcctctgctagatggatagacggatgcagccgcccccatctatcaggcgcctgtgggatgccagggccccagaaggcaccccccgaggcccagaggacataggcaggcttggggactggtagacagcggggagctatggaaggctctagagcactggaggaggggcatgtgagcaagcatccttgtctgggccgttgctcaagccacaagcaattatagagtgcctactgtgtgccagcaaccaaaccagacccaccccaaccctcccagagctgagttgaagagatggtcactaaataagaaggaaatgaacaaaaagatggtaggccgttatggaaatgtgtggaggttgggggtgggtagcagcaggactgaaatggggcagggagtggtgctttctgcattttctcagtggcaagcagggaacgtttttcagggcagggcatttgggactgggttttgaagggtgaagaggagttctgtggcccaagttgcctgcccactgctggagggcagatctactctataggtttccatcagacatgcctgtctcagtttccccagggtgcactggatgttagaacacacccctgggctggcctggttagaaactgacagctccctggatgtgcgagacaagcaagacccttcctgggcctcaacttccctgcctgagcaatggtcgacattggtggaaggggtcagggatcctggagaggaacggggtgggcgtccgggccaattttattttcttattttattttattttttttgagacggagcatcgctctgtcgcccaggctggagtgcagtggcacgatctcggctcactacaacctccgccttccaggttcaagcgattctcctgcctcagcctcccgagtagctgggattacaggctcccgccaccacgcccggctaatttttgtatttttagt

SEQ ID NO: 20188 - DNA, 2300 bp, Homo sapien
ggtaagggctacatagcaaggagtgtgcttaatgtgcctgagctgtgcacctagaaatggccaagatggcaggtttcatgttatgactattttcccacaataaaacattttttaaaagtctcctccacgtggccacttgttccacatggcagctgggagtaggaacgcctactgttgcccgtgtacagatggggaaactgaggcagggcacgagggtgagttcccggagggcagacacagtctctgcccctaggaactcttgctcctcagagggagccgaacccagggagggacggggccccagtggtccctgaggacaccaggacccagcacctctcgcagacccagggaggggaccccttgtcctgcccccggggacacctggccagggggctggagggggtggcctgcgggttcctggaaccgagccatccctccctccgtccctccccagtcgtctcaaaatccaatccattttactggctggcacttggcattttattcatttcatggaggatttttttcctacctctccaacgctggctccaaaaggagatgacgtttggggtgtgtgtgtgtgtgtgtgtgtgtgtgtgtgtgtgtgtgagaaaatcgccggagtgtagatccattaattagagctgaatgttcccaacacagcggctgttctgctgccccgcgggatctggggagacaccgtcgggaggacaggatgaggaatgcctgggcagggaggaggtcctctgctagatggatagacggatgcagccgcccccatctatcaggcgcctgtgggatgccagggccccagaaggcaccccccgaggcccagaggacataggcaggcttggggactggtagacagcggggagctatggaaggctctagagcactggaggaggggcatgtgagcaagcatccttgtctgggccgttgctcaagccacaagcaattatagagtgcctactgtgtgccagcaaccaaaccagacccaccccaaccctcccagagctgagttgaagagatggtcactaaataagaaggaaatgaacaaaaagatggtaggccgttatggaaatgtgtggaggttgggggtgggtagcagcaggactgaaatggggcagggagtggtgctttctgcattttctcagtggcaagcagggaacgtttttcagggcagggcatttgggactgggttttgaagggtgaagaggagttctgtggcccaagttgcctgcccactgctggagggcagatctactctataggtttccatcagacatgcctgtctcagtttccccagggtgcactggatgttagaacacacccctgggctggcctggttagaaactgacagctccctggatgtgcgagacaagcaagacccttcctgggcctcaacttccctgcctgagcaatggtcgacattggtggaaggggtcagggatcctggagaggaacggggtgggcgtccgggccaattttattttcttattttattttattttttttgagacggagcatcgctctgtcgcccaggctggagtgcagtggcacgatctcggctcactacaacctccgccttccaggttcaagcgattctcctgcctcagcctcccgagtagctgggattacaggctcccgccaccacgcccggctaatttttgtatttttagtagagacgggctttcaccatgttggccaggctggtctcgaactcctgacttcgtgatctgcccgcctcggcctcccaaagtgctgggatgacaggtgtgaaccaccgcgcccggcaagtcggggccaattttaaagcgcagtcttttcctggcacctccgttccatctgtggcctgaatcagagcagggatgggcagtggttaggcgtccccggcccccgccaggtgtcaccgccgccggcctcaaacaaccactgggaggcactgtttcccccccatcccgccctgggcagggcacgtcccactccccccgcgcggttgctgggaacccggaggccgcccgggcggagcgcggagggcgcgtcggaacctggccggggccctccacccgcgccgtggtcccggtggttgcgccccgtggcgagcgacgccgacaactttgcgatggagtttgtgcgggcgctgtggctgggcctggcgctggcgctggggccggggtccgcggggggccaccctcagccgtgcggcgtcctggcgcgcctcgggggctccgtgcgcctgggcgccctcctgccccgcgcgcctctcgcccgcgcccgcgcccgcgccgccctggcccgggccg

SEQ ID NO: 20189 - DNA, 2300 bp, Homo sapien
agatgtttgggaacagctccatcaaggtgagccaggcctgggctcagctgcagcagaggccagcgccccgtagatgctggtcgctgaaggggcggttcctgacatcgacaggatgttggggttcttgactttcagggacctggcatgcagacaaggccgcccctgcctgccgtggccttttggtggcctgggggctctgaagcaagaccctcggcctgtcgccctgctagaggcctgggcagggcagggggatctcggggaggacttgggctgggcagactcgggcctttgagagtagctgttccggggaggggattggctggggctggggatgcagtgggcagcaatagctgaggaggcctgggggctgaaagctaagagctctgggcccatcctggccgtcctgaggtggccccactgcctgcagaggtgctgggttcccggtcagcttgtggtggccttgggcactggtgggaccaggtggctgtgttgggccccacagcctggtgggagatgtttttgcttcagcagtcagggtttggggtcccacctgttcccacagagccaaccccaagagtttgagtgtttgggcagagcatcatggacccttccatggggtctactgcctgtagctggcccttgcctcagcttcaggattcagagctgtgctggagatggcctcacagcagggcaggcttggtgttgaggtggggtcccagctgaggcgggaggcacacgtagtccaccctggcctggtcagtggtggggcagaggctgaggcttccagtcccttcccattagcaggactgtatcctcaggctgggccctcacagcccgggctggcgctgctgacacccaggtccctggtcgcccacagtttgagctggacatcgagcccaaggtgttcaagccgccgagtagcacagaggccctgaatgacagccaggagttccccttccccgagacgcccaccaaaggtaggccacccaccaaaggtgtactgcctcacggggttgcctcagtcatggggtgctggggtgcaggcggggtccctccgaacatccccagcctgctggctgcatgtcctggaccgttgagggcacccccgtgcctcgatttccccatctgtcagcacaggaggctgtggggacaccccagagcctggggtaactggctcagctcatcctttctgggatcctcgtgaacggcgacttggaggggatggatcccttcggctctgagctcagagttctagcgggctgtgctcagggaagcccccgcccccgcccccacccctgcccatctggcagcagagggtctatccagagggccggggcctctgaagtgttgggggtgtgctgggggccgccagggcagtggggcagccctgcacccagccagccccagccagggagagggggccacgggaggaggagcctggccagcctctgcagtgcacagggcaggacaccagcttgagtgggcaccatcccaagtgtccatgtaggggtcctcccagcacccacctggggcccagggctcagcaggtctcaccctccacccctcaacgcctgccttgcctgctggcagtgggcgggggacgtgtgtgggggcgctgacctggtccctggttctgccctgcagtgtggccgcaggacgagtacatcgtggagtactcactagagtatggcttccttcgcctgtcgcaggccacccgccagcgcctgagcatccccgtcatggtggtcaccctgggtgagtctgagctgctgggcttggggagctccatggcggggcctcccctcctccctcgggtctcctcctgctggtgcgggacggggggctgtgcaggaagcactggggtctgccccgccccaggcacgcttcccagggctggggtcctggatgggtttcctaagaatgggcagggccaggaagcaggccaggcctcagcaatggagccagctggggcagggcccagggggtggcctgggcggggctcccggctccctgattcacccacccgcagaccccacgcgggaccagtgcttcggggaccgcttcagccgcctgctgctggatgagttcctgggctacgatgacatcctcatgtccagcgtgaagggcctggccgagaacgaggagaacaagggtgaggcatgccccggggccgagggtgcgagggcgcgggtgggggcgggcgctcacggctccttctgctgcaggcttcctgcggaatgtggtgtcgggcgagcactaccgctttgtgagcatgtggatggcgcggacgtcctacctgg

SEQ ID NO: 20190 - DNA, 2300 bp, Homo sapien
gtagagacaggatctcattatattgcccaggctggtcttgaacacctgggctgaaatgatcctcccgcctcagcctccaaaagtgctgagattacaggcatgagccaccgcgcctgaccttgtttggataacttgagatgtgtaaaatatattattaaaattaatttcacttgctcttttttagttgttttactgtggctaccagaacacttaaagttatgtttgttatttgcttatctttctcttggaaagctgtgttcttgacctgtgggccaaatccagctgcagcctatttttgtatggcttgtgagctaagaatggctcttacatttttaagtggttgaaaaaaaaacccaaaatatgaaaaccattctatcaaacgtggaaattacataacattcaaattccagtgtctgcagacaaagctttattggcacacagctgtgcccatccatttatgtatcatttacggctgcgttttctgtacaacagcagagtggagtagttactctacccaaaaaagctaaaaatactgactgttggcttttttacactttattttttagagacagggtctcacttagtcatccaacctggagcgcagggatacgatcatggctcactgcagcctccaactcctgggctcaagcagtcctcccacctcagcctcccaagtagctggaattacaggcatgcaccaacgtcctcagttaacttttaaaaacatttttttgggggggccgggcgcggtggctcatgcctgtaactccagcactttgggaggctgacgcgggtggatcacgaggtcaggagttcaataccaacctggccaagatgatcaaacctggtctccactaaaaatacaaaaaaaatagccgggtgtggtggcggaagcctgcaatcccagctattcaggaggctgaggcagagaattgcttgaacccaagaggcggaggttgcagtgagccgagatcacgccactgcactccagcctgggcgacagagtgagactgcgtctcaaaaaaaaaaaacaacacaaaacttttttttggcgggcttggtgggtcacacctgtaatcccagcactttgggaggcctaggcgggcaaatcacctaaagttaggagttcgagaccagcctgaccaacatggagaaaccgtctctactaaaaatataaaattagcctggagtggtggcgcatgcctgtaatcccagctacttgggaggctgaggcaggagaatggcttgaacccgggaggcgggggttgcagagagccgagatcgcgcttctgcgctccagcctgggcgacagagcgagaatccatctcaaacaaacaaccaaaaaacccaaaaaccatagtatcctcttgtgtacgcagccggcactcagtaagtgcccctgaagagcacttatttattcattgctgcgcgaagctacgggggcaggtggcacagcgccacgcaggagtagagactgccagattgttctaccgccaaccttagtggcgccacaggagatggacacgggaagactatgacgttactggccctgtgacgtcatggcaggatccgggcaagagaagccaaacgaggtgacgagctgtagactacagcaaaaatatggaacgcttcacgaatttgcgtgtcatccttgcgcaggggccatgctaatcttctctgtatcgttccaattttagtatatgtgctgccgaagcgagcacgactcaagggttactgtcacacctattttaagcccttcaatcaaatcatcttttggttaggataacttatggtcggtttcatatttagcataatttcctacagtggtatgttgcagaacaactttcgtgcttacgcttactttgatgtcttcgatcacgtaaaatcccatatcttatcgtaattttaccgccttatactggcctcatagccgcggtggattgtgggtgccaatatgcaaaagaggtggcccagatgcaggcccgccccctggagcggccgaggtagggggtgaggcctccgcgggcgccgctggcatcccagcgttctctgcgggcgcaggggggccgctcttgcccggcgtggcgactcgctagcgtcagcagcgccgcagccggacgagaaagcggaagatggcggcggcggccgggaggccgtgaggagagcggcggctgcgagggcggccgatggcggccgggaggcgccctcggacacttgcgggtcgttagggcgcgacgctgggaggcatgtcggagcacgtggagcccgcagctccggggcccgggcccaacggcggcggc

SEQ ID NO: 20191 - DNA, 2300 bp, Homo sapien
tgcctgtaattccagctactgaggaggctgaggtgggaggatcacttgaagccaggaggcggaggttgtagtaagtcgagatcgcgccactgcactccagcctgggcgacagagcaagactccgtcttaaaaaaaaaaacaaaaaaaaaaaacacaaaaaaaccctaataataataaattattaaaaagtctccgggacagtctcctgccaggcagtgctggctctcaggagaccttagctctggcccagcccatgcccaggaagacagagctggcacagaccaacccccaacccggattccctgtatgagccagcacaggcggaacccccccaccccgcccaccctgtttccctatatgagcaagtacaggacagaatgagaggcttggggctggaggaactggagggagagttggggctctgtcggaggaatcaaggaaagctgcatgtaagaggaggcaagggagatggggttttgaagcatcaataggagtttgacacattttattttattttattttattttattttattttattttattttattttatttttagtagagatggggtttcaccatgttggccaggctggtctcgaacccctgacctcaggtgatccacccgcctcagcctcccaaagtactgtgattacaggcttgaaccactgcacctggccgacccatgtcattttagaccagtgctgaccatttctgttattctgagatgaaggaaattttcaatgtggcactatctactactgtagccactggccatggggctactgagcactggaagtgtggctggtgccatcagggaagcaaatacttcatgttctttttattttattttattattattttttgagacggagtctcgctctgtcacccaggctggagtgcagtggcgcaatcttggctcactgcaagctccacctcctgggttcacgccattctcctgcctcagcctccccagcagctgggactacaggcacacctccacacccagctaatttttgtatttttagtagagacggggtttcactgtgttatccaggatggtctcgatctcctgacctcgtgatctgcccgcctcagcctcccaaagtgctgggattacaggtgtgagccaccgcacccagcaaatacttcctattcttaaatttcaattaaaaattaaaaactggcactagattccattttttgaagacacatatatataaatacacatatatatgtagctgggactccgagtagctgggaccgtagacacgcaccaccacgcctggctaatttttgcatttttagtagagatgcgggtttcaccatgttggccaggctggtcttgaactcctgacctcaagtgatccgccggcctcagccttccgaagtgctgggattataggtgtcagctgccgtggccgggctatttcaattaatttcagttaaaaattaaaaactgacatgatttccgtttttgactatatatatatgtacacacacattaaagttttcaaatacataaatacacacatatgtacacattatacatataaatgtaaatatatagatatttgaaacagggtcttgctctgtcacccaggctggagtgcagtggtgcaaatatagttcactgcagcctcgacctcctggactcaagtaatctcctgcctcagcctcctgagtatctgggactacaggcatgtgccatatgcctagctaatttttaaattttttgtagagatggggtctccctatgttgcccagtctggattcaagtgatcctcccgcctcagcctcccaaagtgctgggattgcaggcgtgagccaccgtgctcagcctcgtgtatattttaaataccttagcgtttctgaattttccttttcagtataaacgctgtaaatctaaatactgtggagataagtatttctgaggaagcactggtatccatattggaacaccccatggatgggaaacacaccagattctgaagacttggtacatctcagttactttttttttttttttttttttgagaagtagtctcgctctgtcacccaggctggggtgcagtggcgtgatctcggctcactgcaagctccgcctcccgggttcaggccattcttctgcctcagcctcccgagcagctgggactacaggcgcccgccaccacacccagctaatatttttgtatttttagtagagacagggtttcaccgtgtttgccagggtggtctcgatctcctgacctcgtgatccgcccgcctcggcctcccaagtgctgggattacaggtgtcagc

SEQ ID NO: 20192 - DNA, 2300 bp, Homo sapien
gtacatatgtgtgtatttatgtatttgaaaactttaatgtgtgtgtacatatatatatagtcaaaaacggaaatcatgtcagtttttaatttttaactgaaattaattgaaatagcccggccacggcagctgacacctataatcccagcacttcggaaggctgaggccggcggatcacttgaggtcaggagttcaagaccagcctggccaacatggtgaaacccgcatctctactaaaaatgcaaaaattagccaggcgtggtggtgcgtgtctacggtcccagctactcggagtcccagctacatatatatgtgtatttatatatatgtgtcttcaaaaaatggaatctagtgccagtttttaatttttaattgaaatttaagaataggaagtatttgctgggtgcggtggctcacacctgtaatcccagcactttgggaggctgaggcgggcagatcacgaggtcaggagatcgagaccatcctggataacacagtgaaaccccgtctctactaaaaatacaaaaattagctgggtgtggaggtgtgcctgtagtcccagctgctggggaggctgaggcaggagaatggcgtgaacccaggaggtggagcttgcagtgagccaagattgcgccactgcactccagcctgggtgacagagcgagactccgtctcaaaaaataataataaaataaaataaaaagaacatgaagtatttgcttccctgatggcaccagccacacttccagtgctcagtagccccatggccagtggctacagtagtagatagtgccacattgaaaatttccttcatctcagaataacagaaatggtcagcactggtctaaaatgacatgggtcggccaggtgcagtggttcaagcctgtaatcacagtactttgggaggctgaggcgggtggatcacctgaggtcaggggttcgagaccagcctggccaacatggtgaaaccccatctctactaaaaataaaataaaataaaataaaataaaataaaataaaataaaataaaataaaatgtgtcaaactcctattgatgcttcaaaaccccatctcccttgcctcctcttacatgcagctttccttgattcctccgacagagccccaactctccctccagttcctccagccccaagcctctcattctgtcctgtacttgctcatatagggaaacagggtgggcggggtgggggggttccgcctgtgctggctcatacagggaatccgggttgggggttggtctgtgccagctctgtcttcctgggcatgggctgggccagagctaaggtctcctgagagccagcactgcctggcaggagactgtcccggagactttttaataatttattattattagggtttttttgtgttttttttttttgtttttttttttaagacggagtcttgctctgtcgcccaggctggagtgcagtggcgcgatctcgacttactacaacctccgcctcctggcttcaagtgatcctcccacctcagcctcctcagtagctggaattacaggcatgtgcccccatgcccggctaatttttgtatttttagtagagacggagtttcgccatgttagccaagctggtctggaactcctgacctcaagtgatccgcccgcctcggccttccaaagtgctgggattgcaggcgtgagccactcggatttttatttttatttatttatttatttttagagagaggctcttgctctgctgcccaggctggagcgtcatgttgtgatgataactcactgcagcttcgacctcttgggctcaacggatcctcccccttcggcctcagcctcccaagtagctagaactccaggtgcaagctaccgcacccagtaagaatcctattctcttttggactgacaaactcctactcatccaacaaagccccagctccaatggccccttctctgaggaacctgccctggttccctggtccacctcccagctagtagagttccctgggaaggggttagacgcctctaagtggcagagaggggccctcattcctgccccaaaggtagccttctcccctcccctttctggcagaagagaagtctgagatggagaaagagtgagagccgcccacgagctctgagcagagagcccgcaggagtgccacgtcccggcggcctcggcccctccctgcctcagtttcccgtggcatcaaagggggcgaggggcccctccaggcctctggtgacgggggtgctgtgcccaggcgggggtccgggggcgaccgagggggctcaggaagtccgcggccgc

SEQ ID NO: 20193 - DNA, 2300 bp, Homo sapien
atggggggatcaaggggaaaatgtccacctcaccattgggaggaggagcaaaagctgaagccacaggtgagtctgggtggaatgaatgatttgaagggccgggacttggggtagagggagaggctgggcttcctggccatttggagaagaggcagttccctcaaatgccccccatgcgctttggctgcactctaccttacagcgcaagtctcgtggcctcagcctggatgtctccccgttggcgaactcctatttatcctcaaagccccaacggcaatgccacctcctgccgcgggagccgtccccacgcctctcactctccccagcgccttcaaagctgtggacccacacgctcccatttcagcttcacctccagcctgaagagtttatttcaactcttcttccagagtgggaaacgggttttcctcaaaatcagggtagccactataatcggagactctagaatgttggccccctccccctcctgccatcctctgcagaagccgaggagcgttcgtggaatgaatgaatgaacgaatgatctagtggaacccctactttacagacggacgagtgtagtcccagagtctggactaaactagagggagcctggccagccccggggacagcggggacagagggaactcctgcaattcggagctgcggtattgcagccggttatacaacgtggggaggcagcctggctccccaaagacagcgcagcctcgttcccggagggcggcctgcctgggacctgccgggcactccgccaccctacggtgatgcagcaagagccgcgcggtccctttaagaaacccggctaggcgaggcccttctgtgatcccgtctcctcccttggcccgcgcagctccgacggagcaggccagtgagtgacgggcaggtcgcccaatagcagcgtgcagaggcaggggcgtgccccggcgctgctacctgcgcgggcaagctcagcgcacttggcttaaggggcggcgcgctccctgcctgctgctgggcggagggaaggcggcaagagctgcggagcccctggaaggtgagaaggactcggagagggaagaaggcccgagactcgagaatgcggggttggggccgggagggatgcaagttccctgggaattagggggtccagcctctgacctccttccggtgaatgttgacgacggctgaattgatcactgattctcaaggggggcatcggacatctgggacccttaagagggcctttgccgatcacacacctgcagccccctgcccgttagaactcctgcactcccccttgccccgtcttacaaatggagaaactgagcccactcccccagatcctaagtcccgcttgatgtaaaggaaagaaccctggcgtaagggtctgggtctgaggtcccagttccggcctggtcacctttagcaacttcctgcccctctgtcagcgtcagattctccatctgtgtcagaggtggaccggcccaaggaaaatagatcaggaatcgctgactccaggagtctctatcccagccccttcgcctgactctttctctggctcccgcggtccctctgagcgattaatgctacataaggtgtgggcagagctggggtcgtgcctccagctgggcaactgcctgtctctctgggtgcctgggtttgctttcttgggcctcggtttccacttctgtagagtggggtgatagtccagcacttcccctgggcgtgtgaaatgtccagcactgccaatattcgttgctgttatcttcggagaacagtgaggggaaaggaatccttgcctgggctgggccaggcaggaggctgggggtcaggacctggaagaggcttccaggtgaggcttggggtggagcctggtgacgaaagcgttaagcccaaactcggtccctggaggattagaggatgatctttaagtccccagctgtcagccctgctcagagcgacagtcctggcagccaatcagatgcgaggacggctgcgggttgcgctcccattggtttactccacccctggggtagcggagcctctttatcgagtgactactgtttgcctcgctctaatcagagcttccaggaaccctgcgctgtgggataaaggaatgaggttcagaaaggggcagggagttgcccgcagccgcaccgcacgtcttcagcccgaccgttgtcctgacctctctgtcccgtcccctgcccagtctcaccatggccttctggacacagctgatgctgctgctctggaagaatttcatgtatcgccggagacagccggtaacgccccagtgtgag

SEQ ID NO: 20194 - DNA, 2300 bp, Homo sapien
cctttagcaacttcctgcccctctgtcagcgtcagattctccatctgtgtcagaggtggaccggcccaaggaaaatagatcaggaatcgctgactccaggagtctctatcccagccccttcgcctgactctttctctggctcccgcggtccctctgagcgattaatgctacataaggtgtgggcagagctggggtcgtgcctccagctgggcaactgcctgtctctctgggtgcctgggtttgctttcttgggcctcggtttccacttctgtagagtggggtgatagtccagcacttcccctgggcgtgtgaaatgtccagcactgccaatattcgttgctgttatcttcggagaacagtgaggggaaaggaatccttgcctgggctgggccaggcaggaggctgggggtcaggacctggaagaggcttccaggtgaggcttggggtggagcctggtgacgaaagcgttaagcccaaactcggtccctggaggattagaggatgatctttaagtccccagctgtcagccctgctcagagcgacagtcctggcagccaatcagatgcgaggacggctgcgggttgcgctcccattggtttactccacccctggggtagcggagcctctttatcgagtgactactgtttgcctcgctctaatcagagcttccaggaaccctgcgctgtgggataaaggaatgaggttcagaaaggggcagggagttgcccgcagccgcaccgcacgtcttcagcccgaccgttgtcctgacctctctgtcccgtcccctgcccagtctcaccatggccttctggacacagctgatgctgctgctctggaagaatttcatgtatcgccggagacagccggtaacgccccagtgtgagaccagggccgggtgggcaggcagcccccactgtcccccaccgtctcccacctattctcccccaggtccagctcctggtcgaattgctgtggcctctcttcctcttcttcatcctggtggctgttcgccactcccacccgcccctggagcaccatgaatgtgagcccccccagggaccaggcactttgtgtgtgtaggggaaggcagatggctcacccgtgcacaggaatcccccgtgcatgtcagggagccttcaccaggccgccaatacatggcatgggagtgagctctccatcgctggaggcatgcaagcggtgccgggcgacccgatgggggtggagtcaggcagagtccacagggcctcagcaccaggcgtctccccgcaggccacttcccaaacaagccactgccatcggcgggcaccgtgccctggctccagggtctcatctgtaatgtgaacaacacctgctttccgcagctgacaccgggcgaggagcccgggcgcctgagcaacttcaacgactccctgtgagccagaggcagtgggtgcggccggcctgcaaactcggggctgcagtgccggccggaaccccgcctcctgccctctctctgtccccagggtctcccggctgctagccgatgcccgcactgtgctgggaggggccagtgcccacaggacgctggctggcctagggaagctgatcgccacgctgagggctgcacgcagcacgggtgaggaggccggggggcctctggcagggctgagctctgagcctcaacttgccgggccgtgaaatgggcacagggtgggggtgggtgcctcagaccaacgtccccccagccccatgctcccgtgcgctcctcccccagcccagcctcaaccaaccaagcagtctccactggaaccacccatgctggatgtcgcggagctgctgacgtcactgctgcgcacggtagggtgtcggggcgggaccgcgctgacttcctgggacactgcactggggatgtcctggcactgccccaccccgggccaaggacctcccgttccaggcatccaggctgtccctggtctctgcggtgatgctgcttgtccgtctgggcccccagacagagtgtgtctgacccagtgaggaagactcgtctgtgagatctccaatgagtccctttgcctctcagagcctcagtttccctatttgtaaagtgggggctatgatagtatggtctgcctgggaactggccagagcgctggacccctagtgagtgttcaaaatcattgtcccccttgtggtctttctccccaggaatccctggggttggcactgggccaagcccaggagcccttgcacagcttgttggaggccgctgaggacctggcccaggaggtacgaggccccactcatcctcaacccccatggag

SEQ ID NO: 20195 - DNA, 2300 bp, Homo sapien
ccacaggtgaggcgtcttgttggcctggacctttcccctctctggcctcagttttcccatctggtccctggccagggagcctcagggggcacctggagcatcccctgtgcccacctgggagctgggagcctctgtggctccaggaacccccagaagctgggtgcccacagaccttcaccttgaccctgcagcgcccttgagtgtgcacagcccattgtctgcaggttctcggcaccagaagttcctgctgaagtggccaaggtcttggccagtggcaactggaccccagagtctccatccccagcctgccagtgtagccggcccggtgcccggcgcctgctgcccgactgcccggctgcagctggtggtccccctccgccccaggcagtgaccggctctggggaagtggttcagaacctgacaggccggaacctgtctgacttcctggtcaagacctacccgcgcctggtgcgccaggggtgagccatgccctgggactcagtttccctggctatagcatgggtccttgggttgctggggctggtgtggtcctggaggaggaagtggaggggttggatgcccagcttggggctacgggctgggagtctcgcgtaccttcctttcctctttttttttttttttttttttgagatggagtctccctctgttgcccaggctggagtgcagaggtgtgatctcagctcattgcaacctccacctcccagtttcaagcgattctcctccctcagcctcccgagtagctgggattacaggcacgcaccaccactcccgactaatttttgtatttttagtagagatggggtttcaccgtgttgccaggctggtctcgaactcctgacctcaggtgatccacccgccttggcctcccaaagtgttgggattacaggcaggagccaccgcgcccggctttctttcctgtttttgtccacccttgactctgtgctcccctctcaccatctctctctctgtcccacatccctgtctgcctgtgtctctgtccatctctcccacagcctgaagactaagaagtgggtgaatgaggtcaggtgaggaggggtctagcttggggtcccctgccccagttccactcccatgccctctgcctgccccctgggagctctcccggcccccccggccctcagctccccttccctgcctgcatggccccacagatacggaggcttctcgctggggggccgagacccaggcctgccctcgggccaagagttgggccgctcagtggaggagttgtgggcgctgctgagtcccctgcctggcggggccctcgaccgtgtcctgaaaaacctcacagcctgggctcacagcctggatgctcaggacagtctcaaggtgggaactgggggggcaggtgggcgtcctgtcacagcaaggtccaaccccattgctctgaccctatgaccttgacccccacccagatctggttcaacaacaaaggctggcactccatggtggcctttgtcaaccgagccagcaacgcaatcctccgtgctcacctgcccccaggcccggcccgccacgcccacagcatcaccacactcaaccaccccttgaacctcaccaaggagcagctgtctgagggtgcactgtgagtccctccaccctgcatgtcctaccctgcacgtcctaccctgcctccatttctctgtcgtttggggtggtgggagctggatttgaaccctgacacactcttgctttataaatgggggatagaaactgttcctctgctccctaagccagggaaatgggacctcctcagactcagcgggccccagcctcccccacacatcctcatcccaccaacctttatcctgcctgagacctgtacaacctctgctgccaaatcccaggcaccctcatccctaaattgcccctgccatctctgccactgctgactgccccatagacctttgtcccatcaatggcgtgttcagctctgctctgagcaacccatgcaccctcaccctacaacagctctcatgtcttcacctccaggatggcctcctcggtggacgtcctcgtctccatctgtgtggtctttgccatgtcctttgtcccggccagcttcactcttgtcctcattgaggagcgagtcacccgagccaagcacctgcagctcatggggggcctgtcccccaccctctactggcttggcaactttctctgggacatggtgcgggggctgcttggacgggtgggggcccagccactgcttgccactgccctgtctggccccttgtaggcaggggcttgtccaagat

SEQ ID NO: 20196 - DNA, 2300 bp, Homo sapien
gcgctgcgccctggcgcgcgtctttggagagctggcggtgcacggcgcagagcacggcgtggaggacttttccgtgagccagacgatgctggaggaggtgatcacggcgccggggtcgggctgggggaggcaggctgggggccaggcccgtgggctgaccgtccctcttgtcccctctgggctgcccaccgctaggtattcttgtacttctccaaggaccaggggaaggacgaggacaccgaagagcagaaggaggcaggagtgggagtggaccccgcgccaggcctgcagcaccccaaacgcgtcagccagttcctcgatgaccctagcactgccgagactgtgctctgagcctccctcccctgcggggccgcggggaggccctgggaatggcaagggcaaggtagagtgcctaggagccctggactcaggctggcagaggggctggtgccctggagaaaataaagagaaggctggagagaagccgtggtggtgaaaccgtgtgcatgtgtgtccttgagccaggctgcacacatgtccacacagctgcctgcacatgcgtctggatatggctggccccttgcaagctgagtgtgcacatacgggccaagtggcgattcataggacacaggtgtgagcgtgcctacagctgaccggatcccagctgtaaatgcctctgtggccagcccaggagttggggatgtgagtgcgggcctcataagggcctggtcacaccgtccctgtccccacgtccctgcgtgcctatgtggggctggcgcctaagggcggtacctgtaagtgcctggccataaagtggggatgaggtcaggactcaggaatgtcctgggaagcttacaggagcccggtgtcccggagcacaggccagggccgggccagaagcccatccgacatccagctgaccctcaccctctgaccccagccctcagcgccatgagtcgggggcaaagagttctcaagggtctgctgggctgggtttgcacttggacctgggcctggagagccagacttggagcaaggggctgtggccttcatgtcctgtgccccagagatctgcccctcccacccgaggtaggtgggaatggggtttgggaaaggaaagaggttggggttttgggattgggggtggggttctggaaggggacagcagggagacttggggaggggggagagagttcacactgcggggtgggggttgggggaaggtaggaggctgggatctgtatgcctgcagatgccccagctcttggccaatgccgcctcaggctgttatcagcaacgggtgcctgcgtcctgctgcccagcacgtccggtggtccagagtcactggaatgcagcttgggaggcggggctggggaccttagctaagggcaggtctggggcaacatgatatggcccacagggctgctgagaggtaaccaggtgtcctcagcatattctgccgatggtggggtccacaccacactttggggacccctgtgcaggcagcccaggaccaggtggacgtggggacccagacggacgtggggacccagacggacagggcccggtaacctggattgttctgacttcctggacgtctttgcccccagggtttcggttctgggcctcagtttccccacctgtcctcgacctgacccacttcacggggctgcagggcgggtgatgggggggaccctactctgcccggccctgctggggcccggccacaccctagggtctgcaggagaggcggtggagcgggcttgccttcagggaaaagggggctgcaggggcgcagcttcggcctgtgcgtgtgtctggggtctgagggcgaggctccaggggcttggtggcgtctgagcgcgtgtggaggtccgggtctctgcgtgtcatcgtgcacgtgtctgtgcacgcccactcgcgtccgggagtgagagtcagcgccctgcagtcggccgccccgtgcccgccagcgtcaggcaggggctcccggtcccaccccgcgagcggcgcggctccgagctcccgaaggcggaagcggggggcgcggcccggggctgggggcggggcctgcgacctcaccttcgcgcccactccgcagagccgcaggctgaggccgggaagggtcgggggcgaggccgcgtcgccgcctccccgaagccttttcctgttggggggagggcccgccagtgacggccgggcctgtcacgtgggcctgacagctggggagggggtggccggcgacaatgtggtcccgaagcggccagcgccgggagctgcagcgctgagacccccagccc

SEQ ID NO: 20197 - DNA, 2300 bp, Homo sapien
gcagaggggctggtgccctggagaaaataaagagaaggctggagagaagccgtggtggtgaaaccgtgtgcatgtgtgtccttgagccaggctgcacacatgtccacacagctgcctgcacatgcgtctggatatggctggccccttgcaagctgagtgtgcacatacgggccaagtggcgattcataggacacaggtgtgagcgtgcctacagctgaccggatcccagctgtaaatgcctctgtggccagcccaggagttggggatgtgagtgcgggcctcataagggcctggtcacaccgtccctgtccccacgtccctgcgtgcctatgtggggctggcgcctaagggcggtacctgtaagtgcctggccataaagtggggatgaggtcaggactcaggaatgtcctgggaagcttacaggagcccggtgtcccggagcacaggccagggccgggccagaagcccatccgacatccagctgaccctcaccctctgaccccagccctcagcgccatgagtcgggggcaaagagttctcaagggtctgctgggctgggtttgcacttggacctgggcctggagagccagacttggagcaaggggctgtggccttcatgtcctgtgccccagagatctgcccctcccacccgaggtaggtgggaatggggtttgggaaaggaaagaggttggggttttgggattgggggtggggttctggaaggggacagcagggagacttggggaggggggagagagttcacactgcggggtgggggttgggggaaggtaggaggctgggatctgtatgcctgcagatgccccagctcttggccaatgccgcctcaggctgttatcagcaacgggtgcctgcgtcctgctgcccagcacgtccggtggtccagagtcactggaatgcagcttgggaggcggggctggggaccttagctaagggcaggtctggggcaacatgatatggcccacagggctgctgagaggtaaccaggtgtcctcagcatattctgccgatggtggggtccacaccacactttggggacccctgtgcaggcagcccaggaccaggtggacgtggggacccagacggacgtggggacccagacggacagggcccggtaacctggattgttctgacttcctggacgtctttgcccccagggtttcggttctgggcctcagtttccccacctgtcctcgacctgacccacttcacggggctgcagggcgggtgatgggggggaccctactctgcccggccctgctggggcccggccacaccctagggtctgcaggagaggcggtggagcgggcttgccttcagggaaaagggggctgcaggggcgcagcttcggcctgtgcgtgtgtctggggtctgagggcgaggctccaggggcttggtggcgtctgagcgcgtgtggaggtccgggtctctgcgtgtcatcgtgcacgtgtctgtgcacgcccactcgcgtccgggagtgagagtcagcgccctgcagtcggccgccccgtgcccgccagcgtcaggcaggggctcccggtcccaccccgcgagcggcgcggctccgagctcccgaaggcggaagcggggggcgcggcccggggctgggggcggggcctgcgacctcaccttcgcgcccactccgcagagccgcaggctgaggccgggaagggtcgggggcgaggccgcgtcgccgcctccccgaagccttttcctgttggggggagggcccgccagtgacggccgggcctgtcacgtgggcctgacagctggggagggggtggccggcgacaatgtggtcccgaagcggccagcgccgggagctgcagcgctgagacccccagcccgccccctcgggctcccggccggggccccatcatgttctccaggaagaaacgagagctcatgaaaaccccttccatctcgaaaaagaaccgcgcgggaagccccagcccgcagccctcgggggtgagtggagcccgggtgagacccggagctgacgccgggccgcagggggacagggacccgccctgtgctcggggctcatgctggggcggcggctgggggctcgtgccagctacagcccctaccgggcgggacggcaggggccacagcagagaggccgggaccccggcattcagctcacggtagggaccctgggagtggtggccgcctccctccactccatccagggctggccgcggggcccagggagcaggaagggagggtgccgggttgggacgatgttgtgtttgggccgctgcaggttgggggcttaggca

SEQ ID NO: 20198 - DNA, 2300 bp, Homo sapien
tggggagccatagaaggtgttagagcacaggacagatgggggcagatctgtgtcttggaatgaagcaaactgggggttggctgaggtctgggtggagagagattcaggaggcatggcgaggggcaggatggggtcatcaggcggcggaggtgctgggacccagcggcctgcaggccggcagttccgttttctcctccacgcggccgctgacagccctgcttcctgccgagttattttcatctgcttcctgtttgtccctggcagcccaggcgggcacctcatgtgctgccttcagcccccggctcctcccagaaaccacagtgccagggtcatgccaggcgctctgatctgctcccagcagccgcccattttacagatgacgaaactaagtctctagtgaggccctgacccctggctcacccagccagggcagggcagagccaggactggacctcaagtggtggagtggcctctgcaccttcagggcactagttggggaaggcccggtccccactgggaggagtgggagcccccgggttatctggtcccaggggcgggggctaggctgctttcctggggaaaccctaatctcggttcctttccgatcctggcgcttccttggaggcctggcctgggcggggctcagctcccaggctcctgcaggaggtctgaactgggccagccagggtggggcacttttttttttttttttttgatacagggtcttgctctgttgcccaggctggagtccagtggtgtgattgaggctcactgttaccttgaactcctgggctcaagccatcctcctacctctgcctcccgagtacctgagactacaggcatgagccactgcacctgatttattttattttatttattttatttgagatggtgagatggagtctcactctgtcgcccaggctggagtgcagtggcgcgatctcggctcattgcaaccttcctctctcgggttcaagtgattcttctgcctcaggctcccgagtagctaggactacaggtgcgtgccaccacacctggctaatttttgtatttttagtagagatggggtttcaccatattggccaggttggtctcaaacccctaacctcgtgatccgcatgcctcagcctcccaaagtgctgggattacagcaggcatgagccaccgtgcccgggcttttctttttttctttctttttcttttcttttctttttttttttttttttttgagacagagtctcactctgtcacccaggctggagtgcaggggcgagatctcagctcactgcaacctccacctcctgggttcaagtggttcttctgcctcagcctcccgagtggctgggattgcaggggcgcgccaccgtgcccggctaattttttttctttcttttttttttttttttagtagagatggggtttcaccattttggccaggctggtcttgaactcctgatctcaagtgatccacccacctcggcctcccaaagcgccaggattacaggcgtgagccatcgcgcccggccagtttttgtattttttgtagagaccggggtctccccatattgcgcaggctggtctagaactcccgagctaaaaaccgttctcccggctccgcctcccaaagtgctgggataacaggcctgatccaccgcgcccggctgggggcgccttctgtgcgtctcggggccgccccaggccagagaagaccctggcggctaggatgtgggctctagtcccgatgtttctcagctgctgagaccctggcaagccccttccctctctaggtgtcaggtgacttatctataaaatggggccacctgcatgcagcgatggttgtggggtccaccccacagcttggggacccgcgttcaggcagctaggaggggacccacatggacggtgccaccccgacacttcccgggcttcctcgttcccgggcttcaggtctgggcctcagtttccctgcccgtcctcgaccctccccacctcgaagctctgcggttaaggaaggacccaggctggggcgaacgggaccccagggcggggtttccctcgcgggggcggggcctcctgaccggccggagccggtttggccaccggagacccccatcggtcagctgccaggccccacgcgctcgcggtctccgcgccccgacggctgcgccatgtgtatctgcgggacggcgcacccggtgctggacgagggccccgtgcgctgccgggcgggcccccgaggtgaggggacaggtgccgggcgctgggtcccgccgcgtccgggagcacgtggcgctcgggcc

SEQ ID NO: 20199 - DNA, 2300 bp, Homo sapien
caaacaattctcctgtcgcagcgtcccgagtagctgggattacagaagcacgccaccacacctggctaatttttgtatttttagtagagacggggtttcaccatagtggtcaggctggtctcgaactcctgacctcaggtgatccacccgcgtcggcctcccaaagtgctgagattacagacgtgagccaccgcacccacccggcctcctgcctgtattctcttcccacttcgcttttgggttatttcaaagacgccggcgcctttttgtttgtttctttgcttgttttgagataaggtctcgctctgtcacccaggctggactgcagtgacgcaatcatacctcactgcagacttgccttcttgggctgcaatgatcctcccacctcagcctcctgagttcctgggtctacaggcaccagccatcacacccagttcatttttttgtattttttgtatactcactatgttgcccagtttttgtttgctttttagctgtgttaacacggtctgcagtgaaacgcaccctcctagctccttccagcacataccggcaaacacatatctgccctgttttgtacacacgaggacagctcacctcatgccctgttctgctcctgatttttatcctcacctccatatagagaggctcacccgatatcagtcagcatgaagcagcctgaaccccttttttcggctgtgcagggctcagctgaggagattgagtaggttatttcatggacgtcttgggagtggctgagctgttgctgttacgaacaccattgctatgacaagcttgtgcccctgtctcaaggatgcctgagggatcagtgcccaaaatagaactgctgggtcaaggggcgtgcgtgtatgagctaccctcccaggccacagccctgcttttcctcttctgtgaaccctcagttcttaacctttgcttagttcttatcctttgcttactttgtactggacagtggcttatcattgatttgtcagagctttttacatattagagaacttaggccttaatcatgtgagttttagactccccccattcccctcccacaatttactgtttgacttttgatttttacctgtggcctattttgccaggtagaaacctgtgattgttggcagtagtcttttttttttttttttttttttttttttttgagacaagagcctcactctgttgcccaggctgcagtgcagtggatcgatctcagctcactgcaacctccatctcctgggctcaagcgattcttctgcctcagcctcccaagtagctgggattacaggcgccagccaacatgcctggctaatttttgtatttttagtagagatggggtttcaccaccttggccaggctggtctcgaactcctgacctcaggtaatctgcccaccttgtccttccaaagtgctggaattataggcataagacaccgtgcttggctaatttttatatctttggtagagatggggtttcatcatgttggccaggctggtctcgagtagctaggaccacaggtgtgcgccaccacgtctggctaaattttttaatttttttgtagagatggggtctcactatgttgaccaggctggtctcaaactcctggcctcaagtgatcctcctgcctcggcctcccaaagcactgggagtacaggtgtgacccatggcgcctggcggtctcctagtaattggatgagtccgtttgtttgtgtgcgaatctgatggtgcaggttgtgaggtgtggcccccgagcccacaggtttttgactaagtgctcttcctgccaacctgtgggcgcctggcttcctgcctgggcggcttctctgttctcgtctgtgaggagggaagtgaaagcaaaagagcccggagacgctcccgtgggggctggtgtgcgtgtctgcagaggctgccgtgtgagcctctgtgcagagcttggctgcacctcagcttcccgggctgcagagtgggcacacaggacacccatttctccgagtgtcctgttacgggtgcctcctcccgttcttttttttttttttttttttgagctggaatctctgttgcccaggctggagtgcagtggtgcatgcaatcttggctcactgcaaccttcgcctcctgggttcaagctgttcgcgattctagtgcctcagcctcccgagtagctgggattacaagcgtgcaccacaatgcccggctaattgttttaaattttgggtagatacggggtttcactatgttggccaggctggtctcaaactcctgacctcaagtgatccacctgcctcggcct

SEQ ID NO: 20200 - DNA, 2300 bp, Homo sapien
atctcctgacctcgtgatccgtccacctcggcctcccaaagtgctgggattataggcatgagccactgcgcccggccaatttgttttttggagacagagtctcattctgttgcccaggctggagtgcagtggtgagatctcactgcaacctccgcctcccaggttcacacagttctctgcctcagccaccctgccaccaagcccagctaatttttttgtatttttagtagacacagagtttcaccatcttggccaggttggtctcaaactcctgacctcatgatccacccacttcggcctcccaaagtgctgggattacaggcatgagccaccgcgcccggccccgatttttaaattattattatttttgagacagtgtcttgttctgtcacccaggctggagtgcagtgacgtgatcatggctcactgcagcctctacctcctgggctcaagcaatcttctcgcctcagcctctagagtagctgggaccacaggcgtgtgccgccacacccagctaatttaaaaaaattcttggccgggcgcagtggctcacgcctgtaatcccagcactttgggaggccgaggcaggtggatcacaaggtcaggagatcaagaccatcctggctaacagggtgaaaccccgtctctactaaaaatacaaaaaattagctgggcgtagtggtgggcgcctgtagtcccagctactcgggaggctgaggcaggaaaatggcatgaacccgggaggtggagcttgcagtgagccgagatcgcgccactgcactccagcctgggcgacagaacgagactctgtctcaaaaaaaaaaaaaaattctttataaagatgggggtctcaggctgagtgtggtggctcacacctgtaatcccagccctttgggaggctgagacgggcagatcatatgaggccaggagttcgaaaccagcctgggcaacatggtgaaacccctgtatctctactaaaattacaaaaaattaaccgggtatggtgggtggggggcacctgtaatccgttacttgggaggctgaggcagaattgcttgaacccggtaggtggaggttgcagtgagctgagatcgtaccactgcactccagcctggcctacagagcaagactccatctcaaaaaaaaaaaaaaaaagatggggagggtctcaccatgttgctcaggctggtctcgaactcctggcctcaagcaagtctcccactgtggcctcccgaggcgctgggatgacaggcgtcagccccgcctccctgaggtttctgtctgagtcctgcaccccgggctgaggcctctctctgtgcgccccgcccccaccgcaggcggaggaagctatggccacctaccgcacctgcgtggccgacgcgaagacgcagaagcaggagctggaggataccaaggtgacggcgctgcggcagatccaggaggtcatccggcagagcgaccaaaccatcaagtcggtgcgtggggtgctccggccgcccgggcggggatggtggaccgggcggcctcctcctgacccctccgctctccggtgccgcccgcaggccacgatctcctactaccagatgatgcatatgcagacggcgccgctgcccgtgcacttccagatgctgtgtgagagcagcaagctgtatgacccaggccagcagtacgcctcccacgtgcgccagctgcagcgggaccaggagcccgatgtgcactacgactttgagccccacgtctccgccaacgcctggtaccgccacccagctgccctgtccccggcgcacaaggccctgcctgggagccgggcttccctctgtcgggggcatgaagatgaagctgtcttgccccccatcacctcccctccttttcccggtttcttccactaggtcccccgtcatgcgtgcccggaagagcagcttcaacgtgagtgatgtggcgcggccggaggctgccgggagccccccagaagaaggcgggtgcactgagggcacacctgccaaggaccacaggggtgagtgtccggcggggcccaggggcggacgctggctccctgcgacccaccctggcccttcaccagagacgcctctttctccagccgggcgaggacaccaggttcacaagtcatggccgctctcgatctcagactcggacagtgggctggaccccggccctggcgcaggtgagggaggctctctggcgggctggggtgtggagctgcctcctctcctgagcctcagggtttcatcacccaccggggtgatggagggggcccccctggctgggggagtctgaacagt

SEQ ID NO: 20201 - DNA, 2300 bp, Homo sapien
tatgttgcctaggcttgtctcaaactcctggcctcaaggtgagaaagaaaagttaggtagttagataagaaagcctgcacagaccgggcggggtggctcacacctgtaatcccagcactttgggaggccgaggcgggcggatcatgagggcaggagatggagaccatcctggctaacacggtgaaaccccgtctctactaaaaatacaaaaaattagccgggcgtggtggcaggtgcctgtagtcccagctactcgggaggctgaggcagaagaatggcgtgaacccgggaggtggagcttgcagtgagccgagatcctgccactgcactccagcctgggggacagagcgagattccgtgtcaggaaaaaaaaaaaaagtagcccctgacagccccccaaaaagaatctcaaatatcagtgtaaaaaagtccgtgacttacaactaaaaattacaaaactacaacaaagggatcctcccctctcagcttcccaaagtgctgggattacaggtgtgagctatcgcgcccaatgggatttttttttttttttctcgatggagtcttgctctgtcacccaggctggagtgcagtggtgcgatctcggctcactgcaacctccgcctcccgggttcaagtgattctcctgcctcagcctcccgagtaactgggagtacaggcacccaccaccaaacctggctaatttttgtatttttagtagagacagggtttcaccatgttggccaagctggtctggaactcctgatctcatgctctgcctgcctcggccacccaaagtgctgggattacagtgatgagccaccactgctaatgggatttttgcttgaatctatcctcactgtattccctgacctccccatgtgatactgcagttctcccattctccccatgtcacttagcctccctgctctttcttcttccgtagctttgtcactttctaacgttgttatttattttattttatttcatttcattttatttttgagacagagtcttgctctgttgtccaggctggagtgcagtggcacgatcttggctcactgaaacctccaccttacaggttcacgagattctcctgccttagcctcctaagtagctgagactacaggcacctgccacctggcccagctaattttttgtatttttagtagagacggggtttcaccgtgttagccaggatggtcttgaactcctgatctcatgctctgcccgcctcagcctcccaaagtgctgggattataggcatgagccaccgcgcccggccacgttatttattatattttactaaatcctgtctttatctgaatgcaagggatacttggcctgttttattcaccatcactgtaggttgctgagtaaatgttgaattaacgaatgcatcactgaataagttactgatagcctgcacacaggaagtgttgggctggggttctccgtgaacctggggaagtgaggaggtttgcaaagacaggaagagtctggggtggggagatacccaggctaggctggggagatacccaggctaggctggtggcgctcaggggagaggacagaggtgaggggacttaataagcacctagagagatgcctaagactctcagttaaccgtctaaagtagggacactttattgccattgcacaggtagggaaactgaggcccaagggaattaaccctgacctggccaggagccaatggaggaaaccctgtacagtttgatgcacaaatatttatagagttcccactaggctcccagaccatccctaggagccgagctgccccttgaccccatccaggcctcagtttccccgctcacacttcgcccccgcctcgtgggattctaaactgttgctccaaggtgggagttgaacggaaactacaactcccgagaggctgtgcggccaaagacacacgagaactacggaggcgagagactcgctcagccaactgccgctctcgtaaggctcgggctgcccttggcgctgccgatccgagacgttgctgcattcaggcattcgccgacgacagaccagcgcggggcggggttaggcggagggggcctgattcggattcggcgcaggcgcagtccgcgcgggttctcgcgcggagaaggggtgcgagcggcggcggcggcggaggctgccatggacgacgaggaggagacgtaccggctctggaaaatccgcaagaccatcatgcaggtgagccgcgcctggtgttgggggcgggggcgcgggcggcgggtgtaggggcccgaggtggggtcgagcacggcgtctcctcg

SEQ ID NO: 20202 - DNA, 2300 bp, Homo sapien
tcgcaagggcaagaacagagtcaccagtgtggccctgtcacccggcactgccagggcgggaggaaatgggggggtttcctgagaagtcagacaatgggagttgactccaagaactcagcctctaggggctgggcgggagcaaagccatgtgaacagacttatgcaagaccaggattcggccagccctgctcagggatccttgcttcactgcctctgccaccaaaccatccatgacgcctctgtgctgcatctggcaggcctgagtcgggggcagtggcgggggcaggctcatagcaccccccaagtcaacccggccctgagtctgtctctgaagaaatactcagtgcagggtcagaaaaggttaagaccttgaggacaacatacaaatcccaagcacctaggcggggtagagtggctcacacctgtaatcccagcactttgggaggccgaggcaggcggatcacctgaggtcgggagttcgagaccagcctgaccaacatggtgaaagcccgtatctactaaaaacacaaaaattagctgggcgtggtagcacatgcctgtaatcccagctactcaggagactgaggcaggagaatcacttgaacccggaaagcggaggttgcagtgagctgcgatggagccactgcactccagcctgggtgacagaccaagactcctcaaaaaaaaaaaaaaaaatccaaacccctgcctgtacaggggtcaaagtccaatcacggtgactcagttcccaagtatgagatgagtgtttctgttgccacatgtccaagccacgaagtgaaaaacagagttggaagccaagatgtggggcagtatgggctcgggtgtgcccataccttgtaatgttagaagtgtaagaaaaccctccagacttgtgtttattttctgagcacataccgcgcgtccctgcgtgggcagctgcccctgggggtgggagcccaggaaactccaggttctcagttaagtggtaactgtcttgatgactctcaggtctcagtgcccacattatacaagcggctcagcaaccagacccaggatggggagtcactgaccccctgcgcccatggcaggggtgagggtagggacacccccataagatggagctgtgatgagaagcaaacccaactcagtttggtttcatttacattaaaaaggcaaatcccttggccggatgcggtggctcacacctgtaatcccagcactctgggaggcctaggcgggcagatcacctgaggtcaggagttcgagatcagcctggccaacatggtgaaaccccgtctctactaaaaatacaaaaaaattagctgggtgtggtggctcgctcgtgtaatcccagctactcaggaggctgagtcaggagaatcgcttgaacccgggggctgggtggaggttgcagtgagctgagatagcgccactgcactccagcctgggcaaaagagcaaaaaaactgtgtctcggaaaaaaaaaaaaaaaaaaggcaaatcccggccgagcctttggctcacgcatgtgatcccagcacttttgggaagctgaggctggaggatcacttgaggtcagaagtttgagaccagcctaggcaacatagcgagacccccatgtctacaaaacaataattagccaggaatggtggatgagcctgttgtcccagctactcgggaagcagagacgggaggttcgcttgagcctgggaggtcgaggctgcagtgtgccctgatcgtgccactgcacgttagcctgggcaacacagcaagaccccgtgtcttaaaaaaaaaaaggtaaataagagttggggacacttttctgcgagttggagaaaccaaaccccctcgacgagtcttaagtagtattctcaggttgtctggcctgcggccgcgctgctgtcaaccagccggataactgcgctgcctcccgacgcgccgccagccaggccacggcctcctagacacaagcgagcatgcgcagtcgccaacaacaagtccgcacgtccggtcccgcccccccttccccgccttcttcccactccggcctcccattggctgacgtcggcgcgagcgctcaacaccgacgcgtctgaccaatgagcgctctggagggcgtggccgtgggaaaggaggcgcggaaagccgacgcgcgtccattggtcggctggacgaggggaggagccgctggctcccagccccgccgcgatgagcctcggccgcctttgccgcctactgaagccggcgctgctctgtggggctctggccgcgcctggcctggccgggaccatggtgagctag

SEQ ID NO: 20203 - DNA, 2300 bp, Homo sapien
tggccgtgtgacccacgcatttgggtttggggagctctcctccgctctgcctgcgctccctgcaccaccaaggcctgggcggttctgggcccgatagcaactcacccccgctcctggctggggccttgaccaactcaggagcccctgaccttgcccgggaaatgcttccacggagggtccgggccacaggtcagcgtgaccaggccctctgcagcctgggtgggcagtgtccggagggccctcgtgggcctcagtgggatgaatgctccccaaccctgccgatcggggcctccagaggctctgggaggtggactgctcctaccctcctggggtggggggtgctgcaccctacctggctctgggcctcaggcgggcagcatggacacctctgtcccgggggtctctgtttgggggcaggttcctgaaggtccctagtgatcagtgcccaggtgcttgggtctgacagggtgggcagtgggcaaagctgagcaaggtgagggggacggaacccacagcttccagggagagacagcgcccccttgacatgcctggtttttttctttgtttgtttttcttgagatggagtctccctgtgtcacccagactggagtgcaatggcacgatctcagcccactgcagcctctgcctcctgagttcaagcagttctcctgccccagcctctcgagtagctaggattacaggcacgcaccaccatgcccagctaatttttgtgtttttagtaaagacagggttttaccatattggtcaggctggtcttgaactcctgacctcaggtgatctgcccaccttggcttctcaaagtgctggggttacaggcgtgagctaccatgcccagtctattttttttttttttgagacagagtcttgctctgtcacccaggctggaatgtagttgtgcagtaacagctcactgcagccttgacccctctgggctcaggtgatcctcccgcctcagccccccgagtagctgggactacgggcatgcaccaccacacccagctaatttttgtatttttagtagaaatggggttttgccatattgtccaggcgaatcttgaactcctggactcaagcaatcttccaccttggcctccaagtgctgggattacaggcgtgagacatcacatgtggccggacacggtggctcacgcctgtaatcccagcactttgggaggccaaggtggatggatcacctgaggtcaggagttcgagaccagcctgaccaacacggtgaaaccccgtctctactaaaaatacaaaaattagctgggcgtggtggcacgtgcctgtaatcccagctactcgggaggctgaggcaggagaatcgcttgcacctgggaggcagagggtgcagtgagacgagatcacaccattgcactccagcccgggcgacagtgtaagaatccgtctcaaaaaaaaaaaaatgaaatgatgtacatacatctccttcactgggcagcgcgtgtgtgtgtgtcatccccatggcgagccccacctctgggcgtggctgcccccgcccctgcctccggcacagggcatggcaccaggctcaccccagacccgagctgctcagagttcctgcagcattgctgcccttcaggtgctgcagaagtcagacgccgtcctgcgtggccctgagggttggtgtttctcacccattgcttgtttatttttttcttttttgagacggagtctcactctctcgctctgtcacatggtggctcacgcctgtaatcccaacacttttggatgccgaagcaggcagatcacttgaggtcaggagttcaaaaccaggctggccaacatggtgaaaccccgtccctagtaaaaatacaaaaaaattagctgggcatggtggcgcacacctgtaatccctgctacttgggaggatgaggcaggagaattgcttgaacctgggagggccgtggtgtctcccattcccacatgctccagtgtgtggagggccgtggtgtctcccatccccacgtgctccagtgcgtggaggggccttggtgtctcccgtaccaccctcaccgggcctggccttgtcttccaggactcctcctattttgaggacttctccaacatctccatcttctcctcgtccgtggactccctgtcggacatcgtggacacgcccgacttcctgccggctgacagcctcaaccaggtgtccaccatctgggacgataaccctgccccctccacccacgataaggtcagtgcgcccggtgcccccagccagccccgacccaccagcgtggcctccccagcccggg

SEQ ID NO: 20204 - DNA, 2300 bp, Homo sapien
tgtgggtccacccgtgagctgtaggtcctgtgagctgtgagtccacccgtgagctgtgggtccaggtgcctatgagctgtgagtccacccgtgagctgtaggtcctgtgagctgtgggtccacctgtgagctgtgagtccacccgtgagctgtgagtccacccgtgagctgtgagtccacccgtgagctgtgggtcctatgggctgtgggtccacccatgagctgtgggtccaggcgcctatgagctgtgggtccacccatgagctatgggtcctgtgagctgtgagtccacccttgagctgtgggtcctgtgggctgtgggtccactcctgagctgtaggttcaggcttttgtgagctgtgggtcctcctgatggcacgtgggagtgcagctgctgggttgttactccccattcgcctcttttgaggagctgcaggatggttcccaggccactgccccgcgtcctcagcagcgcttgtggttgtgggttttttgcgtggagctggtgtggagctgtctctgggagtggctgtgattggctgctgggttgagcggtggctgtgattggctactgggttgagcggtggctgtgattggctgctaggttgagcggtggctgtgattggctgccggattgagcggctccgtgggtttcttccccattggttgttttccattggcgggcggggtgcctggcaggcgggcccctcgccccagcggcacggacccgtgttgtcgcccagcctccaggaggtgatgggtcgtggcaaggggtgtgggcgacagtctgcaccagcctccgctgctgcggtgcctggtcgcggggccccagtggggctggcacagggcctcagggtctagaacagggtgagcccgagggggcggagtgcacagggtttgagggccccctggtcccactctcccctcagagccctggcgggagtcttacaagcccagaactgtcccgagccctccggcccagccacgggctcccctggcctctcggggcggtttccttctttcccagggcccctggccacagggccgggcccttcctcccctcacagaggaggagccgtggccacctgcgcggtctcggccgcggtctcgtgggcaatgcggcctctgccccgtcagtcgctgagtacaggcagatggggcccgtcctctccacagcccggccgtcctcccaccccctctggccctggggcctccccagctcctccaaggacaccgagaatgaccgcctgtggcccaatgtgaggtcccatcaggtgtctgccccgcggtgtctaggcccctgtgatgcgccagggtcctcacagtgcgggcaagagtgtggccgcgggcgggctcgcggcccggggttgccccagcaagtgcatcattgacacttggttttctaccaaagcgagaacgttcttttcccaggacgctaccacttgttcctgcccagggggccgaggccgggtctggccagagcctggagaggaggggcccaggctcagctctccctccgccagccccagatcaagggaggccacggggcccgctgaaccccctgggcacggacagcagggaaagagcagggaggggactttgcttcggcggcaggggcttctcggggacctcagcctgcaggggtggggtggggagagccccaggggggcgcagcagggcctgaggtgcgcttggcatgcgtggggtgctgggtgaagggaggcggtcttggccgcagtttccctgcctgtggtttgggggcaccaggaacagcagctggtccccgtggaacggaacccagctccctgcagtctggggagaccgaggcccatgcccacctgggcattctgcacgtccgccgggtgccccaaagggggctggtcctgcggcggggcacgggtggggttgcgtgttgacagcgcctgtgggagatccgccccgtacagtaattctcctcgcactgccggtaattgccctgacttacggggccggcatcatttcctgaaagtcagccccggccttagaggaagtaggcgccggcggcggtgactaaaccgacatgcaaatgcagccgggcggagagccgcccccgtccgccccggccgacccaatgctggggctgctgccgcggtcatgagggagccgctcccgggcagcgcttcctgggggacccctggccccccgagcgccgggaccatgtcccagctgcagctgtggctgcagtttgaggctctgaacaaggtaacactcccttcccggggcgggcgaggccctcgggggcaggggtctgggaggtggga

SEQ ID NO: 20205 - DNA, 2300 bp, Homo sapien
gacggggtcttgtcatgtcacccaggctggagtgcaatggcgcgatctcagctcactgcaacctccgcctcccagattcaagtgattctcctgcctcagcctcctgagtagtcaggattacaggcacccactaccacgcctggctaatttttgtatttttagtagagacagggtttcaccatgttcgtcaggctggtgttgaacttctgacctaggtgattcacccacctcagcctcccaaagtgttgggattacaggcgtgagccaccgttttttgtttgtttgtttttttgagaccgaacctcactctatcgcccaggctggagtgcagtggtgtgatctcagctcactgcaacctctacctcctgggttcaagcgattctcctgcctcagcctccctagtagctgggaatacaggcaggcaccaccatgcccagctaacttttttgtacttttagtagagatggggtttcaccatgttggccaggctggtctcaaaccgctgacctcaggtgttcctcctgcctcagactcccgtagtgctgggattacaggcgtgagccaccgtgcctggcttttggcctcagttttttagagaggtgctaaaatatcttaaacctgcttattatctgccttaccaggccttctttgcccggactgttcttcctactcttgtctacctggtacactcctacttgaacttcaaaaccccagcttcaacacactcttcagcatgcagccctctatgaagccctaggcagacatttcaaccctcccagagatcccgcatattggagtgtctggtcctggttctctctcccctagaccaggggctttctgatgttgggacagacagctgagtcctctgtgagaccctgggttttcccagctcatgaccaagcacagagcagcatcgattagaagtcactgaatgaattaacaaagtcatggagaaatcaactctagtttcagggggttggaatgggggcagaggcctctggcttgtggctgcttgggtccagggagctgtatcagtattgtcatggctgaaattgggctggggaggcggtggtgcctcccacactggatctgccttcactggctcaagtcacaggaaaagtgccctgagactccagctccccacgcagggcagcctcccaccacagccaccgagaggaggagcccctcaggcccccgtggccctgcctgaaaggatcctgctctcttgggggtagcccctgggacttacccaaacccccatgtgccagtcaccatgctgaagcgtccagaactgtatttggttagggagagagattaatgaacagagataacttttcgtgagagagtatgtctgacaggcccagaggtgatgattttatttcattttattttatttcgttatttatttatttatttttgagatggagtctcactctgttgcccgggctggagtgcagtggtgcgatctcagctcactgcaataactacctcccaggttcaagcgatactactgcctcagcctcctgagtagctgggattacaggtgcccgccatcacgcccagctaatttttgtatatttagtagagacggggtttcatcatattgtccaggttggcctcaaactcccgacctcaagtgatccatccgcctcagcctctcaaagtgctgcgattacaggcgtgagccactgcgcccggctggtgatcgtcttagtagcttttgagggagtctcagtttaaaagtctcgggtgagtgagccccagtgggggacgtggcacatgcagaggcttggagggggttctgaggaaggaggaaaaaaggggatgctgtaccacaaagcagattccatttcaccagcacggtgcagaagaggaaactgaggcttgaggaggtgaaagcacatgctggggtctcaagagaaccaggcagggcgggattcgaacccagagccgtaggagtcccagccccttccgaatagcggaaggacctcaagggattggcttggaaggtggccccgcccccgaaccgagaccacgcccccgcaggtggaggccccgccccgcggcatgaccggaagtgcgcggggcccccaagatggcgcccgaaacccggaagtgagcggcggcagctgcgaggctcggagaaacaggcgccgcgggctccgcgcccggccggacccgggcccgaggtgaggctctggttgcgacccccgccccggctccaccgcgacccctgcctggcccgaccccgcttgtgggtccggcgctccccgcggacccctgcgcccggggctgggggt

SEQ ID NO: 20206 - DNA, 2300 bp, Homo sapien
atcgtgctaagggcaaaagtgaagcaggaaagaagggctcaaagaagaacaaaccagaagatgaggaggaggaggaggagaaagaagatgaagatgaggaggaagagggtgaagatgaagaataaatggctatcctttaatgatgcctgtgcagtgggcttgttttgctaagaatgtgaattctagtacagctcagtattagcttcagtataaaactgtacaaattttcgtatagctcataagattctctgtacagaaaatacttttcttttcttttcttttttttgagacagagtttcgctcttgttgcctaggctggagtgcaatggcgtgatctcggctcaccgcaacctccgcctcccgggtcctggttcaagcagttctcctgcctcagcctcctgagtagctgggattacaggcacatgccaccacgctcagctaatttttgtatttttagtagagatggggtttcaccatgttggccaggctgctttcaaactcctgacctcgtgatccgcctgcttcggcctcccaaaatactgggattacaggtgtgagccaccgcaccctgcctaatgtccctaaatatttaatggtttttaaaaaatttattgtgtatggcagcacagcacacttgtaggaattagtatcaacagtacatcttgcgttttttaagatgctgcattttttaacattttgtaataaaattatgcgtatcaaaaaaacaaagaaattccgtgtgtagttcacactcacagcacatctccgtccaggcacttgagagaatgactaggaggggttcttggaggaggtggtctttgaacggagaatccatcttcaaggattctgtctgtaatggtcaccaagtatttcctgagtcacttccatgtgtcctgcagttctctgaaggggcgtgggacctaccgatgccaattatccagcattatctccagattccaagaagttggggtgtgagccagcaatcagtacagaaaagagataccaaaataagtttgagttggggagtgttccttcaacttcagttttctggaagagatcttttttttttttttgagacagagtttcgctcttattgcccaagctggagtgcagtggcacgatctcggctcaccgcaacctcctcctcccgggttcaagcgattctcctccctcagccttctgagtagctgggattacagacatgcacctgtaatttctactaaaaatacaaaaattagccgggcgtggtggcgcacgcctgtaatctcagctactggggaggctgaggcaggagaatcgcttgaaaccaggaggcggagattgtaccaagatagtttgttccagctaaacaacctggcgctagtgcaggaaaaggtggaaggcacggggctagcacaggagggttcaatattttcaaccttatcaagccatattttggcaactcttgtttttcacgagaagcccccgctgggcttgtcccagcgctgtcctgaggcttcccccatgagttccgatagggcagaggccgccctgagcgtttctctttcccctggtccaagagtggctcaaaagaaggatttttgactggaattggccactttgtgttactttttgacccttgacctcgccccaaagggggatgcgggggaggggctctggtaggggtggccccgctccttccaggtccgcaagcccaggttcccgcccaccgggctcagcccaccctgcggccgttcagggaggccgttggcacccgtgacctacgacccccttcccgagccccaccgaggtcacagccgtggcctcgtctccccatgcctgcttcccgccccctgcccgtgacgggcgtctccgaggaccaatgagcgcgctgtatccacccctcgggcggggccaagcgccgaccaatcgccgctcgggcgcccggccgggtccaaacgctccaatcgtcagcggcggcggggcgggcagagggccggggatggcaggttcaaccaacgggtgggcacgtcgtcctcgcgaggaggcgtgccctgcggccgggcgtgcggtgtccgcggcggcgcagggagggggagggaggtaaacaagatggcggcggcgtgtcgggcgcggaagggggaggcggcccggggcgcccgcgagtgaggcgcggggcggcgaagggagcgcgggtggcggcacttgctgccgcggccttggatgggctgggcccccctcgccgctccgcctcctccacacgcgcggcggccgcggcgagggggacgcgccgcccggggcccggcaccttcgggaacccc

SEQ ID NO: 20207 - DNA, 2300 bp, Homo sapien
cgttttttaagatgctgcattttttaacattttgtaataaaattatgcgtatcaaaaaaacaaagaaattccgtgtgtagttcacactcacagcacatctccgtccaggcacttgagagaatgactaggaggggttcttggaggaggtggtctttgaacggagaatccatcttcaaggattctgtctgtaatggtcaccaagtatttcctgagtcacttccatgtgtcctgcagttctctgaaggggcgtgggacctaccgatgccaattatccagcattatctccagattccaagaagttggggtgtgagccagcaatcagtacagaaaagagataccaaaataagtttgagttggggagtgttccttcaacttcagttttctggaagagatcttttttttttttttgagacagagtttcgctcttattgcccaagctggagtgcagtggcacgatctcggctcaccgcaacctcctcctcccgggttcaagcgattctcctccctcagccttctgagtagctgggattacagacatgcacctgtaatttctactaaaaatacaaaaattagccgggcgtggtggcgcacgcctgtaatctcagctactggggaggctgaggcaggagaatcgcttgaaaccaggaggcggagattgtaccaagatagtttgttccagctaaacaacctggcgctagtgcaggaaaaggtggaaggcacggggctagcacaggagggttcaatattttcaaccttatcaagccatattttggcaactcttgtttttcacgagaagcccccgctgggcttgtcccagcgctgtcctgaggcttcccccatgagttccgatagggcagaggccgccctgagcgtttctctttcccctggtccaagagtggctcaaaagaaggatttttgactggaattggccactttgtgttactttttgacccttgacctcgccccaaagggggatgcgggggaggggctctggtaggggtggccccgctccttccaggtccgcaagcccaggttcccgcccaccgggctcagcccaccctgcggccgttcagggaggccgttggcacccgtgacctacgacccccttcccgagccccaccgaggtcacagccgtggcctcgtctccccatgcctgcttcccgccccctgcccgtgacgggcgtctccgaggaccaatgagcgcgctgtatccacccctcgggcggggccaagcgccgaccaatcgccgctcgggcgcccggccgggtccaaacgctccaatcgtcagcggcggcggggcgggcagagggccggggatggcaggttcaaccaacgggtgggcacgtcgtcctcgcgaggaggcgtgccctgcggccgggcgtgcggtgtccgcggcggcgcagggagggggagggaggtaaacaagatggcggcggcgtgtcgggcgcggaagggggaggcggcccggggcgcccgcgagtgaggcgcggggcggcgaagggagcgcgggtggcggcacttgctgccgcggccttggatgggctgggcccccctcgccgctccgcctcctccacacgcgcggcggccgcggcgagggggacgcgccgcccggggcccggcaccttcgggaaccccccggcccggagcctgcggcctgcgccgcctcggccgccgggagccccgtggagcccccgccgccgcgccgccccgcggaccggacgctgagggcactcggggcggggcgcgcgctcgggcagacgtttgcggggaggggggcgcctgccgggccccggcgaccaccttgggggtcgcgggccggctcggggggcgcccagtgcgggccctcgcgggcgccgggcagcgaccagccctgagcggagctgttggccgcggcgggaggcctcccggacgcccccagccccccgaacgctcgcccgggccggcgggagtcggcgccccccgggaggtccgctcggtcgtccgcggcggagcgtttgctcctgggacaggcggtgggaccggggcgtcgccggagacgcccccagcgaagttgggctctccaggtgtgggggtcccggggggtagcgacgtcgcggacccggcctgtgggatgggcggcccggagaagactgcgctcggccgtgttcatacttgtccgtgggcctgaggtccccggaggatgacctagcactgaaaagccccggccggcctccccagggtccccgaggacgaagttgaccctgaccgggccgtctcccagttctgaggcccgggtcccactggaactcgcgtctgagccg

SEQ ID NO: 20208 - DNA, 2300 bp, Homo sapien
gcagcacaggtgagcggcccctgggggcagtggggccgaggctgcagggaggccggccatgtgggcagctggttgagcgggcgctagagcagggcgtggtgggggtgccaggctgggctggggccagaccccgtgcagcgcccgcagttctcggggcccgagtggggtctctgggcagtgtcctgttaccggccagacccaggcgccttgtccgaactggggtctgagtgaggacatgcgtccgtccctgccctaggcatggagatgcgccaggaagggcacagctggtcccaaacactggcgagagcctctctttttcccctcctcctggggctcccagcagcagggtgtggctgggatccagcccagggcccccagctccatgacagggaagacagagcagcggacggggtcagcaggccccacagtgccgcctccctcacttcgtgggctctgctcctctgcaccagcccctggaggcccttgagccgtctgctggagcccctccgagccccgaggccacccactgagaccggctctgggagtgggagtgtccggacccctgaggcgctggtgctgattgtgccttgggggtctctgcacagctcgggtcatctgggcgcctggcggggactggggctgccccccgatagcctcctgggctgggatgtgctcagggccccccagacccccttctggcctttgctggctttgcagccagcatccatctggtgggtgctggcttctgagtgccacctgggacacaggcctcagggtggaggggacatctgtcaggcttggagtcaggtcagcctgcctgctcctagaggacatggctgagcttctgtggtcacagccaccccttgcacggcctggtcccagctcctgagtgtgtggcaggtaccctgggcccagaggagctgggtcggaaaactggaccgccctggtgccagcctgacaggcgccactgcttctgggcgtttgcagctggttccggaagaaacatcctccggctgaagcaccagtgcccatcccaccgagcccagacaccaaggaccggtggcgcagcatgactgtggtgccgtacttggaggacctgcacggcgcggacgaggacgaggacctcttcgacatcgaggatgacatcatctacactcaggacttcacggtgcccggtgagtctggcgggggcccctgcccggctctgctgactcggccaggatgtcccacgggagcagggtgcctgcctgtctgcaacaaggacagcttctgccctctggtggccaatcccacgtccccaaagcctccagcccacctgcaggctgcctccgccctgcgggccgctgggacatggctgaaaggtgtggggtcagcgggggcaccagcccaggcctgtctggccaggagggttcctcaggcgtctctccgggtgctgcccagccaggcaccacccaccggccttggcctgagtcccagcaggagcaggcgggggagccccagggtcgggggagggtaggtgagagtcagggtgcagggtggcccctcagacagctggcatgagagagggtccagtggccctccctcccgtcgtccctgaggcctgcccgctggccctgatgccggccgcccttcttccctaggtggcgaggaggcgtctgaggcagggcttagagcggagcgcggcttgcagaagagcgagggctcagacctttcaggagaggaagcctctcggccggcgccgcagtagtgcctgaggaggagctcagggccttagcgtaggggcggcccacattggcagccagcccctccccgccatgctcccggcttggctgtgttcggcccagggctgggccgtgtcataaagagttttgcagtgtatctgcagggtggatgcttgctgcgctcgggctggagcctgagggggctttctgctttactgtttcagcgggaagtggtgggcaggggccggcctgagaaggggggtacgccaggcaggttgggatgtgaggacccagtgcacagggtccacccccgggcccgagggtcccagaatagtgggggccctgcagagagccccccattaggtccctcagcactcctgggcccctcatcaaacccctaggctcagctcagtagctggtccccaggagagtacagtgtgggggcccccgagagcacagtgtatgggggtccccggggggtacagtgtctgggggccccccaggaggatgcagcatgtgggggccccccaggagggtacagcgtgtgtggggcccccaggatcacagggtctcagctcc

SEQ ID NO: 20209 - DNA, 2300 bp, Homo sapien
gaaggccctgctggtccgactcaggatgaaggcgtgggcctggctcctcccaccgggccagcgctgtgacggtcacttggagcctggtcatcctggccctggctcggggggtgcagaggaggaggcctgttcacttttcgagtcgtgacctgtgcacctcctggctctcaggaccgcatatccagctgccactccaggaaactgggaggcctaatagactcagtctcactcgtggaaccacttccctccagtccccactccagggtcgcccacgggtgagggcgccattactccagccccaaacctggggttcctctggaattccgccctgtcccggcctgtgcacccagcatggccaccgcggctaccatctcttgcctaggaggccccagcctccccccgtttagtacaggtaccttttcttcacacagccagagggagtctttattaaaaatcagaaacctggcggggtgtgggggctcacacctgtagtcccaacaatttaggagactgagacagaaggatctcttgagcccagaagttcgagaccagcccggacaacatagcaagattccatctctacaaaaaaaaacaaaacaaaaattagctgggcatgatggcgcgcacctgtagtcccaactaccttccgggctgaggctggaaaattgcttgaatccgggaggtggaggttgcagtgagccgtgatcacaccactgcactccagcctgggcgacagtgcgagactctgtctctccaaaaagcaaaaccgaaatacaaaaaaccctgaagcctgcccatgtcatggtcctgctgggaacaagacgatttctctgcttccttcacaggcattgacttgcaaacttttttgcctcaaaacctttgcccatgcaattcccatttgcctggcaccaggttccctggggctgcccttggagttcacagctatcggagtggtggccccacagcacacaggaacaggcaaggcgcaaggcatagggccttggagggacgtagcagaggaggggacccaggcatgggctggaagccaagagcagaagcgccgagactgtgaagctggggaaggagttgaaggaaaccggggtgaatctctggctgcatggacagaggcctgggtacagggcacctgcaagggcagaggcggggaggctgagctgggccagccacgtgccagagcggtgtcagcctttctttgggacgagaaagaggaggcgctgtggggtgttaggcgtgggctcagaggggttggggtggcgctcgggccaggctggtggcaggtgtgtggcctgagtatctgcaggatgaggttcgatggtctaagagggagaagcgggggcagctttgggctttgggtttctgcgggtgtcgttctgatgtcaccccacgaggagcaggcctctgtgagtgcacgtttgggccccgatgggctctgctcagctttgtgccggggtctgtgatcgctgtcacacaggggagggggcaggagaggcatggcgagtcctccacagtgccagaggggacctgcgtggggaagcaggcggggcgcctgtgtccagagaccctgggctgtgcagcttaaaggggaattgtggccgaggggccctggctgtgccgccccagaacccccacggaccaagcaacgtgagaggggagtccgtgcccccccggaccccaccccctcctgcgcacgcggcgcacctcgggctgcagagtcgtgaattccaggacacccccagctgcgtccctgggacctcaggaccgggcgaggtgaatcgtgccgatgggccgggggcggggctcggccgccgcggcgggtgcggggggcggctccgcgtgcggagtgggcgcccgggagcgcaggctccgccccccgccccgccggaagggaaggggaggcggtggccggcgcggagccagccagacccagcggcgagcgcagcgggggcggcgggccggggaccgggcagcaccgggcgcgcggagcgggcgcgccgccaacgcggtcacgtgcgcggcccctcctctcgcgccggcctcccccgcgccgcgctctccattcataaattctccgcctgctccgcggccaccgggcgccggagccagccgcgagcgccacgcagccgcccgccgccagcccgccgcccatgggccgctcgtcccggcgctgaggtaggcgcggcgggctcggggctgcggggggcggacgggggacaggccggggatcgcagccggctgtgggctaagcggccggagggagggcgcggaggagtccggcgggcgtg

SEQ ID NO: 20210 - DNA, 2300 bp, Homo sapien
gagtaatggcgccctcacccgtgggcgaccctggagtggggactggagggaagtggttccacgagtgagactgagtctattaggcctcccagtttcctggagtggcagctggatatgcggtcctgagagccaggaggtgcacaggtcacgactcgaaaagtgaacaggcctcctcctctgcaccccccgagccagggccaggatgaccaggctccaagtgaccgtcacagcgctggcccggtgggaggagccaggcccacgccttcatcctgagtcggaccagcagggccttcttcaggtgcttgggttccaggggacagtggcgcccgccattgcactggcctgaacacgggcagggggcgagggtgcagcctccggatgtagggagccacggatcgtgtcggattcgcccacagcaggaggcattggatctccctggctgcacccttgtaaagccacagccccagggcctcccctgctccctgcacccctggggtccagcccaccgcgccaggctcaaggccctttccagggagcccgagccccaacccccgccatccccgattccgcattttcccggagcctaaggagcggggctgggggcccggccgggtgccgcagacctgcgtgagcgcgggggcggggcggtgacgtcatagccgcgagcgaggctgcgcgggccgctggctgacggcagcggagccccgagccgcccgcgcacgcgctcctgcgtcagaggcgcacgggggcgacggccaggcaggaggtggggggtcggcgagcgcatctccgggcgcggagcgccctctgccggcgtcgaggagcagcgcgccggggtccgggatccccagcgagccctcccgcgtcgcccgcgctgtgcccctcgccgcggtcgccgtttcctagaacagctgcacctgcagccttccaccctgtcccgtcctgcacactttctcggcttttactgtgatttatttttggcttttgccaccacctaccactacgacctgtttgtttttaaattttatttatttttttgtttgagacagagtcttgctcagtcgcccaggctggagtgcagtggcgcgatctcggctcactgcaacctcccccccccccccccgcccgggttcgagctattctcctgcctcagcctcccgagtagctgggattacaggcgcccaccaccatgctcggctaatttttgtatatttagtagagacgaggtttcgccatgttgaccaggctggtttcaaactcctgacctcaggtgatccgcctgcctcgccctccagatcggataaagtgctggaattacaggcgtgagccaccgcgcccggcctgacctgcttattaatgatctcaaatgtctgctaaataacccccggccccagagtgggattctcactctgttgcccaggctaggcagtggcgcaatgatagctcactgcagcctcaatctccttaggcccaagcgatgctcccgcctcagcctccccagtagctgggaccacaggcgtgcatcaccacgcccggctaattttgattatttgtagagacggggtctccctctgttgcccagactggtctccatctcctggggtcaagtgattctcctgccttggcctctcaaggtgctgggattacaggttggagccaccacacctggcccagagccggaaacttgatgttttcttgatgtctatccagggccctgcatccaatgagcgccccaaaaatctttttttttttttttgtacagacgggtcgggggtgggggcgatctacactattgcccaggctggtttccagctcctggcctcaagtgatcctctggcctcagcctcctaaagcgctggtattacagtcgtgagccaccacgcagccgaatcttgaatttcactgaagttcgttttactccacctcccaggacggtttcaccgcccttatctgaccaccccctggttctgccgcagcccgggccggaacaaaactgcaacccccagaatacctcacgacggggcactgcgtcgtcaacgtcgcgtgcgccctgccgggagtcgtagttcgcgcttgcgctctcgccgggactcctcctcccagacgtccctgcgcgtcgtcctcctcgccctccaggccgcccgcgccgcgccggagtccgctgtccgccagctacccgcttcctgccgcccgccgctgccatgctgcccgccgcgctgctccgccgcccgggacttggccgcctcgtccgccacgcccgtgcctatgccgaggccgccgccgccccggctgccgcctct

SEQ ID NO: 20211 - DNA, 2300 bp, Homo sapien
cattccactcccgaccagactgaggtgacggtgtccattccactcccgaccagactgaggtgacggtgtgcaggtggcagagccacacacgagaggcaagaggcagggagggaggtgggggctgctggccactcacagggggccccagtgtcctgcttgggctgctcatttggcaccagtccacggctccctccgccacctttgttctcactggaagcagaatgagcctggccctgtagttcccacctggggccccagcccttcatccaagccccattcatcgaccctgcccctcctccctccaactgggtccagttcactaagctcccagaactgctcaagccattcccacttcctggaccatcgtcttttttttttttttttttttttttttttgagaggagtttcgctcttattgcccaggctggagtgcaatggcacaatctcagctcaccacaatctccgtctcccgggttcgagcaatgctcccgcctcagcctcccaagtagctgagattacaggcgcacatcaccacgcctggctaatttttgtgtttttagtacagacagggtttcaccatgttgatcaggctggtctcgaactcctgacctcgtgatccgcccgcctcggcctcccaaagtgccaggattacaggcatgagccaccgcgcccggccttttttttttttttttttttttttgagacggaatctcgttttgtcgctcaggctggagtgccctggcacgatctgggtttattgtaacctccgcctcccgcgttcaagcgattctcctgcctcagcctcctgagtagctgggactacagacacatgccaccatgcccagctaatttttgtatttttagtagagacagggtttcaccatgttggccaggctggtctcaatctcttgaccttgtgatccgcccgcctcggcctcccaaagtgctgggattacaggcgtgagccaccgcgcccgaccgcatcatcttttttatgtgacaaactcctagtcattcctcaaaccgcagcccctgtgacccccttccaagggttatcccagcctctccctctctggcctagccctgacccttcggggctgggtgtgcctgtcaaggtgggggccacggctgccgggagcatgggtggcagccggaaggagacctggggaggagcgcagccctgggaggggcgcccatggccagggtgggggtggaggtggtcaggccagataaagggaggggccagatgagtggacaggaggtgctcccgtaggaatggggtccccttctctaaatagaggggcaggacggggcccacctcaaccaggaccatcctcaaaaagccgacggggaagggtgagatgcacaccacattcgtgtctcattggctgtggcctcagtttcttcatctgtaaaatggggtaatgcccaccccaaaggctgggaaccagtgcatgtcctgcattaatggggggtgatggccccaaagtgatcctgccgcatcccctcaccacactcccacccaccctggagaaactgaggcttggagaggccagttacctcccggggtcacagcatagccggctggtgactggctgggcacaaggcaggcctggcactggctaatcgctccataaatgccctctgaggtcaccattgacagatgcaggaggccagggctggccagggcacccccactctacggcaggtgactccagcctgttttcctggacgacagccgctgactcaggcccctcttcccgtcccccccacgcgggcgcccccaggcggaagcaccgggcctggggcgacaggaagggggcggggcagcgagtcgcgctgtacaccccaaaaccctgtcccgctgacgattcggggtgcatctcagcccgcggcgaggcgggccgagacccttggctcggggcattcaaggggagtccccccatgaactgcgccaagcctgggtcccgggtggcccagccgtcaaggcgccccagggccagggccggcaggcaggggcgggggccagtctgcgtcaccgcccgcccggccccccgcccccctgcccgccctaactccaccccgagggaaggcggcgcggataaaggctgagggccgcgcgcttggcccagaccggcccggccagcgcgcattcggccccggacgaaggtactcgcagcacttggagcgcagaaccggccgcgcccggtgagtgtggaggggggggacctgcgggccgaggaagggtgcccactctagatggctcaggatgcccgcacttttctttgttcttgggacag

SEQ ID NO: 20212 - DNA, 2300 bp, Homo sapien
tcaaaaagccgacggggaagggtgagatgcacaccacattcgtgtctcattggctgtggcctcagtttcttcatctgtaaaatggggtaatgcccaccccaaaggctgggaaccagtgcatgtcctgcattaatggggggtgatggccccaaagtgatcctgccgcatcccctcaccacactcccacccaccctggagaaactgaggcttggagaggccagttacctcccggggtcacagcatagccggctggtgactggctgggcacaaggcaggcctggcactggctaatcgctccataaatgccctctgaggtcaccattgacagatgcaggaggccagggctggccagggcacccccactctacggcaggtgactccagcctgttttcctggacgacagccgctgactcaggcccctcttcccgtcccccccacgcgggcgcccccaggcggaagcaccgggcctggggcgacaggaagggggcggggcagcgagtcgcgctgtacaccccaaaaccctgtcccgctgacgattcggggtgcatctcagcccgcggcgaggcgggccgagacccttggctcggggcattcaaggggagtccccccatgaactgcgccaagcctgggtcccgggtggcccagccgtcaaggcgccccagggccagggccggcaggcaggggcgggggccagtctgcgtcaccgcccgcccggccccccgcccccctgcccgccctaactccaccccgagggaaggcggcgcggataaaggctgagggccgcgcgcttggcccagaccggcccggccagcgcgcattcggccccggacgaaggtactcgcagcacttggagcgcagaaccggccgcgcccggtgagtgtggaggggggggacctgcgggccgaggaagggtgcccactctagatggctcaggatgcccgcacttttctttgttcttgggacaggagggatcggggagcctccggtcctgggaagccccccggggtgcggggtgggaggggctccgcgcagccagcgccgccctggccggacctcagcccccgccccgccccccggggcactcccccttcaccgcgggtgaccttgaactggttgccgttccgccctccgttgcccagccacacggtcccagtctcccgactacagtctttcgttcccgatcggggttcctcccccgcgcgcagcccagtcgtcttcctcccctgccaggggcagcgcggcgccccctccccgggactccgggcggcgctcccaggcgggcccggcagagggcgcgcccgagctgctgactcaccgcatccccgagcgcgcgcgggcgcagccggggacgccgcgtcacgtcacggctcgagcgggcgcgcctcggggaaacgggttctgcccgcggccggcgggtgggcgcgcggggcccccggcggcagccacccggccacgtcaccgaggtgcgggcgccccgccccggccacaactccgcccccacgcaccacgccctccccggggccgcggccctagcctcaccgtcgcccgcccgccccgggaccccggccacgaggcgcggacttcgcgctcccgcttccgctcgcggcttttcccggacgaaggcggcggggtggccccacgacttcctgcccctcccggcgccgggaacaatggcccgcgccccctcccgctcccggccgctcccttgggatcgcgaggggtaccagacccgtctccagacctgggtcccgcgccccccggggcgcgcccgccctttgttgcgggctccgggcgcttatgaatggctgcgggcgcgggcggggcgggggcgggcgcggagaggcgccagccccgcccccgctgcgctccccttggtcgcctgggcgctgggggcggggcgagggggcgggcccggctgccacgtggggcggtgccgcggcggctctcataggcccgggctcgcggccgactgggcgctcggcgcgcggcgattggccggcgcccggccggcggagtaagtagtgaatgggagggggcggcggccccgccccctggaacgttgatacattataacttttttttcttgttactttcacccccagatcctccgagcggcggcgacggctgttgctaagggaggggacgcgcgaggaagcgcgacccgggcggcagacggcacccagcgccaccagccgagcggcgccccctccccaggacccttaaccgcgccgcgtcccggtcgcgcccgccgccctttgaaggagaagcaagtgccgtccccacccccggaaggcgccccc

SEQ ID NO: 20213 - DNA, 2300 bp, Homo sapien
agccgggagggagagctgggaggcggtcggttctgagtcatcccagcctatgtcacttctcagaaacctccgccacccccccccccatcccggccactggggagagcagggctctggcccatacccagagcagggggcttggcgaggacagggtgagattcaacccacacccaccctgaacgggggcagattgagggtttctgtgcttggagcaggttgtgccctccgggactccagccccagggcggtcagggccccttcctgcagccttgccacagccccctaggcctccgccccgcccaggacagataaatatttatcttgagaaagcaaaggttaggacagaagaattcgtgcaggaattccacccacttgctggccctggtgacttagctgggagggggcctgaggtggagcccctcccgtatccacaggcagagaggatctaggggcccatgagggtgggggaaaggcaaagtgaaggttgtttgaggtcagtgactgccagctgggccccgccccctctggcctcagtttccccttgcaagaccgacctagttggccagggaggggcaggcccccgtctgacccgcctctgtccccacagcccccagcggcgcccgggccgggccgggctggcggaggaggcttccggaaatacagattcattttatttaagcgtccgtggcaccgacagggaccccagagcccagagaggggcggcgagaggccccaggtcacagcgcggggggactgggccgggctgggctgggggcgccgcaagctggggctcccagctgacggaccgctctccttgcaggtcagtgacttcctgtcgggccgttcgccactgacactggccttgcgtgtgggcgaccacatgatgttcgtgcagctgcagctcgcggcccagcacgctccactgcaacaccgccatgtgctggccgctgcggccgccgccgctgctgcgcggggggaccccagcatagcctcccccgtgtcctcgccctgccggccggtgtccagtgccgcccgagtccccccggtgcccaccagcccgtcccctgcatctccctcgcccatcacagccggctccttccggtcccacgcagcctccaccacctgcccggaggtgagcctggggaagggaagggtgacccttggttggaatccaaagggtgggccgtcctggggaggtcttggggaggacaaggactcttagtcccaggtgagtcccttgtattaagggctatcctgtgacctcgggctggtgggtgatcccccagcctagattggtggggtatttctagatcctgagttgacggtcatcgcctgacatgacctggaccagtagatgatctcttgatctttgactcatgggtcatctctgtgtcctgggttggttgtgacctcgtgaccttgggctagtttatctctaaaccctgtgttgacaggtcatctcctgacctgggctggtgggtgatctctggtccctgggttgctggtgatcccctgatcctggaccccgtgctcatgtgccccttcctcccatcagcagatggactgctcccccacggccagcagcagtgccagtcctggtgccagcaccacgtctaccccaggggccagccctgccccccgctcccgaaaacccggcgccgtcatcgagagctttgtgaatcacgccccgggggtcttctcagggaccttctctggtaggtgtcacagcacatgtgtgagctcacgtgtgtcccgtgaccctgtgcatttggggtctacatccacccacaggcgactccacatattctgggcatacacaggctgtgtccgtctgctcacttcacatgtcccccaggaatcccccacacacacgcctggccctgcccggggggccgcgggtcaccaggcgcctgcatactggggacgtgtcccgctcccgccccgtggtccctcgtgcacatcagcccacatgtccacgccattgcctgagctcatgagctcacacccgtggacgcccgtcctggacatgcgggactgtgcccgtgccgggcactcacggccacctctgcccgcaggcacgctacaccccaactgccaagacagcagcgggcggccgcggcgtgacatcggcaccatcctgcagatcctgaacgacctcctgagcgccacccggcactaccagggcatgcccccttcgctggcccagctccgctgccacgcccagtgctccccggcctcaccggcccccgacctggcccccagaactacctcctgcgagaagctcacggctgccccctcag

SEQ ID NO: 20214 - DNA, 2300 bp, Homo sapien
acatattctgggcatacacaggctgtgtccgtctgctcacttcacatgtcccccaggaatcccccacacacacgcctggccctgcccggggggccgcgggtcaccaggcgcctgcatactggggacgtgtcccgctcccgccccgtggtccctcgtgcacatcagcccacatgtccacgccattgcctgagctcatgagctcacacccgtggacgcccgtcctggacatgcgggactgtgcccgtgccgggcactcacggccacctctgcccgcaggcacgctacaccccaactgccaagacagcagcgggcggccgcggcgtgacatcggcaccatcctgcagatcctgaacgacctcctgagcgccacccggcactaccagggcatgcccccttcgctggcccagctccgctgccacgcccagtgctccccggcctcaccggcccccgacctggcccccagaactacctcctgcgagaagctcacggctgccccctcagcctccctgctgcagggccagagccagatccgcatgtgcaagcccccgggtgagtggccaccctcgggggtcctaccttccccgcccgcctgggcttctcaaggcccctctgtgtgagctggtgggctcaggagcagctgacctgcccaggggctgggggggatggcagctgccgtggccactgctctgctccagcccggagagaaggcagcatgtgtgtcagggcacaaagtgtccttgtgtgctcccggggggccacaggcccacttcctcctgccccacccccacccggggcatcatctccagatggcatttggtgcctctgtgaatggccaagtcaggcctggcaggccgaggcggggccagagcccacccctaagcatttcagtgacttggaaaagcagcgaacacaacccccctgccagcctggccccagctactcccaaacggcgggttactccctccagagtctcaccagaagatggctactgtactgcccttgggctctgcacccgtcgcgggggctcctcccagctcagtttaaaagtgggaaactggccgggcgcggtggctcacgcctgtaatcccagcactttgggaggccgacgcgggcggatcacgaggtcaggagatcgagaccatcttggctaacatggtgaaactccgtttccactaaaaatacaaaaaattagccaggcgtggtggtgggcgcctgtagtcccagctactcgggaggctgagacaggagaatggcgtgaacccagaggcggagcttgcagtgagccgagatcgcgccactgcactccagcctgggcgacagagcgagactccgtctcaaaaaaaaaaaaaaaaaaccaaggtacaacccccaagtatctcccctcggatcacagaagcggccaagccccctccatgtaggactccaggaagaatgaggcaggacagtcctgacctccccagctcatggctgagctggagaattagaagccagctgcgtagctgggactccaggcaaacaccaccatgcccagctaattttgtaatttttgtagaggaggggtctcgctctgtggctcaggcctgtctcgaactcctgaggttgcccaggcctgtctcgaactcctgagctcaagcgattctcctgcctcggcctcccaaagtgctgagattacaggcgtgaaccactgtgcccggcatggtggatgtccttgactgtttcctttgctgacctccctccagggagggcaggactgtgtctgacctcaggggcatttgctggggtctggggtggtcctctgtgttcagcaggtggaggctttgggagtcacaggccactacctcctttgcaggggaccggcttcggcagacagaaaaccgcgccacgcgctgcaaggtggaacggctgcagctgcttctgcagcagaaacggctccgtagaaaggcccggcgggacgcgcggggtccgtaccactggtcacccagccgcaaggccggccgcagcgacagcagtagcagcgggggcggcggcagccccagcgaggcctccggcttgggcctcgacttcgaggactccgtgtggaagccagaagtcaaccctgacatcaagtcagagttcgtggtggcttaggatcttcggatcggccaccctcgcccctcgcaccccagcccagggcggcggggactccgagagccccggagagaacgtggcccagccctggagggcaggcggccactcccccagccagaagtctttttttcttttcttcttttttattatttttttctttttttaaaaagttc

SEQ ID NO: 20215 - DNA, 2300 bp, Homo sapien
tcgcggtgagatacctgggagtcacgggtgctcgcagacgcagctgaccccagaggcacaggtaccgacacaggtccacacctggaagccggtgcacagtgctcggcacagatgcaaagcggcaggtgtgcgcaggtgcgtgtcaacgccaccctgggaacccaggatggctgcggacactcacggagcccgcacccaggaacccgctcgtagtaagcgcttaataactaggcactggctgaatgaatgaatgaatgaatgaacacggcgcttcgcaaaaccaggaaaaggcagaggctcacagaaccagggaacgatgggctggggggagcggcaagaattacgcaattatgcaggggccgctgtgactaccaggcaccccctccaactccccccctacaagggctgctctgggtcagagaacgtccaccgcgctgactgctggggctgggggctgggggcgcagatcagaaagaatgggcctgaattgctcccaggctgggcatgtggcgcccgcgtctggggctccagtgggtgggtggcccctcccgcatggacggcgggcgcaggggagctcggtgctgatgtctctctcctttaataaccaccctgcgtgagtggctgacgcagcagccggctgccgctgacggggagtggggcggctgtagtgggggggcccgaggtgcagagggggtggtgatgaatcacacagctgctgcctgggggagggggtcttgagcccatgaggggtcccagagaccttgtcactggagacagcgcccctggctacccccacctcgatccacttgagggtggaagtgagtctgaggtcaggagtggggccgggatttccctgggatgagcagcaaagcgggggtctctgtacgccaacttcccccagcttgtcagcagagggtcatccctccgaagactttctggggcagagaggcaggggtccgcgctggcttcttccaccagggctgggggaggcggcggcatgagatgactcctgggcgaggagcaagtggtggccatagagggccccccagaggctttggggccgccgaagagtagtgagtgagggtccttgtaaagctggttctccagatggcggcggctttaagactcccctccgccaaccaggctcagtaggggaggcctgtggaaggagagaaaaggcctgggtggaggagcagagtgggcctggccccgcgtggggagcgagtgcgccgttgctgtgcagcacggtgggaggggaggccgagggccgggcggagtgctggggtgcagtggggactcggggtgtccgcctgcacccgacagcagggacgcacaacactatccggccaggcgagtgtgggggtgtgggccacgcacccagccgtgataatcgcggttccagtgggagttaggcttgggtgcgggttggagtttgtaggcaaactgggttgcgtaaagttggggtgcaccaaagtgtggcgatgtaggaagaattgggattgcgaatattggggttcgcatgaatggggttgtctctgttggggttttggtgggcatggggttgatggcaggaatggagtgctggggtgctgggaaaactgggacgtcggttgtattggcaagaatatcacgacaggtgtcggggttcagatgaagttgggatgtctgacagccgggtcttggttgggtaggggatctgggctaggttgttatgtcgggactgctggagcacaggcaaagtcggggtcccagtgacacccagaagtccccatgaggcctgaggcctgggaatcggggctagaggcccatttgttccccgccgcaggccagggagcaggcacgcgtaactgggtcagccccgccccgccccgccgcgcgctggtcacgccccctcgagcgcgggtggaggactgcggactgcaaacgtctcggccaatagtcgagcccgacaccagtccgcgggagggggcggaaccgagatagactcggcccccagctcatgaatataagacgcaggcgcgccctctgattggcccaggatgtgtagggggcggggcccggcggaagcgtatataaggccgggctcggggacgcccccccctcactcgcgcgttaggaggctcgggtcgttgtggtgcgctgtcttcccgcttgcgtcagggacctgcccgactcagtggtgagggccctggctgcaccggctccgaggagctcggggcggcgggcggcctgcggcggccaggcgaggcggggccgcagcggcacgcccctgggagggggcgggcccggggtggagtccg

SEQ ID NO: 20216 - DNA, 2300 bp, Homo sapien
ccagaccagggcgcggcctgcggccggggagcaaccaccccccacagccgagggaggctggcctgcggccacacatgcacctagctgactgcccagcgggccctcgctctcccttgcctttttggtcagtctcatttggcttttgcgtcctgcgatagaaatggctctgagaggacagatgcgcctcttctgggcaagcacagtgacaaggtctgagtgtccagcctaaagtgcttggagagggcaccaaggtgaaccgagctcccaccgcaggccacagcagcgtggcgccctcggagtgtgacttaccgtaactgtcataactgtctctgtaggacccgcccgagctccggtcactgtagccaccactctgactccggctgcaagacagacaaacgttgagtaccggaaggtacccgtctacttctgctctgccacaacaggctgagccgccagcccccatgccagccgtcccttctggggacacaacaaggaccccagcagggcagcatcttggaaattgttcaaaatctccaccagcctgtcccccaggccctcccgcttctgcgaatgtcctgagcagtctcctctcctcttggcctgggtccccacctgcctctgctccttgcccagccagtctcatctcagctcccccagggacctgggacccgggacggaagctggccatcccgcaaccacccctgtgcttgggccggcctccccctcacctgctatagtagtctctggagcctccgtagcccccactcctggactcgaaccggttccccccatagcctcggtcccctcctcctgcacatacaggaaaaagtgagtaccagctcccaccagcagtacctcacagcatccccaagggacccactcatggcactcacctctagagaacccacggccccgtcctcggcccccacggaagaagccccggcccccggcagagccaccacggtacccacgggatcggttgtctgacgacttgcctgcctggtctactcggatctgccgtccatctacagactggagacagagggcgggacgggttagcaggtgggtgccccatcctcgagacgggactcctgctcagcaccctgatcctcaccttcccattcatggccatcatggcatccttagcgtcgtcaatgttctcaaaggtgacaaacccaaatccccgagatctctgggtctccctgtctttcacaaccaccactgtgcaggggagagaggtctgcagtcagcacccagctgtacttccaggtaggaggagcacaagcccccccgcccagggccgcgggcccagcagcagcctcaccttcagagatctgtccgtactttgagaagacctgctccagcgactgctcattggtgtcaaaactcagccctccaacaaaaagtttgccttcatctgatgccatggcggcctgtggcagacaccaatgaaatcctcaacaggggtcatctctcaccacctctccccgcttcctattttatgtaaatgacatgtgttttttaggggaaatattagaaaatcagatttttatttttcattatctcaaactcatacctaggacttatttttttggggtcgggggcagtgtgtctaactgtcacccagactggagtgcaggggtcactgcagcctccacctcctgggctcaagcaatcctcctacctcagcctcccaagaaactgggactgtaggtgtacaccaccacgcctggataatttttttaaatttgttttagtagagatggggtcttgctctgttgcccaggctggtctgaaactcctgggctcaagcaatcctcccaccttggccacccaaagttttgggattacaggtgtgagccaccgcacccagccacctaggacttcttaattcaaataatttactccatccacccccaagactgaaggcaggccgcacccatttccacaatgggtgtctcccttcccccacagccttccagttgtgccctgggcaggactgcactctcaggttctcctatttccgaacgggtgccaactcctaccctaaccaactgacatctacttgttgctggaccagaacgtgcttctgctcactgtaaaatgcctcctgagactggggggggggctggctgtcagggaggccgccccgtcctggggggcacctcagggcaggtactgacttccatagccaggacctaggccgggaatcgggaagggatggccccggaagtgataaggcaggatttccaggcaggggaagtggcatttaggagaactggctatttaagggggcggtc

SEQ ID NO: 20217 - DNA, 2300 bp, Homo sapien
gctggactgtgcgggcagcttagcagggacagtggacgtgcacctgacgctgacctggactgcctcagtctagaagcaggccagagagcagaggcacgtggcatcccagggcgacctcagacggccagccggttagctagttctgctgttgcttcacgagttctgagcattctctgctagcctatggaagctgcagccctcggaggacagaagtgttgtgcgcccaacagaaccctctgagacgcaagctgctcccttggctagctcatatgtggaaatagccctgtaattcgaggtaactccttccgctcgtgtccacatccctcttgttgagagctcactgaaagtcatgtgcccggggaatgttcctgtgactgttttttgtttttccttttttttttaactttgtttttgtttttttcaattaagctggaactaaagtcaggcccagccattacgctccccacgtgcagccaggtgcagcctgggcccagtcatgcctggctcatagatgaaatcccttaagcaggattgaagaccagtgaacgcccccgccttttggattttttgctcaattgaccgtcttttccagacctctttaagtcacactcttaacttagctttctctgatgtctgttgccgccattagtttttttctagagcccacactggcccacatagctccatcccatacgggtagctggctccagctgcgccaaggtgcagacccgccctgggcatgctggcctgtgacggagcctgaggtcacagccccctgactagcctgagaccttcctaggggctgtggctgtttccggggaggccgggaggggcagctgtgagccctgtggaggacgttgggagtaacgctgctttgctttggcaggttgaaggggcccggccaggactcggggaagggtggcctgagagcagcgatgacctctggggtcactgtcccaggagggacttcacctggaacaagagctggaggcagccgcttgcccaggaggcttgtcccctgtaagtgctttcgggaagagtggcatgtggcgctgagccctgtcccgggcggcacctgggcgtttcagtgagtcctgctctcccgcacctatggccccatggcgggcgcctttcggtgtgtgttgggtgcagggcagcgcctcccgggagcgccgggtcccccgcctggagcccgcgcctgttctccctcccttcctcctccttccaggaggcgcttcgccagtgaggtgcgggctcagggcctcgagtctctcctggagcacgggctgcggtgcgccggcagcttacggggcggccagtccttgcccacaacgatgtggagccctgtgaaagtcggattcgaataaagggccacgtgtgcacccagaaagccgagtctgtggttcaggggggtctgtcggcggagcggggccactggaagaaaagcctgcggacctcggttcagcgcacgagtaggacccgacagggaagactgcaagggtcattgtccgagcagtgaccgcggggggctcgccactgagggggttcgcagcgcggagactccagtctcgcgggatctgaggcgcactcggcttcgagggagcggcggccgcgcagccgctgtcaggccccgtcttgggccgagtcccgggttccctgtagcaggcttgggagcggggcgccaccttcctgggccctggacgtggccgacgcgttctcagtgtccgtgaggccggggcaggagtggcgggggtcgccccgaagtgggtgggaatgagcggcccgaggtcctgaagtcggggtccgccccgtctccccgctgccagcccgatttcctcggaagccgcgaccccccacgctgggctggcagttctgggctctgccggctgcgccttgccgggactcccacgggcgggctccgggcctccgtcctgatcccttggagcggttcgacgaagcaagttccgcggcgggcgcgcggggcactgtgggtagcgccggggctcaccaggcggaggcggggcccggcgtcaagctccgcctccgcgccccattggctggcatcacctccgcgcgcctgactgacagcgcgcataggggcggggcgccgccaccgcttccgccgggccatggggccgcgcgtgctgcagccgccgctgctgctgctcctgctggcgctgctgctggcggcgctgccgtgcggtgccgaagaggcctcgccgctgcgccccgcgcaggtcacgttgtcgccgccgccggccgtgacgaacgggagccagccgggcgcgccacacaacagc

SEQ ID NO: 20218 - DNA, 2300 bp, Homo sapien
caattgaccgtcttttccagacctctttaagtcacactcttaacttagctttctctgatgtctgttgccgccattagtttttttctagagcccacactggcccacatagctccatcccatacgggtagctggctccagctgcgccaaggtgcagacccgccctgggcatgctggcctgtgacggagcctgaggtcacagccccctgactagcctgagaccttcctaggggctgtggctgtttccggggaggccgggaggggcagctgtgagccctgtggaggacgttgggagtaacgctgctttgctttggcaggttgaaggggcccggccaggactcggggaagggtggcctgagagcagcgatgacctctggggtcactgtcccaggagggacttcacctggaacaagagctggaggcagccgcttgcccaggaggcttgtcccctgtaagtgctttcgggaagagtggcatgtggcgctgagccctgtcccgggcggcacctgggcgtttcagtgagtcctgctctcccgcacctatggccccatggcgggcgcctttcggtgtgtgttgggtgcagggcagcgcctcccgggagcgccgggtcccccgcctggagcccgcgcctgttctccctcccttcctcctccttccaggaggcgcttcgccagtgaggtgcgggctcagggcctcgagtctctcctggagcacgggctgcggtgcgccggcagcttacggggcggccagtccttgcccacaacgatgtggagccctgtgaaagtcggattcgaataaagggccacgtgtgcacccagaaagccgagtctgtggttcaggggggtctgtcggcggagcggggccactggaagaaaagcctgcggacctcggttcagcgcacgagtaggacccgacagggaagactgcaagggtcattgtccgagcagtgaccgcggggggctcgccactgagggggttcgcagcgcggagactccagtctcgcgggatctgaggcgcactcggcttcgagggagcggcggccgcgcagccgctgtcaggccccgtcttgggccgagtcccgggttccctgtagcaggcttgggagcggggcgccaccttcctgggccctggacgtggccgacgcgttctcagtgtccgtgaggccggggcaggagtggcgggggtcgccccgaagtgggtgggaatgagcggcccgaggtcctgaagtcggggtccgccccgtctccccgctgccagcccgatttcctcggaagccgcgaccccccacgctgggctggcagttctgggctctgccggctgcgccttgccgggactcccacgggcgggctccgggcctccgtcctgatcccttggagcggttcgacgaagcaagttccgcggcgggcgcgcggggcactgtgggtagcgccggggctcaccaggcggaggcggggcccggcgtcaagctccgcctccgcgccccattggctggcatcacctccgcgcgcctgactgacagcgcgcataggggcggggcgccgccaccgcttccgccgggccatggggccgcgcgtgctgcagccgccgctgctgctgctcctgctggcgctgctgctggcggcgctgccgtgcggtgccgaagaggcctcgccgctgcgccccgcgcaggtcacgttgtcgccgccgccggccgtgacgaacgggagccagccgggcgcgccacacaacagcacgcacacgcgtccgccgggggcgtcgggctcggcgctgacgcgctccttctacgtgatcctgggcttctgcggcctgaccgcgctctacttcctgatccgggcgtttaggtgcgtcaggcgcacgtgggcgccgtctctcagccttggccaattagcgcgcgcctagtgcgtcacgtgccgggccgcggggtcctcccctccctccctccctccctccctctctccctgttggagtgggcgtgggcggtgctgtgcggggtcgtcacgtggtgtgggcggtgcaggggccacgggactcacccgctctccagcctgcgcctggggttggaggtgcccagcgcgccgcctcttaactcgggggtgacgctgcccgtttcccaggtggggccactgaagccggagcatgccgggcaggggtcaggccctggcggggcgagggggcctccttggctccttgtcgccggatgcccgtcctcgttctcatcttcccgcctgccgccaggcctttccgtggggtcccgatattttcctttctgcttctacccactgaagctggttcgtcgccagggt

SEQ ID NO: 20219 - DNA, 2300 bp, Homo sapien
gccaagaccccaggctcacggccccttgtcctgtgcttgggtgcagccgccacactctgctccgaaagtgctcacctccgggagtggccgtccccctccctaaaagagccccccaccagacggagccgcccgggaagcttctccagcctgtctgggctacagagccttgtgtggctagaacccaaggccctcactccaggggtgctgagagagcctgtccagagggcctgcctcagccaccacctgggacaggttcacgccctccactgaagagacacccggccagccctgggccttcgacctgggacgtctgtagtggggtcaggggatgagacctggagctcagaacagacgggctgagctccctggaggagagagaactgagaaccttgtcctggcagggacgctagagcactgggtgggacagacctttctggaagagcaagattttaacaggaagaaaaagtggaaggacttcccagcaggacccagcctgaacaaaggtcaggtggtgtggcccgcgtggcccgctggggaatcgggggaggagggcacgcaggagacacaggacagagcccaccacgtctcagagctgtgggacggtggtgggtccggtccccaccccaccttgctggggcacaggttagcttgcccatctctgggttcacggtccctgccaggagtttgggtaatgcctcacacagggaccttcgggtccaagggctgttggtgcttgccctgcagttccctctcctgcactgggcctggtgaatgacactaattcagagacgtacaacacgatctgggcatcgccagcaaagtccagccagcgtttgatgacagcctaccctccacaagctcagagtctggtgagggaggctgtggcatgaataagggcaaaaacagagggcaggccaggtgcagtggctcacgcctgtaatcctagcactttgggaagcccaggtgggaagatcgcctgagcccaggagttcaagaccagcgtggccaacatggccagacactgtctctatagattggaaaaaagacaaagcagaggccaggcccccagttccccacctgtgtcagcctaccaggaggagaaatcactcggcgttccctgaacagatcagaccccgggtctttgcacaagctgtgcccccgggcagcggccctcccctgcctgcaggattcgtgcgtggagactgatttgctgtcggccggggcttcactctgggcttcttggatcccatccccagctgctcacactccacatcggtccacctactatgctcccggcacccttagggctgaggtgtagggacttactccatccccagggaacagcgtgggtccggagaggcgactcccaggagggccccagggaggtcgcagcccgagcagctttggactttggccagcgcccctctgaaactctgccccggcccccgcagggagactggagttggccgagcccgatttgggacgcgtgcgtcggggttggtgaggctgcggatagcgctggaaccgggcaggtgagaggcccgggacccagggccgggccgggtggagcgcgtgggggcgcgggaggcagggtgcgcccccgcccctcggagaccccaggccgggccacgcggatgccggcggggggcgcgcagaatcggggtcgctgggggcaggccccgggggacgagcctgagacggggtgggccggggcagggggcgggcgcaggctggagacccccgcccagtccccgcgcggccggggcacggcgggagggggcgcccgcggccctcccgacgctcgggcgggacaaaggccggagcccgggcccctccccggcgggtgcggcggcggcggcccgcgctccgacagtccgcgcggccgggtcctgcgcccggggcgaccccggcgccccgccccgccgccgcctgacttctcggcgcccgaggtcgcgcgcgcggaggcgggggcggcccgggatctccaagcgccgccgcgccctcctcccgcccgccctccgcccgcccgctcggcggcggcggcggcggcggaggaggcggagaaggctggcaggcggcggccgggagagcgagcgcggcggccggaccggggccatggcgcccgcgcagcgcccgctgctcccgctgctgctcctgctgttaccgctgccgccgccgcccttcgcgcgcgccgaggacgccgcccgcgccaactcggaccgctacgccgtctactggaaccgcagcaaccccaggtgagcgcggccgcgcgcggggggcgcccggggaccccccaacgc

SEQ ID NO: 20220 - DNA, 2300 bp, Homo sapien
gagacagagtcagtcttgctctgtcacccacattggagtacactgacgcgatctcagctcactgcaacctccgcctcctgggttcaagagattttcttgcctcagcctcccaaatagctgggattacaggtgcacactaccacgctcagccaatttttgtatttttagtagcgatgggggtttctctatattggccaggctggtctcgaactcctgacctcaggcgatatgtctgccttgacctcccaaagtgctgggattacaggcctgagccaccgccagctcagatttaacgtgagaggatatcagagacatagttcttgccaaccacccacagaccaccacccccattttatagacaaactgagacggctgagcaaggtggatcctacctgtgatcccagcactttggggagccgaggtgggaggatcacttgagcccaaaaggtcgaaaccagcctggccagcatagcaagaccctctctctacaaaaaataaaaatcttagccagccatggtggtgcgcactgtggtcccagctactccggaggctaaggtggaaggatcatttgagcctgggaggttgaggctgcagtgagctatgactgggccgctgcactccagcctgggccacagagccaaacttcgactcaaaaatgtaaataaaaataaaaaacaagtgaaaggtgaacattctcaacttgataaaggaaaaaaaatcagtcgctgaggttgctgggatcgaccgaagacacaaaccttctattcccgcaaatgtgagaaggaaaaagaagttagagccggctttgctgtcgccccttccccttgaagagtcggggccagtgcgtgacgaatgctgctgtaagtcttttaattttttccttttttgagacgaagtcccactctgttgcccaggctggagtgcagtggcgcgatctccccttactgcaagttccgcctcccgggttcaagcgattctcctgcctcagcctcctgaatagttgggattacaggcatcgccaccacgcccggctaatttttctatttgtagtaaagacggggtttcaccatgttggcaatgctggtctcgatctcctgacctcatgtgatctgcccgcctcggcctcctgctgggattacaggagtgagcctgtatcttttttatagagatggggtctcgccatgttgcccaggctggtctccaatccttgggcttaaaggatctgccaattcggcctcctttgcttttaaagaactgtgggggctggcgaggtggctcaggcctgtaatcccaatactttgggaggccgaggcaggccgatcacctgaggtcaggagcttgagagcagcctgatcaacatttagtattctctactaaaaatacaaaaattagccgggtggggtggcgcgcacctgtaatcccagcaggaggaggctgcagtgagctgagctcgcgccactgcactccagcctgggtgacagagcgagactccgtctgaaaaaaaatcaaaaaccgctcagggaaaggcctgacactgatggagcgaccgctccggggctcccgccacccgcggctgtttccggtgccccccggggtcttgggaccctcccaaggtgggtcctgctctagttcagaagcttatgacgcctttgcggggatgcctggctttgggatcggttgggatctgctggaattgggtccgtggcgcgcagctcccgggctgggaggtgccgtaggacctggaagattctcgaaagttctggaaggttctctcagggatcgccgcgggcgggggagcctgttttcccaccgagacccgcgagggcggtgtccggggtctgactgcaggacaaagggccgggagcgcgggagggcggcgcccgggagcggccacacatgccccgccaaccggtctcctcaggcagcactcccgggaaaaaggggtagacgcgcggcggaaggggcggggccggcgcgcggccgtggacgccggagagggcgaggccggcgctccttgggagcgcgcgcgtcccattgggcagcgggcggaagggggcggagcttggcgccgccgcgaggcaagccccgcccccggccccgcggggagcggcggcggcggcggcggcggcggtggcggaggcggtgagcgcgggcggcgcggacggcagcggttggcgggcgggtcctccgctgttgcggccgctgcggcctccttgcccgggcttggggcgccgcgctggggaaagccgggggcccggtgagcccgcgggatgcgtcccctcggttccgccgggcggggc

SEQ ID NO: 20221 - DNA, 2300 bp, Homo sapien
tgcgagttcatttctctcccactgaaccgagacctggaagggaccttcagaagtgtcacgttttcagtcctctatcttaagaataacctacacaaagggacgagagactcctgggaagagacggcccagccctccctgttagagcattactcctgtcacttacctcaagcccttgtcctcctgtcccctcgcggggagtgagggatggcccagtgagccgaggggctgcgtcgccattgctcgggtgtggccacgtactgtctcgcggcttccgttggtgatggcgtttggggggctgtccagggaggcagggccttcagcccaagagtgaactgctcccgcgcccctcctgtaagtagctgcttgcactagaggaaaacctgcctttaggtgcccctgagcatctacgtggaagggactagaaatgagagacccaaagatctgagccagccgcgaacagaaagtcggcttcgcaaaccaagtcacaagaaccagccccacttgagactcgcccgtgaaccattcctcttaaccaagtcttgtttttcttttctttaaccttctagtttcagaataattatagattcacaggatgttgcaaaaatagtaaagggaggtgagggggcttctcacccgggcttccccactggcagcatccgtaaggcgcaggatgtccccggccaggaagctggtgcgtgtgcagcctcgggagcgccattccacgcacacttgcgtgccggtggccttgttatgtcgttctttttttgtctacactgtttgagtgcttttccatcattgaaagggcttcattacagtctcacattttcccttttttttgcctaatgctaatggtcagactttttaacagttttccacatgctcttctgatccttttcctctggggtgagcagtcaccactcaccaaaccctgccccacccattgggcacctgtctggatggtcccaggaccgcaggtgctgtggggcacccattggggacttccaggaaatcatttctgcaggatccgttcgcacacacgaagagcacagtgccctcgggaagggccctttccgaccacgctgccccactggggttgggtcaccgggacatacagaggctggtgctgcctggcttctcctgcctgcggtgggagctgggttttgctcccgtttggttttgttttctacctgtcaggctgggcgtctttctgagggttccctgaccggcctctgaattgattgtttgtccacgtgggcctggaagtttctcttaaagactaaatgcccctcactggggaaacgacgctgtgccatgttcacagcagacactcaccccagtgggcctccctttttctctggtcacgttggttacttcataggcctttaggttttgatctgtgtttatggaccacggcacttccttccttccacagtgcggtcagacacaggctttgtgtgtctaacgacagactgtttccagtagtttttctaatactttagttttaaaattttaaataattcacttgttttttggcattgaaaatatttcattcataaatagtttctagttatgatttaaataattttcccatttttgactgtagtttcccagaatcctctttagaatctcagtccttgtgtttgggtcttctccgcgtgccattacctcacctctgttttgtgccacacactctttaaaagtgtcttcccgcggggtttagagttaggaaagtcgcgcacacataggacagagccccagccgcccctcgtggcacccctcccatcccaagggtgcgtttgtcgcagctgggaacccagtgcagcaccccactcagctgctggtttcactgtctcatcattggtggttagactcaagtagtgtggggtatgtgaatctgcctttcagattctcctgatcttttaagcgaatgacacaaagtcaggttttaacaatatcgtgctaactgtgttttctcaggctgttacacctggtgcttgatatggatttgacttgtctattcttttttttttgtttttcttttttctttaattctagaaccacgttcgtttgaagtaggaatgctagtctggcataaacataaaaaataccccttctggccagcagtggtaagaacagcttcctccgtcttctcagatgtagttacttaaatttcatgaatttttattccatccatctttagttcttgataatttgatcaggataaatgttttcattgttttgtttttcctgggaaaagttggtgggtttttagaaaagacttcaggagatgcctgtaccta

SEQ ID NO: 20222 - DNA, 2300 bp, Homo sapien
agagtgagactccgtctccgggggaaagaaaaaggaaaaaaaagaattgtgatttgctcattttaaatattgtgcatttcaccccatgagagctcattaatttggattttgtggtggggttggttgcatgtgtacaaacaggaattcgaaatcctgtccaagttcccggtgtgggtgatgagttcaagccggggcagattctctgcttctgtctctgcaggcctggaagttgcaggtcattggtttgggtgctgtcctggccttcgcctctccttcatatcttacccctttttccctttatcctcctaagacacaaacgccaaaaggcgttggccctgcagtaatccagagacgcctttgttgctctaatgactgacctcactcgagtcacccaggctccttgcatgtgactgattgtggttccgggaaaccggggattgaatctgtgtggtgttcgctggggaggttcaacacgtttatggcctagctgggctccttgtgtcgcctactggccggcggagatggaggccgggcttctggaccctccgccctcccttggcactggtttcctctcccgcaccttggtagtctttcccttgttttcatcagtttctggggtccctgctgggttaacaggtcactgatgtgacaggttcctggggcataagagcaggcagcctccctgagagcgcagggcggaagggccatcggaggcgctggtcgccactgctcctcactgccttctcacggtggccccgggaggccaggactggggaggctgtggggaggtggcagcgccctgtagtccctgcccctccccgtgtggcctgggcttgttcccgagcctttctgcacttcctccactcacccagagcattaggaggacaaacctgccctgctgagccgctggagaatctcaggacgcttatttaaagaggcagctggcagcggtagctgtggttctttttattcaaaaacccaaacaaaactggctgattccgctcagatgggaaaacgttcaagtgatgcgtgtggcagagcatggggccgtttctcagcgcctccttgcgggagacttcgctggggtcacccccagagctggggtcagcgcctgttagatgtatcatgtgatgtcacaaaaaaatatttaaaatccacgatctcttttgttttgacgttttattttcttggatttgtgaacaggtcaaaagcgtcaggcagagagataagaaagcaagtgtgctatacatcgaaggacacatgaacccgaaaatgaaagggtaacccgctgttcttggtttctgtgaatgggcctgaggggccaggccggccgctctcagagtcagagcgggcgtggggatggagggacagaggggaggccccggcaggagtccaggcccgggcagggctagtgaggtctcactggaggtgtgcccttcttgtggcctctcactccctgggatgggtgagtcagacagaggctgggtgtgaagggtctggtcaaacaccccagttttcacaacttgatttgctggctttgaaaggcagcccaaccagacactcactggggccctgtttcccacaaaccagcaaaatgtccacgcaggtgtgcagacagcatccctgcgtccacctgagtttgcccctgggttacctggtcgttccttagtcatgggatgaaagcacacgtggatggatcagccggctgaaagcagcctttagaaccatcgcattgcatatccccaagtcgaacgcgcagaaccggtgtcatctggtacttctgtgctgcccccgaggggtgggaggtgtggagtggagacccaggccccgaggtcggcctgtcctggcggggcccagtcagtgttgctgaagtcactggacccaccatggtgcattgggagcttcttggcagctggggaaacggtcaccttccataaataagctggggctggtggggcctccagcggcctccactgatcttaatcagagacagggaaaggtttttagcttattagaggaagttcattcatgttaacttttccctctctctgcttcaagtttcacagtgtctcttaaaagtttaaagcactttgattgtaaagagaaacagacgcttctggtaggtggatgatgttttgtgcttgctttaaatggtttactttgtgattagtaaatatgtcctctgtgtgtagctcttgaaatccatggctgcggtgtacgcgtgtgaatgattgtgggaagtagcagagccaggctgcgctctggccgttagagttagatcgtgggctcagtcactgcgc

SEQ ID NO: 20223 - DNA, 2300 bp, Homo sapien
acagtgtctcttaaaagtttaaagcactttgattgtaaagagaaacagacgcttctggtaggtggatgatgttttgtgcttgctttaaatggtttactttgtgattagtaaatatgtcctctgtgtgtagctcttgaaatccatggctgcggtgtacgcgtgtgaatgattgtgggaagtagcagagccaggctgcgctctggccgttagagttagatcgtgggctcagtcactgcgctgaattctcacaactgtcctgggaagttgcggccccatttccccgctttacgggtaaggaagctggggctccggcgaggacagtttacccagggccaccaggcaaggctacagcagagagcctctgcgcaaggccaccgccttccctggccgactgtctcagtccaccccatgtcacggtggcctcggtagccagccccttgcggccgggggcgtccctagctcagcgtcgggagccctgtgggcgctcaagtgctgcagtgagcctggccgataccacgtggcagacgtcttgctgcagagtggcttcctgctccctggatctgcagccagctttcatcatgtgctgtcgatgaactgcaagggatttgtctaactcagaaatgtctatttcccctctggaaatactcattttgttgtggcgacttccagcaccaacacgtcaactcagtgcagttatttttactcctctggaaaaaaagaaaaagtggttgtgtcttttccactctcagggatctgagttactttcttttgttttttttgagacggagtctcactctgttgcccaggctggagtgcagcggtgcgatctcagctcactgcaacctccacctcctgggttcatgcgattctgctgcctcagccttccgagtagctgggactacaggcaggcaccagcacacccggctaatttttgtatttttagtagagacggggtttcatcatattggccaggttggtctcgaactcctgacctcatgatccgcctgcctcagcctctcaaagtgctgggattacaggtgtgagccactgcgcccggctggaactgagttactttctaaaaatggatgaaggtgtggggtgaggagaagagcaggaagttccgtgccttaaacgcagaagggctgccgtttatatcaaaaaccctgggttctgagagcacagggtgcccgcttcttcttcctaagagtgcgctcacatctgcttgtgagtcaggtatgtggtggtcccgaagcccacttgattcagtggtagtcaccgtggcttctgagggatgatattggggaagccgtgctttaggaaagtgcgggggctgctgggcaggcagagagcggcgtccacccggccctgggatgtgcttatggggtgcccccgtacccctagtggccctcggctccagagtcttccctgggtcattgtgtgatggtcgtggctttatggcatctttgggacggctgtgtccttttctggggacccaccctgctgccagcccaggtgctgttagagcagcccaggtgctggcctagcctggctgcagacgatagctcccaacaaaaacggctgttagagcagcttatttccaggacttgatgtcctgtcatgtggcacagtggccacaggggaggtgtttgcaccgtcgatgcgttcagaccagcccaagccttcgggtccccggtgcccacctgcgttcagaccagcccaagccatcgggtccccggtgcccacctgcgttcagaccagcccaagccatcgggtccccggtgcccacctgcgttcagatcagcccaagccatcgggtccccggtgcccacctgcgttcagatcagcccaagccatcgggtccccggtgcccaccatttgagcagctcagggcccagacctgtgcctggtgcgtttcccatttaccagagggtccctgtgcgaggcgtctgccagagccccctttgtcagggagggtcagaggtgcgggctggagcgtgagcagcctggacacctggctggtccctgggctctgcgtggcttctgaacccagggtgcttggcactgcctcccactgacgcctgctgcccggatctcattgtagaatcaagccagggaggacttcaaccaggacatcggctggtgtgtctccctcatcaccgactacagggtccggttaggtacgtggggtgctggggaggggtggagctgggcagcaggcgtccagcctctgaagaccccttggacgggctgggccggagctgcctggaggcggggcatatttccgtgggcctggggcattc

SEQ ID NO: 20224 - DNA, 2300 bp, Homo sapien
cctcccaggttcacgccattctcttgtagccttccaagtagctgggactacaggcgcccgccacgacgcccggctaattttttgtatttttagtagagacggggtttcaccatgttggccaggatgatcttgatctcctgacctcgtgatccacccccctcagcctcccaaagtgctgggattacaggcgtgagccaccactcccggccacagtttttttttaagcccataaatacttcagtgtgtgtctctaaaaggagggtgattctgccccctgggggacactggcagtgtctggggacatctgtgcttgtcacagctaagggtgcttctggcatggagtgggttggggcagggacgctgctcagcaccctgcagcgcctaggacagccccacctcagagaacagtctggccccgacgtccacagggccgagtgggagagactctgctctgaaccgaatggactctgttaaaaatgtgtttaccataatcacaaaagtaaaaaatagggatgatttcttaatgtcaggtatgtattgtgtattcaggatactcttttttttttataacaataaacttaaggccgggtgtggtggctcgcatcggtaattccagcactttgggaggccgaggcaggtggatcatgaggccaggagcttgagaccagcctggccaacatggtgaaaccccgtttctactaaaaatacaaaaattagctgggcgtggtggcgcgtacctataatcccagctactcgggaggctgaggcaggagaatcacctgaacccgggaggcagaggttgcagtgagctgagattatgccattgcgctccagcctgggcgacagggcgagactctgtaccagaaaaaaccgccaccaaaaaaaaaacttaaaatttttgagaaatgctcttgtgggtttgggtcttgccttttcttctctgcttttagtgatctgagctattgtgtctagtccgaaagatagtactgatttaattaagaaacatcattacaagcagggattcatggactaggtttgcaccttctgaaccatgagctagaccatgtctggaggctggaacctggtgacccaggctccctgcggccttcttaaccgcaggccacttggggccagttgggcagtgcctgctgctattgagccccgtgccctctcacaggccatcatctgtgcgatctctgcggtggacgaggtggactacaagacggctgaggagaagtacatcaaggggccttcgctgagctaccggtaggccgctcccggcgctatctccagccacttgcgtctctgccttgcagtttctatttccacacccacaggcagtttgactccaggctgccgcagcccctctccctcatgaggtggcccaggtgctgggtggtgagctgatcacatacgctgaactcaccctgtgggtcactcctgccccccaggaaggctgtgcccgggtctcccagctggtcgctgtgggcagcacggggccacgggcacgtgcctgggccgtgtctgttcttaatctctttttgcaggggctgatgtttgctttttgcactttcctcccctctttccacagccccatggctgtgtgagaaatacagcaagattaagcagcagcacggcccggtgctttccagcagccagaagaatgctgtgatcaagatgtttctctcacatccgtgtgcttagctgcccttggatgtttggcccccagagcgcctaatcctgtctctgggcatgcggccaggccttgctgggagccaggcggggcccacggggcagtgacaggctgaagactcaactagagtcaaggacagggtctccggccagggtggcttgcgcagccaccgacgtctcccgggcccacagtcacaggagactcctggtgaagacactgaactccctcaccagccccatgtcctccctgggcagggcaggaggggcccctggagaggccagggaggaggtgtggggcctcggtggcattggcaggccacccccgcagagctgcacaaaggtggaatttggccttgtttagggagtgttggcccagctggcttaccaaaacaggaaaggcctttggatacagaaactgggtgttttcctgctggatcttcatggttcccccgtcatgcttgccgtaagaataagtgaggtccggggagggggtaaggtcggagccaggacacctggacccagcctgctggtttgtcctctccctccgtctcagaagcctcttcaccgctccacgcccatctgtggaaatctttcatcctgattttttt

SEQ ID NO: 20225 - DNA, 2300 bp, Homo sapien
tggagccctaggccaggaaagggcattagaggaaacccaggaaacttggatagagtgtagattttggtcagtaataatgtatcatgtgacaaatgtatcacactcatgaactgggcatggggtactcacaactctaaattattctaaaaatattgatataaatttaagaccaaaaccatggccaggcgtggtgcctcactcctgaatcccagcactctgggaggccgaggtgggcagatcacctgaggtcaggagttcgagaccagcctggccaacaaaccctgtctctattcaaaatacaaaaactagccgggcatcgtagtgtgtgcatgtaatcccagctactcaggaggctgaggcaggagaatcacttgatccagggaggtggaggctgcagtgagctgagatcttgccactgtactccagcctgggtgacagagcaagactccatctcaaaaaataaataaataaaaataaaaccaaaaccctacagcacgggcagctatgagaactagagaaggaagagggttttgtgcacctgccagcctcttaggttcttgtcagcttttcccccaagtctttattattattatgtattgtagagatggggtcttgctatgttgcccagactggtctcaagctcctggcttcaagtgatcctcctgcctcggcttcctaaagtgctgggattgcaggtgtgagccaccatgctgggcccctccaatccttttgagctgcccaagaacagagaccaggcctggctttgctcagcagtgggtccccagcccatggcacgaattcagtaaacacttgttgtggtcctcaaggggcccccagtcttgctagtcacctgtgttcacctaatttgagcctctgttttctttactttttctttttcttttttcttttttttttttttttgagatggagtctcactctgtcgcccaggctggagtgcggtggcacgatctcagctcattgcaacctccgcttcccggattcaagtgattctcttgcctcagcctcccgagtagctgggatttagatacagggtttcaccatattggccaggttggttttgaactcctgacctcaggtgatttgcctgcctcagcctcccaaagtgctgggattacaggcgtgaaccaccgcaccggcctttgcctctgtttttgtaatcataaaacaggcagacaaaacctccagtggaattgtgaaaattaaatgatatgcatgcagaaagcgttctgcaaactctgttttgctagtttgggtgtttagtgttagtttttatatcattagtactggttgtaaacttatcaatttaagcaagatggaaaatcgagggtgtgtcagggaagggggaagtttgagctgaaattatgacctcttaggggtgggaagaggaggctttggggttgtgaggtctgagcccccttactttgggatgagtccacatcgcggcgactcctctgcagaatgcggtgatgttgcggtaaggggtccgggatagctgcgaggcagctggaccaatcctgaacgaaagacatcagtgatcgcaagaggcgctaaaacttctgccgaaacccgggatcgaaccagggacctttagatcttcagtctaacgctctcccaactgagctatttcggctgggcggcagagtcgctctcgccgggactccgtcccgcgctgcgccttccctgcgcaggcgcagtcgtttcgcgtcagcaggccccacatcctttgtaaggtctcccagggcgccggagcgcagtgtcgtctctgtggcgcaatcggttagcgcgttcggctgttaaccgaaaggttggtggttcgagcccacccagggacgcgtggtgacttttgccctcctggaataacaagaaaatgagtgtcgcctctgtttttgtcggtccgccgcagacccgcggcccccacgtgcgcactccgatgacctttccgcctcgggtgatctgggggtgcacggcgcaacacgaccacggaggccgaaagcgcagcggaacctcccggctccaggttccggtttccgcatgcgctccgagccgctttgggcggcggccccgggaacccggagcgctaaggagaacggacctcagaggttgtctgaaggccgaggccaagatggcggtgctgtcaggtgagcgcggcaccggcggcgggtgtggggccgcgcgggtctggggccgtgggagcctcgggtgtcgtggtggcgtcgggggtcggtgccggcgtcgtggccgcggtcctctccgggcttctccgagccggccgctcctcg

SEQ ID NO: 20226 - DNA, 2300 bp, Homo sapien
ctcgggaggctgaggcaggagaatagcttgaacctgggaggtggaggttgcagtgagccaagattgtgccgttgcactccagcctgggtgacaagagcgaaactccgtctcaaaacaacaacaacaacaacaaaaaccctgacccagaggcacagaatcccatcacctcagaggttctcagaagagtatctcctctgctaggagctcatccaaagtcctgcattttcagcttgggaaactgacacctggagtggggcagctcccaccagagcctggggctgggcagttagcctgtctgctgtgcccagcctcaggcatgccaagaagtaggtcacaggcttgtgtccttcagagagttgtggcctggacggggccatgggaaacagcaaccccggatgaggctaaggctggggtgagggaggggctcagaggcaggagaaggccccatggatcgctgcattcaggggcatcaaaccctggccctggcccctggaggctgcccacagcctctccatcgggcctcacctcacccacagcgacaaagtaccatcacctgggcagcttcaacagaagctgattgttctcacagttctgggggctggaaggccaagattgggggtcagcagggttggttcctgctgaggcctctgtccttggcttgcccgtggccatcttctccctgcgtctttcctctgtacatgtttgtgtcctgatcgccttttcttacaaggacataagtcatatcggatgagggcccaccctcgtgacctcactgtcctttataatgaccctttattttattttttgagatggagtctccctctgtcacccaagctggagtgcagtggcgcagcctctgctcactgcaacctctacctcccgggttcaagtgattctcctgcctcagcctctcgagtagctgggattacaggtacctgctactacacccagctaatttttgtatttttagtagagacggggtttcaccatgttgcccaggctggtctcgaactcctgacctcaggtgatccacctgcctcggcctcctgaagtgctggaattacaggcatgagccaccacgcccaggcattaatgatccctttaaagaccccatctccaaaagcagtcacattctgaggtcctggggttagggcttcagatgcaggtcgggtggagggtcacagttcagccgtcaccagcaccaagcctgcctttctggattcttccttgtgagccaggattcctggcacctccaggtttcctcccgctgagtgccccgggcgtggcaaggccctgctctggccttagtcttcgcctcgggaaggctctcccaggagacttcgtgcaggcgcgttccctcctctgcgcttcctttgaggctggctcctctaggggtgcttttctgtgtagattgacgtgggcagcgccctccccgcttagcggactgcagattcctgcaggatggggcctgtgctcagctgcgtgggaaacgcccgagcagcagccagggcctggagcacccagcacacgcttgtcaggcacagctgaggccaggacgagcactgggtgcccagggaggccccagcattgctggagtggcaggcaccccacaagcacgcatagatggagatagaaccgggtgccggcaaccggaggacctggggtcctggtgtaggcgggacgccccgggtatctgaactgaaacctgcctcatgagaaggggccagcagtgtgcaagtgtgaggcggggtgtcccccgcagggcagcagccagtgtgcaagtgtgaggcggggtgtcccccacagggcagcagccagtgcgggggccctggcgcaggaaagcggcaggtgccagtgaagatcgccagggcggggagacggggcagcgtttgggttccttccggggccatgcagtctcaagcaggggactaagactctctcgtgttctgaaaaccccctcgttacctaacgtttgttaagtggcactcgagttgggatcagagctaggctgtgcgggcaggagcctgatggggaagcgcctggaggccggccctgcgtgctgcccgcagctcactgttcccaccccgtggtcctctctgcagctcctggcctgcgcggcttccggatccttggtctgcggtgagtgcctgagtctccagccctcagctgggaggggccttcagcagcgacagacgaacggggcggggggggtggggggtggggggagcgccttgttgaaggtcacgtgtcatgttagggacaggatgcaggtgacggtctgcacgctgcccgtgatgtgc

SEQ ID NO: 20227 - DNA, 2300 bp, Homo sapien
cctctgctaggagctcatccaaagtcctgcattttcagcttgggaaactgacacctggagtggggcagctcccaccagagcctggggctgggcagttagcctgtctgctgtgcccagcctcaggcatgccaagaagtaggtcacaggcttgtgtccttcagagagttgtggcctggacggggccatgggaaacagcaaccccggatgaggctaaggctggggtgagggaggggctcagaggcaggagaaggccccatggatcgctgcattcaggggcatcaaaccctggccctggcccctggaggctgcccacagcctctccatcgggcctcacctcacccacagcgacaaagtaccatcacctgggcagcttcaacagaagctgattgttctcacagttctgggggctggaaggccaagattgggggtcagcagggttggttcctgctgaggcctctgtccttggcttgcccgtggccatcttctccctgcgtctttcctctgtacatgtttgtgtcctgatcgccttttcttacaaggacataagtcatatcggatgagggcccaccctcgtgacctcactgtcctttataatgaccctttattttattttttgagatggagtctccctctgtcacccaagctggagtgcagtggcgcagcctctgctcactgcaacctctacctcccgggttcaagtgattctcctgcctcagcctctcgagtagctgggattacaggtacctgctactacacccagctaatttttgtatttttagtagagacggggtttcaccatgttgcccaggctggtctcgaactcctgacctcaggtgatccacctgcctcggcctcctgaagtgctggaattacaggcatgagccaccacgcccaggcattaatgatccctttaaagaccccatctccaaaagcagtcacattctgaggtcctggggttagggcttcagatgcaggtcgggtggagggtcacagttcagccgtcaccagcaccaagcctgcctttctggattcttccttgtgagccaggattcctggcacctccaggtttcctcccgctgagtgccccgggcgtggcaaggccctgctctggccttagtcttcgcctcgggaaggctctcccaggagacttcgtgcaggcgcgttccctcctctgcgcttcctttgaggctggctcctctaggggtgcttttctgtgtagattgacgtgggcagcgccctccccgcttagcggactgcagattcctgcaggatggggcctgtgctcagctgcgtgggaaacgcccgagcagcagccagggcctggagcacccagcacacgcttgtcaggcacagctgaggccaggacgagcactgggtgcccagggaggccccagcattgctggagtggcaggcaccccacaagcacgcatagatggagatagaaccgggtgccggcaaccggaggacctggggtcctggtgtaggcgggacgccccgggtatctgaactgaaacctgcctcatgagaaggggccagcagtgtgcaagtgtgaggcggggtgtcccccgcagggcagcagccagtgtgcaagtgtgaggcggggtgtcccccacagggcagcagccagtgcgggggccctggcgcaggaaagcggcaggtgccagtgaagatcgccagggcggggagacggggcagcgtttgggttccttccggggccatgcagtctcaagcaggggactaagactctctcgtgttctgaaaaccccctcgttacctaacgtttgttaagtggcactcgagttgggatcagagctaggctgtgcgggcaggagcctgatggggaagcgcctggaggccggccctgcgtgctgcccgcagctcactgttcccaccccgtggtcctctctgcagctcctggcctgcgcggcttccggatccttggtctgcggtgagtgcctgagtctccagccctcagctgggaggggccttcagcagcgacagacgaacggggcggggggggtggggggtggggggagcgccttgttgaaggtcacgtgtcatgttagggacaggatgcaggtgacggtctgcacgctgcccgtgatgtgccgggaccctccctgggacagtccacgcagtggcaaaggctggacagtcaggaggaaaaccctgtgggcccggctcagtgccgtcagagctcaccgccacctggggtgggaaggcattctctgagccctgtgcagatggcagctggggcaggcctcctgcagacccaggtgactgacagggcggtgagggcg

SEQ ID NO: 20228 - DNA, 2300 bp, Homo sapien
cagcactttgggaggccgaggcaggcggatcacctgagggagttcaagaccagcctggccaacatggtaaaaccccgtctctactaaaaatacaaaaattagctgggtgtggtggtgcatgcctgtaatcccagctacttgggaggctgaggcaggaaaattgcttgaacctgggaggcggaggttgcagtgagccgagatggttccaccgcactccagcctgggttgacagagcaagactctgtctcaaaaaaaaaaaaaaaaagaaaaaaaactaatggcaagtgagaaggctgagattataaaactatctacagcacctgtcatcacttatgtgtgagtaaagcagagaactgggcggaatgtggggtctgctgcgtgggggtggatgggaggaatcgttctggggagaggcccaccagcgcatctgcctagggtggaggcaccgagacggctgaagggcagcgccgggaccacgtgggatttcactgaatgtagatgacacttttgataagcgccatcagggcacggccaggccagcactcacgctacgtctgtccctggagaccccccgccctgcactcacctccccatggagaccacgtagcgcggctccggcatctggtcgtagacctggaagagaggcggggtccgtgcgcagctcactctgggggcggctgggcggctgggacgaggcctaccttgcgaagcgctggggccatcttgttggtgagtgtgccggccacgatcatgacgtcggactggcgcgggctggcgcggaagaccacgccaaagcggtccatgtcgtagcggggtgctgccatgtgcatcatctccacggcgcagcaggccaggccgaaggtcatgggccacagagaactctgcggaggccgggctcgggtcagacgccacccccggagccccgcgtggcccagcgtgagactccacgtggagcacccagaacccccgactcatgtcccggggcggcagccggcagaggtgagaggcacagcggctcctgcaggtggcctccgggccccaagagttgtaaagcgcgccccaccagccacattcaaatacataaaatagagagaaacgggtgagatctgtcctcatcacatagttcctcgaacccagtgtatcctaagtcccaccatttcaacagggggctccagccactctctgagcgcgtgggctacaggcgagtagtagcgcaggtctaaccgggaactctctgcgttaactagatctgggtccacataccaagtgcgacgcctccaggaagccctctcagatctccttggccactccctcccctctcctccatccctgtggcttctcatttcccccaccgttcccgctctccctgcacgcggctctgagacctggcaggggccctgctgcatgtgttggcgggtgacagggtcaggctacagagtgaggcagggctgcccgggcagaaatggccaggtccacctgcccgccagaagcctgtgttgggacggccgctggccatgtctcaggttccctccattagaaactatcctgcattagccgggcgtggtggctcacgcctgtaatcccagcactttgggaggccgaggtgggcggatcacgaggtcaggagatcgagaccatcctggccaacacggtgaaaccccatctctactaaaaataaaaatacaaaaaattagccgggcgtggtggcgggcacctgtagtcccagctacttaggaggctgaggcaggagaacccggcaagcggagcatgcagtgagccgagatcgcaccactgcactccagcctgggcgacagagcgagcctccgtctcaaaaaaaaaaaaaagaaaagaaaagaaaaagaaaagaactatcctgcattaaaaactatccttgtctcgaccactgcggccctggcaggacgttcgccgtggcattgtttaggaaacaaaaaacaaaaggaaacagtgaacgtccatcaatgggggattgttgaacccgggctgtcgcagcaagtgccgcaggagctggagggagctgcacgtgctcacgctgcagggggatggcaggggctgcgtgggggctggcgccacaggcaggggaggctttaaacgggtaccgagaaggatctactgccttcacacgcgctccttttaacttaaaacactgctttcaccttaaaagagaaacaagaggaacacacggacgccagaaagagaatgacggaaacggaggggtcatctccagcagggtccgaatcctcagatggaaccacaggccaccaggccagcacaggggcctc

SEQ ID NO: 20229 - DNA, 2300 bp, Homo sapien
gctacttgggaggctgaggtaggaggattgcttgggccccaggggcagaggttgcagtgagcccagatcgaaccactgcactccagcctgggtaacagagccagaccctgtctcaagaaaaaagaaagaaagaaagaaagaaagaaaatttaaaaaaaaaatggaaatcaggctgggcgtggtggctcacacctgtgatcccggcacttcggaaggccaaggcgggtggatcacttgagcccaggagtttgagcctagcctggccaacatggcagaatcccatctctactaaaaatacaaaagttagccaggcgtggtggcgggcgcctgtaattccagctactcgggaggctgaggcatgagaatcacttgaacatgggaggcggaggttgctgtgagccgagattgcaccgttgtactccagcctgggcaacagaccgagactccatctcaacaaaacaaaaacaaaaaaaatggaaatcaaagtccctcaccagctcaacaacctcccatggctccccagtgccctgtggttcagcctaagccctgcgtgttcccctccctccagctgcctccacctggctgtctttgctggttcagcagtgcttgtctcgctgttccctctgcctggtggaggcggcctatctgagaagggctctatgtggttgccctgggctgctgttgtgagagccggctgggtgcctgtggcccctggggcagcttttcttccaaaatgggaactagtggcctgtgttctttttctggtgtgattctttggctccacccgccacactggcaaggtctggagaactgtggagtaggtgcccgggggtggctcgagtgtggggctggggttccaggacagccgggaagctgctgcccgcactggggagctggagattcccgttcacacctgggcttccagggctgccctgccacgtgcccacgggagctgcagccgcccacccgggccttgccatctgtaaacactcttcaatgaggggtgggcgccagggtgcacgtgacccccatggccctcagaggtgacctggtgccatccccgaccaggagacgcaggtgcccgcgctgctggaggccggcttccggagggagaacatccgtacggaggtgatggcgctggtcccaccggccgactgccgctactacgccttcccacagatgatcacgcccctggtgaccaaaggctgagcccccaccccggcccggccacacccatgccctcctccgtgccttcctggccgggagtccagggtgtcgcaccagccctgggctgatcccagctgtgtgtcaccagaagctttcccggcttctctgtgaggggtcccaccagcccagggctgatcccagctgtgtgtcaccagcagctttcccagcttctctgtgagggtcactgctgcccactgcagggtccctgaggtgaagtaaacgccggcgctgggcttggccagtcggcagtgagcgtgcgactgttacttccagcggctgctccctcacctcccgcccatcccatggacacaggaaaagtgggtgactcccctccaggtttctgagcggccccaggatccgccccgccccccccactgtcttgcccatagcagacatctccagctgatgcccgatgtcccttcctcagatgaaagccacctgaccctttgcagtggggtcagggaagggggtaactaggtcagggtctcagggggtggcagcaccacggccggggtgtgggtgggacaaggatctttgcccaccccaggcaggaacccacttctctgcccgccccagcacaccctgagctcccctcctcccgccccaggaggggcgtggctgctgacagccccgttccccaagcctcccatttccagatgtggtttcctctcaggaggcatcgcccctgctgggcccattgcaggggcagccccacctgcccagccccaggaacatcccgggtcctgcctgtctgtgcccttgtgcccagctggtcaccccatgcctcccactttgccccctgcatccacatgtgtgcagcccgcccatcttcctggggccgtcctgctcgccccctccactgacctccttgccctgagagaaggccggctcctgtgctctgcactctggcccagggctgctgttccgctggctgacgccctgtccccaccccagcatgtcctgcttccaggctgcttgacccggctgggctgggtgcctcttccccacccccgccccagtctcccgggccccatcccagcctggcccgtcataactgccgatccccagaactg

SEQ ID NO: 20230 - DNA, 2300 bp, Homo sapien
gcgtgagccaccgcgcccggccctggctaatttttaaaacttttttttttttgtagagacaaggtctctgtgtgtggtctaagctggtcttaactcttgcactgaagcaatccttctacctcggcatcccaaagtggtgggatcacaggcctgagcccctgcacctcccccaggcactgggatcacaggtgggagctgctgcacccagcctatcaagcatgttctgtgtgccaggatcactgacagccctgtgagagggacgctaggaccatgaagaaataccttccgttagtgaactaccaaagagagagaaaacagcttctggccgggtgggtgcggtggctcacaccttgcaatcccagcactttaggaggccgaggcgggtgaatcacgaggtcaggagatcaagaccatcctggctaacatggtgaaaccccgtttctactaaaaatacaaaaaaaaaaaaaaaaaaaaaaaattagccgggcttggtggcgggcgcctgtcatcacagctacccaggaggctgaggtaggagaatcgcttgaacccgggaggcagaggttgcactgagccaaaatcatgccactgcactccaacctgagcaacagagtgagactctgtctcagaaaaacaaaaacaaacaaaacagcttctgaccaggacatgcctgtcctggggcagaatgggggtgtctcctagaggacacgtgggctcagcttgagacagaacgagaaagcggcctgaccaggagagaggctgtctgggcaaggggaagagcgtgtgccaaggcccggggctaaggagctgtgcaagaggtggcaggggcatgtggaggcgttgagcaggcagtgatggggcaggcagctacccagacaaggtggcgcagggaaggccgcgcgcgggagctgtttccgaggctgcctgcgttcacaccgtggccctgctgcaacctgtgaacctcaacctctctgggcctcagtttccctcgtgttaaatgggcataataactgcatctgttaacccgtgcagaacgcacggcaggcaggcaggcaggcaggcaggcagtgctcagggctcatgactgtggccccacgttcagagggggaaggaaaccggctatcagagccaggacgccaccgcagcgggcttgggggcccccaggaaacaggcggggggtgtgcttgaccctaaggggctaccctgggctgggggaggcctaattccacccccgcacaccccagctgcagggccgccggaggaaagggcactgctgggattgagtcctggtctccagaactggaggcgtctttgggcggaatcccccattagggacccggggtctcagatgacccccagcctatgggggtgtgacatgggctcatgaaaggggggcatcagagctctaatgctgggtccccaccctcgtggccaccagaccaccggctttgcttctcaaagcctcagtttccacatctgtaaaatgacagtcggctgctctatggagtagccattcatttttattccttaataaacttgctttcaaaaaagaaaggaaggaaggaaggaaggaaaaacgacagtcatcatagaacctggcgggcgcggtggctcacgcctgtaatcccaacactttgggaggctgaagcgggaggatcgcttgcgcccaggagtttgagaccaacctgggcaacatagcaagaccccgtctctattaaaaaaagacagaactcactgtagcatcttctgaagattaaatgattttaaacacttaaagcacttccaacagcgcctggaagatcctcagattctcacaccccagcgaggagggggcctttctgcggtgctgacagatgaggaatctatggcgcgtaagcggcaaggcggggattccagtccccagcctgcaggttcgcgtccccgggcgcggggctgcggtgcccgctccgcagagggggcaccgaggctccttggggagggggcggccggggccccgaccccactcccgccacctctcgcgtggccgccgctagaggccgctcccggagccgcgcgcgcgcgtcctctcgcgggtccgccccccgggcctgttggacccgcccccggcccacaagcccctgcagggagcgggcccgggcggcgcgcgatcgaggtcgggtcgccgtccagcctgcagcatgagcgcccccagcgcgacccccatcttcgcgcccggcgagaactgcagccccgcgtggggggcggcgcccgcggcctacgacgcagcggacacgcacctgcgcatcctgggcaagccggtg

SEQ ID NO: 20231 - DNA, 2300 bp, Homo sapien
tcggctcactgaaacctccaactcctgagctccagccatcctcctgcctcagcctccaagtagctaggactgcaggtgcgtgccaccaaacctggctgatttttgtattattattattattattattttttgtagagatggggttttgtcatgttggccaggctggtcttgaactcctgggctcaagcgatcctctcatctcagccttccaaggtgctgggattacaggcatgagccactgcatccggccagttttattttaaatggggttttagtcccagctacttgggaggctgaggagggaggatagctggagtccaggagttcaaggctgcagtgagctatgactgcatcattgcactccagcttgggcaacagagtgagagcctgtctcaaaataaaagaaaaaaaagtgttttgtactatttgtctgtgatcttgttccttgtattttttttttttgagacagagtcttgccgtgtcgcccaggctggagtgtagtggcacgatctcggctcactgcaagctctgcctcctgggttcaagcaattctactgcctcagcctcctgagtagctgggactacaggcgcctgccaccatgccgagctaattttttgtacttttagtagagacggggtttcaccatgttagccaggatggtctcgatctcctgacctcgtgatccgcccaccttggcctcccaaactgctgggattccaggagtgagccaccatgctcggcccttttttttctaagagggagtcttgctctgttgcccaggttggtgtgcagtggcgcgatctcggctcactgcaacctctacttcctgccttcaagcatttctccggccttagcttcccgagtagctgggattacaggcgcccaccaccacgcccggctaattttcttttgtatttttagtagagacggggtttcactatatatgttggctaggctggtctcgatctcctgacctaaattgatcctcggcctcccaaagtgttgggattataggcgtgcgccacctcacccggccttgttccttgtatttatttaattctgtgatgatgaataaaccaaacgatcaggctgtcaatgtgctgtgagattaaggagaaaagcagtaggcagcacgtacccggttttacaaaaccctgcgggtcacctgtttactaccgtcagcctagaccggtttttccacctccttctgctgacattggaggacgggtatcattctttttggggggtcgtcgtgtgcactgcagggtgctgagcggcatgtctggtctggacccactcgatgccagcagcaccccgcactcaagttgtgacaaccaaaaccgtgttttcagacattgccaagttatcccctagggggcaaagtcacccagaagaagaaccactgatgtatgcaattaacagatgcaactaaaacagtatttggctattaatagtaatagcacttggggggggggtcaataatatcttttcatagtcattgaatttagttaattgttttgatttgattccagttcagccccgaactgggtgaccttggccaagtgactcagcctctcggaccctcgggatcctcttctgtgaaatgcggacaggggaaggagcctcgcgcgggacgctcacgtgccgttcccgctccgtccgcccgcctggggtgcgggcgggtacactcccactccccgcagcgccccacgcggctccaccgcttccgagtgaagagttaaagaggaagcggcagccgcgcctgcgcccacagtgcctagcccggagcgccggtctcgcaagcgcgcacgcgcacgcaagcccgcacgcgcgcgcacgcacgcacgtggctcggcccgcgcgcatcctccccttgcaggggcggggccagcgcagggactccatttcccagcgtgccccgcggcaacgccaggagcctccgaggagaaaggaaaacgcgcgacggccccgactgcggcggcgcgaaatccgcctcagggacgcacgcacagacggagtacccctggacccgcccccggagaccccgtgcgggagcgcgcccgggcgtgcgcaggggcggcggcgcggcggcgcggggacgcgcggtgaccgttggcgccgaggggaggaggcagccgccgccgccgccgccgccgccgccgccgccgccgccgccgttgcgcagatccgggccgcggctgtggggagggcgacggagcgggtgaccttccggaggcgggagcgagcgaggaggcccgggagcgccgagcgtcgccgccgccgccgccatgaacaactc

SEQ ID NO: 20232 - DNA, 2300 bp, Homo sapien
aacttctgacttacaggaaaattacaaaaattcccatatcctcttggccctgccagactcaccattggctgacattttaccctttggcacgtggtgcctcttgccccacccccagtgaactgtgtgtgtgtgtgtgtgtgtgtgtgtgtgtgtgtgtgtgtgtttagatggaccctcactctgtcgcccaggctggagtgcagtggcttgatcttggctcagtgcaacctccgcctcccgggttcaagcagtacacctcgagctcagcctcccgagtggctaggattacaggtgcgcaccaccgagcccagctaatttttgtatttttagtagagatggggttttgccatgttggccaggctggtctcgaactcctgacctcaggtgatccgcccacctcagccttgcaaagtgctgggattacaggcgtgagccagtgcacccatccccactgtgtgtgtttctactgaaatatttgagagtagctggagaccgatgcagtcccctttatgtgtacactgagatatctattgtttcccaagaacaatgacattctctcacatgaacacagcacagtgatcaaaattgagaaagtggccgggcgcagctactcacgcctgtcatcccagcactttgagaggccgaggctggtggatcacgaggtcaagagattgagaccatcctggccaatatggtgaaaccccgtctctactaaaaatacaaaaattagctggcgggcgcctgtagtcccagctactcgggaggctgaggcaggagaatcgcttgaacccgggaggcggaggttgcagtgagctgagatcgcgccactacactccagcctgggcaacacagcgagacaatttttcaaaaaaaaattgagaaagtatttattattttttaaaattgtatttgagtattttttatttttttaattttatttaagagtattttttattttttttttaattttatttaagagatgagatctctgtcacccctgctggagtgcagtgacacaatcacggctcactgcagcctcgaccttgactcaaacgatccttctgcctcagcctcccaagtagctgggactacaggtgcctgccaccacctggagtctcgttacgttgcccaggctggtcttgaactcctggcctcccgtaatgctgtgattataggcgtgatctgcgcccagctgagaaagacagtactgataccaggttatctaacccccccggccctgtttcaggtttctcagctgagcgtttctagcccttcccccttaatacacaatttttgaaatttaaatgaagaccgaaactggactggtctgacgagttccttctgccagtgaggtgggggtggagggggtactgggctgcttggaggacacctgcctgttacctggctgttgggtgggtgcagtgctgactacaggctgctgtttcttcaagtgacttggatttggtttggttttcagggttttatgtgtgtgtgtgtgtgtgtgtgtgtgtgtgtgtgtgttttgtttttttttttttttttgagaactgcttgaactttaattccaaaggattgtgtaaatgagcatttttccggtcggttccagccaggcttgggggcccttccttcatggggtgggggctgctgctggctcctgctgggtgccgggccctgctggcagggatgtgggcggggctggccctgactcagcgcgggcacagcctatggagagtgaggcacagcctatggagagtgaggcacgcggaggcctcgctcctcccacggtctctaggcctgacctcaacgctccctggcctgattgcgaagggtgcgtgggagacgtaggattttaagttaatgaggcctcaacctaagcctgttgctgttgcgtgatcagcatggttttccctgaaatttgccttttcagatctcgtctctaagggtcaggaagcacagggcggctggcacaccccgcctctaattcttcccgcctcagccctccccaccgaagaacggggctggggggttgcttgttgacgttttgaagacggcagtgggtgcctttcctgtggtgggaacatgctttgtttttcacacactaaatttaaatcagtcgttcttagggaaaaaagaaggaacagggacaagctcctggcggttggctgtggcagacacttcaccaggggctgactcgcgggggctgagtgtacaggccccaggtggtggttgatgagaggtgatgagtgtgccagccaccttgcaggggtctttcctggcgagctggcaggagcagggaggag

SEQ ID NO: 20233 - DNA, 2300 bp, Homo sapien
tcaacctgacagcgacgtttttgctgaaagccgaagccaagggtggtgtggttggccgtcagggatacagggccccgcgtgggaatggtgctttcagtgaggctggcaggattcttgcggctcaggtgggagctttggcctgcacggtgttttgctctctggagaccaagggtgatgatggtgctggcactgagtcacagctgagattcagctcagggacttcatttctgaatgcgtgtcctctttcccagggaaagcaggcaggatgggagagtcgccgatagaaccacctcttccctgcctcctgggcttgggggaagcttgaatgacatctaaggccccgtgcctgggtaagccttgtggtgtctcagacatgcccagtgggtgccatggctgactcaaggtggcacagtccccattgggagttggcacagtccccattgggagttggcacagccaaggccctggggccacctggagcggcagtgaggtggaaaggtgagtgggcccttgggcgtcgctgcagggtcgatggcggacgccttgggagagctccagctcttctgcccggaggagacagccccaggacgggggtggcgcgggtctttggtgggggcaggcaggaagtgccagtgctgagactgaatttcaggcccttctcatctgccaataagagacagccccagaatgggggtggcgcgggtttgtcgggggtaagtaagtggggccagtgctgagactggagcttcagggccttcaccttcatctgtgggcctctcgttagttcgtgagtgcaggctcattgggaggcttctgtctgtgtccccccacccccgccccaggctgtaattcagaggccgtgtggcataggcttctagtttactgtgcatcatttcagatgtagacttctacattctttttcctgattataaaatactcgcaaaagctgtaggaaagcgagcctgtgtcccacttggcagcagtgcaggtgagcgtggtgccgtcaccactggcctgtcccaggaactcatcgcccgccacgcatgaggtcagcgtgcggctctgtggcacggtcctctccccatggcaaggattgggatcatctttcatgtctgcagacagcatgggcgaggctgactcgccattgctgtgagctttgtatgccgtcacgtgcacaaggacgtttgcgtcagctgcttctgtggtttgaattaagacctcagcttggcttggatgggggcatttctaaggcgagcgctgtcttgatcctgaatgttttctcattgaatcgcaggaagctcttcgtgggcggtcttgactggagcacgacccaaggtaggtggggaaggggtgtcaggtgggtactgcagatgggctctaggacctcggccttcaagttgtgtctgcccgcctcttgctactgtcttggatattttaaagtccttttgacgttgttctgatttctgggcaggggacagagtaagtgtgtatttgctctgagactgttaatttggtatttccatcccaagttacagggaagacctcaggctgcaggttcctagctccgggctgaggtggcttgtggaggcagacagctgttgtctggaagtgcagagggctgggggctggccaggctgttactgagttcagaataggaggaaagagtgtgtagcaaagtcggcgctccttggccactgccagcattcagagttgtcttgtttgccttgccttaaacgttgccttcctggacgcctacaaagtcaggttgtaaccgctggccactgctgtgctcactggcagcccctgatttacgtgaggacctcaagtgtgtgttgggcagaattccccagcgcttcccgtacaccccccacccccagtgcagcatcgctcggtgcgtggctggtggactggaggagtgtgcgtgccggcagcactgccaggcacgtgcctaatgctctggccctgtgtgtttgtgttttcttcccgatttctgagcagagactctgcgcagctacttttcccaatatggagaagtcgtagattgtgttatcatgaaagataaaaccaccaaccagtctcgaggctttgggtttgtcaaatttaaagacccaaactgtgtggggacggtgctggccagcagaccgcacacgctagatggccgaaacgtaagtgcccttccgggagctcacacccgctctctgtctcccctgtccttcctctgcttcattttttcctggactctgaccgatgtttgcgttagagtatgtttgaacgtggggtcgattgggaaggattaagcc

SEQ ID NO: 20234 - DNA, 2300 bp, Homo sapien
cccctcaggtcttctccatcctgcgctcctctcgctgtgtgccttgccttcctggtccctcctcctcttcctcctcctcttccccctccccctcctcctccccctccccctcccccctccccctccgtctggttgcagacactgcgtgcacagtcacgctcaggtgcacacgtgtgctcaggacggtgggaggctcctgaaccacagtgacctttgtcccctcacagtctgagctgccctttctgccccgtttccatctttccccgcccccagttttgcttgtcctgtttctgcctggtcccagctacagcagccctggcccctgtctcttcagcttgagaggccccacagtaggctgctccttccgggggccgttgcctgttcccaccccccacggcccttctctgccgcgctcgttcacgcctcacgcccgtgctgcgctgtcccctgctgtgtggtgccttgtcacgcaccctgtgcctctggcgcgggcagcccatcttcagcccggtctcagctcttcccatgtccatctttgttctgtgaggtcttgggcagctgtctgccgggcacttccatctggggaggggctggtgccgcctgggccccgcctcgggaggacggtgtgctttgcggtgtcacgctccacctagccggggaggcctggagagcccggcgcactcctgcgcctagaggaggagacccgccccgttagccgggggccgcgcccaccccagacccactaaacttcgtttatactgccactcttgtgtttgggaaatgctaaattttttttgcctttaaaattttctgttttgatcccatggtgcatctcgctcttgctgctggcagcagagtctgacctgctggaacccgttgtggcctgtatctttgtgcattgtttctctacctgtatagaacatgcatagatgtctacgatatgacctcttctaggactccttgggcttacccaacggtgttgcgtaagcctagcgaggcaccagctatgatagatactgtatctgttaacgctttagaacgatatatggctgctgtcagcactagctgcaaagcaaattgcaagccaagggggagaatcctgggtttcagagaagcatacacacatccacggtgcacacccctgactaagatggcgcattccacgcgggcccccggcctgcagggttcactggcaatctccccacaggcgagagccagaatattcaagcacgggcctctgaccctcccctggggggcgctttgtctgccagtagcgatggaggccctcaccgttcccctgtctccgctgctgttttataagatgtgctccttgttccaaatctttgtgacacggagccccagcccggggtgtctggggcggaggcttgactcaggcctcagtcagcagagccgtcaccgggagtgcggacgtcaccgtctgtccactccgtgtgcagtcgagtggtggctcctggggagggaggcagctgccccaggggcccgcagcgccccacacacagcttagctgaaacccaaggtcgatccctcggcccgtccctaatactgttcatcatcctgttttgtgtcacaacaccctgctaccttgattcactcttcgtcgttggctaggttttggatttattactttcgaggacgaacaatcagtggaccaggctgtcaacatgcattttcacgacatcatgggcaaaaaagtgtgtagttgtagttttattttaccttaagaccaaaccaagtcttaggcaacttaggggtttcactggaaaggaacattccttcacggaaagggtcgggcgagttcgtcctgtgaacctttgctgcgtgaggtgggcctgggtctgtagacgtgaggagggtcccatccttccccagcacccttcctgcggggtggggatctctcagctttgctcctggagcccctccctctgggtgacctgggactgggcgggtagggggctggggctgggaggctgtggcggtgttggggctggctccagtgaaaccgcagcgttgcctcaggcttggtttccacgaccactccttcagatgtctgcaaatccccattgtctgacactgacctgtaatgtgatcagcaagggacctttgagagccgaggttccgcttaaaatggaaagcacagtggaaacatcatgaaggactggttgtttgaattgggtcacttactgtggaactccggcaccagccacatgctctcggtagtactcagccaccatgcagtcaagtgacctctggttgtgtcatcttcatactgtgttaccccc

SEQ ID NO: 20235 - DNA, 2300 bp, Homo sapien
ggccgcgcccaccccagacccactaaacttcgtttatactgccactcttgtgtttgggaaatgctaaattttttttgcctttaaaattttctgttttgatcccatggtgcatctcgctcttgctgctggcagcagagtctgacctgctggaacccgttgtggcctgtatctttgtgcattgtttctctacctgtatagaacatgcatagatgtctacgatatgacctcttctaggactccttgggcttacccaacggtgttgcgtaagcctagcgaggcaccagctatgatagatactgtatctgttaacgctttagaacgatatatggctgctgtcagcactagctgcaaagcaaattgcaagccaagggggagaatcctgggtttcagagaagcatacacacatccacggtgcacacccctgactaagatggcgcattccacgcgggcccccggcctgcagggttcactggcaatctccccacaggcgagagccagaatattcaagcacgggcctctgaccctcccctggggggcgctttgtctgccagtagcgatggaggccctcaccgttcccctgtctccgctgctgttttataagatgtgctccttgttccaaatctttgtgacacggagccccagcccggggtgtctggggcggaggcttgactcaggcctcagtcagcagagccgtcaccgggagtgcggacgtcaccgtctgtccactccgtgtgcagtcgagtggtggctcctggggagggaggcagctgccccaggggcccgcagcgccccacacacagcttagctgaaacccaaggtcgatccctcggcccgtccctaatactgttcatcatcctgttttgtgtcacaacaccctgctaccttgattcactcttcgtcgttggctaggttttggatttattactttcgaggacgaacaatcagtggaccaggctgtcaacatgcattttcacgacatcatgggcaaaaaagtgtgtagttgtagttttattttaccttaagaccaaaccaagtcttaggcaacttaggggtttcactggaaaggaacattccttcacggaaagggtcgggcgagttcgtcctgtgaacctttgctgcgtgaggtgggcctgggtctgtagacgtgaggagggtcccatccttccccagcacccttcctgcggggtggggatctctcagctttgctcctggagcccctccctctgggtgacctgggactgggcgggtagggggctggggctgggaggctgtggcggtgttggggctggctccagtgaaaccgcagcgttgcctcaggcttggtttccacgaccactccttcagatgtctgcaaatccccattgtctgacactgacctgtaatgtgatcagcaagggacctttgagagccgaggttccgcttaaaatggaaagcacagtggaaacatcatgaaggactggttgtttgaattgggtcacttactgtggaactccggcaccagccacatgctctcggtagtactcagccaccatgcagtcaagtgacctctggttgtgtcatcttcatactgtgttacccccggaggtgagagggacaggaggccacccccccaacccccaggccagcccttggaaggcatgtgtcagaaaggggtccctaaatccttgttttacctggacccttggaggttcttgagaagtggactctgaaataaataactggtagaaattctacagtgtggaatttcttgcagttagcaaaagcttaggggtccaggtttttgcaggattcctgtcttggtcctttcaaaccaaggagctctgctggctctgccaggccgcctcacatgcccagtgggattctgacccggcctccttggtgcggcagcttctcccgttaacggaagaagacgcttagcccctctgacagggccatggttgttttttcaattaaaatgtcctggagggagcatcgtgctcattatctcctgcccctgccctctaccccagccagaggtcttgatagcagaacttttttaaaaacagtagcatgtgtagttatttttgtatacacgtggcttagattgggttgcagacttcattaattccatttgaacccaactaaaacaggagacacaatccttgttctgacatcgagtgcagcttgtggtttaaaatgagcctgccggctgcatgggtgcgcgacagtacaagcagggcttcaaggagtctgcgcccagtgttttaagggactacgacactgacaatttggggaaagcgtggtcttgatatacggggcag

SEQ ID NO: 20236 - DNA, 2300 bp, Homo sapien
ggcggagcttgcagtgagccgagattgcgccattgcactccagcctgggcaacaagagcgaaactccgtctcaaaaaacaaaacaagaaaaaaaaaggaccatgaagtcccaaactggaagcctacagcgtgccaggcgtgagactgttcaggcgacagccagaaccacccccccccgccccagttcatattttggggacagggaaggtttgacttagtttggagagaaccaagagaaggggtacccccaacatccctgtgcagtgcagtttcctcactgagacagtacccctcaacgcctcagcccaggaagccagctccattccctgccgtcagagccttctcccatgtcctcaggagctgctgccccagctcccaggagggccaggcgggggcggctgtctatccacaccacaggtcatcatggtgttgagtgtcagcccctcccgttacattagctcccccagccaaagagcagcactcacaaaatcagctttccagccaggacactctgctgcaggaaaatgggtaacatggacgggcccgacacataggtcctgtgctcctcgggacggagactcagccctccctgagtacagtgtaattggcttcccttgggactgtggggacggctggggagagctcagctccctggacagtgccacagctaagctcgggttcccagaggttttgtgctttttttttttctttttcttttttttttttttttttttttttgagaaggagtctctgtcgcccaggctggagtgcagtggtgcgatctcagctcactgcaacctccgcctcccgggttcaagcggttctcctgcctcagcctcccaaggagctgggattacaggcacccaccaccacgcctggctaattttttgtatttttagtagagttagggttggtcagcttggtcttgaactcttgacctcaggtgatccgcccgcctcggcctcccaaagtgctggaattacaagcataagccaccacgcccagccaggtgccacatccatagttaatagtcaccttcaactttatacttaattccagtaagatacagaaacatcactcctaggccaggcgcggtggctcacgcctgtaatcccagcactttgggaggccaaagcgggtggatcacctgaggtcaggagttcgagaccaacatggcctggccaacatggagaaaccgtgtctttactaaaaatacaaaattagccgggcacggtaacaggtgcctgtaatcccagctacttgggaggctgaggcaggagaatcgcttgaacccaggaggcagaggttgcagtgagccgagatcacaccactgcactccagccagggcaacaagagtgaaactctgtctcaaaaaaaaaaaaaagtcactcctacatagttctagttactccttctctttgagctatcattattcacattacatttacatatcttaacaaacccagtgatattcctaactttatttttgaggcagggtcttgctctgtcgcccaggctggagtgccgttggcgcgatcacggctcactgcagccttgacctcctgggctgaaggctcagcctcccgagtagctgggaattttttgtactttttattcttttatgtccgtgtgtacacaaatttttgtatttttttgtagagaggcagtctcactgtgttgtccttactaactttatatacaaaattttatctgttaaagccggaatggttcttttcagcgaggccctgtccctgctccagtatctgtaatgaattctcgtgttcctcccacagtgggacctgaaccgccaaaccgcacctacgagcaaacggtaggcgctccataaatacttgttgatgtgggtgccatcgtgtagatgacggagcacgaacccgaggctcagacaggggcggcgacttgtccaaagtcccactccgtggaggaagcggctctgcagacctcaggcggcggctgctctaatccctgcagcctgtgttttgccctccagacggcagagggcgcgtgttcgccgccgggaaagcggaagcgcgtgtgcgcgcacggccgagggggcgggacatgccggcagtctcgcgataactgcgcaggcgcggaccaaagcgatctcttctgaggatccggcaagatggtgagtgttgcgatttggcgcgtctctgccgggcctatccggctccatccaacctctgaccgtctcgcgggggccgcagttcgtccccgcggctacggcggcttgctcccgaccctgcaggcggctggatgttggggcgaggggcggactt

SEQ ID NO: 20237 - DNA, 2300 bp, Homo sapien
gtcccaccgactcatgctgcctgggggtctcccggctgtactggagccaagcttataaccctgggccatccttcctctgtccaacccaccttttcccaaacagagagaaaaacacggacccacactttctctgtaatgtaacttaattccaaatcgagaggtaagaacacgagcaaatcatggtttttttttttttttttttttgaggcagagtctagctcttgttgcccgggctagagtgcgatttccgcctcctgggttcaagtgactctcctgcttcagcctctcaagtagctgagattatagccgcatgccaccatgcccagttaggctaatttttttgtattttcagtagagacaaggttttaccacgttggtcaggctggtctcgaactcctgacctcaggtgatccacccatctcggcctcccaaagtgctaggatcacagacgtgaaccaccgcgcctggctgcaaatcatgtttaaatttgaagatatagccagctgcagtgtctcatgcctgtgatcccagcactttgggaagcagtgggaagatcacctgagcccatgagatttaggctgcagtgagccatgatcacaccactgcactccggctgggcaacaaatttaaaaaaaaaagtggagaaacattatagaagagggcccacaggaggctgttgtgggccatttgagggtgaaggtggggctcctcacatctcccctgcccccatctgcctggctgagctctcaccctcctgtccactgcccaaggggaggcccaccccacatccctgggccactctgctgggtgcttagtgagcaaagttaccaccttctgggctgaggtgactccagcattgaacggggttagttctcaccatgttctccaacccacgtacggccatcagagagcccatggagggctggacggtgccccccacccacaggcacagccactttgtcctgttctttcaagcattctgtgcaaaggagacagagctggccaggccacggatggtgcagcctaaccacgggacacggctctgtcccggacacaaagccccaggctgggcggatggggctggctgcagccatggagcctgctgggagaggagatgccagcagcgtggtgtcaggaggagagtcaggagcttctaagaagccaagcaggggtgaggatagaagggaggggctcaggtggcccaaaggttcctgctgctgcttcacttcctgcgggaaccctccacaggagatgagggaagccagaaaggagagcccaggccaggtgagggcttgaggggctgcacttagcccaggagtggccccctctacgtgaggtacccagaagacagagtgaggccaggcagctgccccgaggtcaagaacgctgagggggccaaaagggacggagctacacacctgggcttgggcacccagctccacagctgtccctgcagacaggagcaggggcagccgagttggggcagggcccgcacagctgtcagtcttcgacaccaagagaccatccacacaacactaccacacacccccgaacgtccaacctgaacctcctcacaccacgaacctgaagcaggcccaggcccctcccagagctcgggacgccaggaagaacaagctgcgcaaaggactggagtcatgtgcgcctttattagctgagccattacttgagagggatgaagcgggaggagtgggtggccccgatgccgggccggccatgctttacgggcttgtaggtgatggagaactcgcccaggtagtggccgatcatctcgggctgcgggagaccaagagcaaagctgggtgtcagctgatcccgcctgcatcaggcgaccccagcccaccccagccggcagggacggccgcacacaccttgatctccacctggttgaaggtcttgccgttgtagacgcccaccatgctgcccaccatctcgggtaggatgatcatgtcccgcaggtgcgtcttcaccacttccggcttctccatgggcggcgcctccttcttggccttgcgcaggcgcttcagcagggagtgctgcttccgccgcaggccccggttcagccgccgccgctggcgcgcactgtacagctgcatcagctgctcgctggggaggatgcaccaggcagttttgtgagcggcccggcctggggagaccctacgcactccggcggacagagaactaaggcttggttctctccagggacagagccgcagtggacctgtcactgtccattgtagtgactacaatgaacacgccaagtccctctggcacccccgcca

SEQ ID NO: 20238 - DNA, 2300 bp, Homo sapien
gctaatgggtacttcccttggttttctgcagttggaatccagcatgtgtgatcagggaaaatatgtattagtatttaaagcaaaaagatacccccagttcagagagacacatgtcttggtggccaggtggtgccctaggtccacaagaatttggggggtgtccaggaggtggggtgggagcctctaactagcactagggtgccactgtcgagggccactcccaactcaaggcccaggctctgtctttaggcctctctggccatatccgcacttcttttttttttttttttttttttttctgagacggagtctagctctgccgcccaggctggagtgcactggcagaatctcagctcattgcaacctccgcctcctgggttcaagcgattctgctcagcctcccgactagctgagactacaggcatgcgccaagacgccggttaattttttgtatttttagtatagacggggttttgccatgttggccaggctggtctcgaactcctgacctcaagtgatccacccgcttcggcctcccaaaatgctgggattacaggcgggagccaccgtgcccggccccacgcttctgtttctaccctctggtcccacaccccgctccagaatctgcatggactctcccagacctgcccggccccatctgtgccgtctcagacagacagctccgtcctcatcaggttcaggtctggccccggcgcttgcgggtcagctgccttcaggccctgtcctggttcccggcgcttctcacatccccgcggcctcccccctggacggcagtttacactgaactcggcgccctcccctgacttctgaaggaggagtcctgggtggccccgaagcctccccggcagccgcacggctccgtccccgctccagggttcagctgaggcacctgctggaggcggcctgtccccgccgccctgctaaagcggcgcccctttctccggccgctcgttctttggtttccagggactttgcacaattcataacacccctcttagcccccatcctgcccgggccgcatcttccgcccgatcatccggccctcgacccgcgcagccgcctccgccctcctctcccggcaccgcccacggcctgttctccccgcagccgccagcgggcgcccgcgagcctggagccgggcgcggccctgctctgtccacagcccgcggtggctcccacctcccgctgggcctgcgcgacctgccccccggggcctcccagccctcactgccctcgcgggctgcactctcccccaacactccccagggctgttcggcctccccagcagctccccatgccctgcccgccgcgctggcgtctctcccagcccgctgcagtcccctcgttcacgtcagcttcccaagggcctggattttgttttgttcagtgcagggggacccagcacacagtaggtgctttataaatgcttgttgcatgaatgtccgcgttcggtgtcgcccccttacggcggccccccgcgcgcccagctcggcgcccagcaagccttgtgcgcgcaggtgatgtttgctgaatgactaatgaacctcagcgcgccaagccgggctgattcgggggtggttccgagcttccgcagggtgaccgtccgcgggcagcggaccacagccgcatggcgacgccgcctctggccccccgcgacccccattccccgtgggacctctcgtgcccccacccccacccggcctcctccccgccgcctcgggcccccccagcctcctccgcattcgaactccccagcgtggtcggacccggaccctggcgccgctcggcccacgcgagtcccctcccctctctcccatccttggatctcccaccgcccctccgcagcctcggtcccgcgagactccccagcccccgcgagcacccccagaccccacggtacgccctcgcccctttcgggaggagccccgccccgggcccgcggactgacccctcccgcccctctccgcgcaggcgcagggcggccccgttcgcgtcccgcacccccaccctggccgccgaggggcggggcgcggcgggtccggggcggccgcggctccatggggctcctggggctcctgagcctgctgcactcggccttcttcggggaccaggtagggcgcgtgggtcgagccgttggggagggctccgggccgcgcaggaacggggcggggtccacaccgcgggaacagcgggcgcggcggcggggggcgcatggggcgagcgcgcggaggctgcagagtcgggggtctagtgccgtcgccgtagagaccgttgccggg

SEQ ID NO: 20239 - DNA, 2300 bp, Homo sapien
catgcccagggggacacagggacaacaaggctgagctgaagccagggccctgggctctgcatccccaaccccatttcagcctcgcccagctctgccccggcttgacctgtcaaaccccaccacgcgccctaccccatggctccaccagacaccccctgtgtcccaagcatgcattgatcttccctcagcctggaacgcctctcctcctgatcactgctgttcacttctcagggcagccttccagcctccagaaaaaaatccccttcgaggcgggcggatcatgaggtcaggagtttgagaccagcccgaccaacacggtgaaaccccctctctattaaaaatacaaaaattagctggcaaggtggtacatgcctgtaatcccagttactgaggagtctgaggcaggagaatcacttgaacccaggaggcggaggttgcggtgagccgagatggcgccactgcactgcagcctgggggacagagcaagaccccatctaaaaaaaaaaaaaaaaaaaggccgggcgtggtggttcacgcctgtaatcccagcactttgggaggccgaggcgggtggatcacgaggtcaggagatcgagaccatcctggctaacgtgaaatcccgtctctactaaaaaatacaaaaaattagcctgggcgtggtggcgggcgcctgtagtcccagctactcgggaggctgaggcaggagaatggcgtgaacctgggaggcggagcttgcagtgagccgagaacgtgccactgcactccagcctgggctacagagcaagactccgtctcaaaaaaaaaaaaaagaaaaaaaagaaaaagaaaaaagaaaagatcccctgtgtctgcccactgcattgcctccccagacccaaccagtggggacagctgcgtccagctctgggggctcccagacagccaggccgaagggctctcagcccctggcagtgctggcccgggacaaggccctcgggtcttcagctcaaggcccaacaggaaacagcacgggtcctcccttgcctttgtctacggggccttgaatactcggaccttcccaccctctcctatcattccctgcaccagcccttgcagaatcttccgcctcctctccattttacagaggaggaaaccgagggttgagcggcgaatgatttgccctgcctgcccagcacggaaaaaaatcactcttctggccccagtcgcctccctttctgtgctgtgagtctgtgtccagagcaggaagggctgctccgagctgcagggacgggctctgtgtgttaaaccttcaaatggcttccagggactcatggagcatccaggacacctggagatggcgactcctgggacccctggcccttccctcctctggccttcggtccgtgagggtgaattaagtgtgccacccaccaggggcagagacacatggagacagagattgagagacagagaacagagggggagacagaaagagagagggacatgaagagcaacggagttacaggaggatctgacgctccgttggggagacagggagaaatgtggggagatgcagcgtcccaggtgctccccagtggccctgcccctcctcccctctcccctccccaccaggcaggaccctcagggagctccagcctggacccgaaccctgtcccaccctgacgcacctgcaccaggccaggctggacctgtggggtgggtgcaggcctggccccagcccggccactgccctggaaacccctcccccgccaagatgctgatgtaacatccaggatttgatgttttactctccaattctgcaaatccagacgcaggaggttttaagaggccgttgcaccctgcaataaagtgcgggacacaggaatcttggtcctcggggcacccccttccctcgggggggtttcgccccccgcactcacggcccctgagcccgcgcggaggcccgacgccccgcggccgacgccggtccccgccccgggccgccattggctgttgccatggcaccagcccgtcttcccgcgccctcattggctgtctcacccgcatccctcatcccgcatcctcccccgctcgcggtggtctcgcccagcgctaggagcggcagcgccgcctgcccaggcccggaccgggctttgtccgccccggagcccctgcccgcgccgcggagaccccggagcccgcgcgctccgaggccaccccgggccgggatttccggtggggcccgcggagccgcgcagagggaggaggccccagacccaggcgccccgccagcccagctgcacgtaagcgggtgtgtgtcc

SEQ ID NO: 20240 - DNA, 2300 bp, Homo sapien
gagtccgcccaggcccagggaccccaggcagtgggaacagcagggaatggccgggggtcagcagtaatgtccagccccagaacatggctcaccatggcccagaatcctctcctgcggtgattcctttgttttttttcttgtttgttttgagacagggtctccctacgttgactaggctagagtacagtggtgcgattgtagctcactgcagccttgaaccctggcctcaagcaatcttccctccttggcctcccaaagtgctgggattacaggcgtgagccactgtgcctggccctttcctccctccctcccttccttccttttctttacttccttccttctttccttcctttcttccttctctttccttccttttttagtagagatgggtttcaccatgttggccaggatggtctcgatctcctgacctcgtgattcgcccacctcggcctcccaaagtgctgggattacaggcttgagccaccgcacctggccccttccttcctttccttttctttctttctttccttctttctctttcctttttctttcttcctctttcttttctttttctttctctctcgccttcctttcttccgttcttccttctctttccttcctttcctttcttttctcccttttcttctttactttcttctctttatttcctttttcttttttttctttctctctctccttccttcctttttcttctccttccttctttcctttctttctctttctttccttttccctctctctgtcccttccttccttccttctctctcaacaatatttttttttttgagacagagtcttgctctgtcgcccaggctggagtgcagtggcacgatctcggctcactgcaagctctgcctctcgggttcatgccattctcctgccccagcctcctgagtagctgggactacaggcaaccgccaccatgcctggttaattttgtttttctttttgtatttttagtagagacagggtttcaccatgttagccaggatggtcttgatctcctgacctcgtgatccacccacctcggcctcccaaagcgctgggattacaggcgtgagccaacacacccagcctaatttttgtatttttagtagagacggggtctcaccatgttggccaggctggtctcaaactggcctcaagtgatctgcccgcctcggcctcccaaagtgctgggattacaggcatgagccaccgcgcccaggctgaatttacagtttaaacaggcgaatttggccgggcgcggtggctcacgcccgtaatcccagcactttgggaggctgaggcgggcggattgcctgagctcaggagtttgacaccagcctgggcaacacagtgaagccccatctctactaaaatacaaaaaaaaattttgacggacgtggtggcgggcgcctgtagtcccagctactcgggaggctgaggcaggagaattgcttgaactcgggaggcggaggttgcagtgagctgagatcacgccactgcactccggcctgggcgacacagtgagactctgtctctaaaaaaacaaaacaaaacgaaataaacaggagaactttatggtatgtaaactgcatctcaataaagcccctgagagaggaaaagggccctctgctctttctgccttcccaggcatcagcggagaggaaaaggtgacctccagcaccgtccccgaggtgggaggacccgccttggccggaagtggaggcgccgcgaccgccccgcccccgctgtgttccggccgccgagtgctcatgcaccaccaggctcccttaggtggacagcaattttgtgctcccgtcagccacatgggtggcgtgtcccctagtgccgtgttccccttttcagaaagacgagcctcggatgcttttctacccagccagtggagcctggactcgaactcgctctcatcgtagcgcgtccaggttcgggttcgcctgagaggctgagatccgagtctcaagggcactatccctttaagacggggcggagccccgcgatgagcggcgggccggcgggagaggaggccggaagtgtgtgtcacgtgttcggggacggggcggtgctccgaccggaatcggaagtggctgcgtcgtcgacgctgggctttcgggtcccgcgcccaggtgggaagaggccggcgactggggtgaccgcggggaaactgaggcagaggttgagccagaccctgaagccttggccaccgtgtttttgggcggagggagggtcagggcctggggcgagctcagaggggcgggacagggcgggcttccccg

SEQ ID NO: 20241 - DNA, 2300 bp, Homo sapien
caacagctcactttgggaggccaaagtgggagaatcacttcagcccagggtttcttttcatttgtttgtttttgaagatggagtctggctctgtcgtccaggctggagtgcagtggcgcgatctcagctcactgcaagctccgcctcccgggttcacaccattctccttcctcagcctcctgagtagctgggactacaggtgcccgccaccatgcccggctaattttttgtattttcagtagagacagggtttcaccatgttagccaggatgatctcgatctcctgacctcgtgatccgcccacctcggcctcccaaagtgctgggattacaggtgtgagccacagtgcccagcactttcttttttcttttgagatggagtctcgctctgtcacccaggctgggtgcaacagagtgaagtggcatgatctcagctcactgcaacctacgcctgccgggctcaagcgattcttgtgcctcagcctcttgagcagctgagaccacaagcatgccaccatgtcctgctaatttcttttgtatattttgtagagatggcatttcaccatgttggccaggctggtctccaactcctcaggtcaagcgatccaccagcctcggcctcccaaagtgccgggaatagcaggccacgccaccatgcccggctaatttttttgtattttcagtagagacggggtttcaccatgttggccaggctcttagttctttttgagcatagtccttgttacttcttgaactcagtccttggagtccttggtacctttttttttaaatttttttgagacagagtctcactctgtcacccaggttggagtgcagtggtgcaatcttagctcactgcaacctctacctcccaggctcaagcgatcctcctgcctcagcctcctgagtagctgggattacaggtgcacactaccacacccagctaattcttgtatttttcctgtagagacggggtttcaccatgttgccacaagctggtctcaaactcctgagctcaaacaatctgcccgcctcagcctcccaaagtgttgggactacaggcgtgagccactgtgtggccagtccttggtactttttgacttcagttcttggtactatttttttatttttttgagatggagtcttgccatgttgcccaggctggagtgcaacggtgtgatcttggctcactgcaacctctgcctcctaggttcaagtgattgtcttgcctcagcctcccaagtagctgggattacaggtgccccgccaccatacccgggtaatttttttgtatttttagtagagacaaggtgttgaccaggctggtctcgaactcctgacctccggtgatccacccacctcggcctcccaaagtgctgggattacaggtgtgagccaccgcacccagcccttggtactttttgaattcagtcgttagtacttttttttttttaatccagagtctggctctgttgcccaggctggagtgcagtggcgtgggtgtgatctccgctcactgcaacctctgcctgtcgggttcaagtgattctcctgtgtcagcctcccgagtagctggaactacaggtgcccgccaccatgcctggctaatttttgtatttttgtagagttggggtttcactatgttgaccaggctggtcttgaactcctgacctcagacaacacgcccgcctcagcctcccaaagtgctgggatgacaggcctgagccactgcgcccgcccagtccttggtactttttgaagaagggctgtattctcactgtgcacggccccccgagtcccacccccctctgccctcaggtcaccacggacctgcatcacgggtgcacagaccagcacacgggcacctcggcctcagccccactggcggccggcatgatcgccctagcgctggaggccaagtaggtgactgcggggcccggtccaccgccctcgcccccaggcgcggcccggcggctcacccgcccccgcccccgccccccgcagcccgttcctgacgtggagagacatgcagcacctggtggtccgcgcgtccaagccggcgcacctgcaggccgaggactggaggaccaacggcgtggggcgccaaggtgcggcggggccgggcgggggcggggacccggggcccacggggcgagtgactgctgcccttccgcgcagtgagccatcactacggatacgggctgctggacgccgggctgctggtggacaccgcccgcacctggctgcccacccagccgcagaggaagtgcgccgtccgggtccagagccgccccacgtgag

SEQ ID NO: 20242 - DNA, 2300 bp, Homo sapien
aggcccctttctgagcgcctggacactgcgtcctgagggccactgggtgactgtaagcctcctactttttttttttttttttttgagacggagtctcgctctgtcgcccaggctggagtgcaatggcgcgatctcggctcactgcaagctccgcctcccgggttcacaccattctcctgcctaagcctcctgaatagctgggactacaggcgcctgccaccatgcccggctaatttttttgtattttcagtagagacagggtttcaccgtgttcgctaggatctcgtctcgatttcctgaccttgtgatccgaccgcctccgcctcccaaagtgctgggattacaggcgtgagccaccgcgccgggccaagcctcctactctttggaacccattacggtgtcgtaaaatccccttccctccatcccatgacctagacggtggggaagtcacgccgtctgtccctccttaccagagcccctggggcccagaggagggagggggaggacaagaggtgcccactgtgtaccaggccctggcaggcgccatgatttccgtatctgggtcttcctgcctcctcttgctgtatagacttggggcccgggcgggtctgagccacagaaagcacacagctgttcataacaaccacgagaaccacagaagatggctggtggccccaggaggcagctgagaccccgggcagggggttggcctccaggccaggctcaccttggggtttttcttcaggtgcaggcggtggccccagtgcggggtcagggactgctggaccacgccccggtgccgcaggtgaaagtactgcccgtcagggaagatctggggatgtggggaagcggccgcaccgatgggacccggctcccctgctgaagcccccgagggccggtaacagcccccttctttgtccttccccagcaggtgctctctgggagtcccagaagctgagcttggctgaggcaggggtgggctgggactcttgatatttagaagaccttgtgggctccctcccccttgtcggggtctagggttgttcagtcccctccaagcccccacttcccgtctatcccggtcccacccaccggccccaggttgacgaagccgaatttgcgtgccaggcgctcgacctcccggttaccctgggacacctggacggcccagctgctgacatagatgggggctcggaccggggcccaccccacagcccgggggcggacaagggccagggccaagaccaggcgcagccacagcgcaatcggggcgggccgcatggaggcggggcgggagcggggcctgcgcaaatcccctccctcccgccaaaccgccgagtgggcccaggcgtccgacccgcccccggcgccatagcaacgcagaaggcttcgactcccagggggccttgcggctactcagccaggaggggcgcgaagatctaacagaagcgggagagggacgcacgcctgcccgtcttccgcagacccacaccctcgggagcctcagttttcccatttgtacaacgacaagactaacccagagaagcgggttcactgttgcgataacgcgtcctaccctttgtttgacctctcccactttccaacacacccctccttcgagaatcagcccggcctcctgtccggcctaatcagaatcattcttttgcgtaatcccgcctcctccgataagcctcgccccgttcccgcccctaccattccgccctgcctcctttgtgatcagccccgccctccactggtctcgccaatgaatcgcgtcccgtttctccaatcggctcggatgtttctttagcccctccccccggttccgcccccccacgcctctcctcgccctggctccacccttcagccaataatcccatcctctgacaccgcccttccaatcagctacgtctcgctccggcccggccaatcggtgccctgggccgccgcgccccgccctctcccggcggggtctgggcagcggcggccgtggcggagggctatgcggcgggggagacggggcaggcccctcctcctttgtccgccctgccctcccattggtcctagcggggggccgggggcggacaccggcgcggggccggagcatcgcggctcaggctgcgggaaagcggtgcgcgtgcagcggggtgggtgccctggtccgcgggcgagctcgagcagccaaccccgggcgcgtcggggccatggacggcctgaggcagcgcgtggagcacttcctggagcaaaggaacctggtcaccgaagtgctgggggcgctggaggccaagaccggggtggag

SEQ ID NO: 20243 - DNA, 2300 bp, Homo sapien
gcttgagcccagaagtttaagactagtctgggtaacatagtgagaccctgtctcttaaaaaagttaattttaaaaagttttaggccaggcaaggtggctcatgcctgtaatcccagcagtttgggaggccgaggtgggcagatcacctgaggccaggagttcaagaccagcctggccaacatggtgaaaccccgtttcaccatgttgaacggctaaaaatacaaaagttagccgggcatggtggtgggtacctgtaatcccagctacttggtagactgaggcaggagaatcgcttgaacccaggaggtggaggttgcagtgagccaagatcacaccactgcactccagcctgggcagcagagcaagactcggtctcaaaaaaaagttttaaaggtggggagggaggcatttaaggagcgtttactacatgctcttgctagagatttggaaaggggaaggggcgcgcagcgtcaccaagggtgaaagtcacggaagaactgtaatggagtcacaatcggggtgcctggatctccggctctgtgggccccagtccagcctccccacatcacagccgtcagacaacccaactccgtcttaacaaacatttacgctcggtggcactaagccattgagctgggggaaggtgagctagggcaggagaggaggaggaaaggagaagggtcctgggcaggcccccaggacggtccgttccccttcccgccaggagcctcccctcagaaaaacgggaagatctctactgttgcagccaggccggggtccacgggggaagggggacggcgaaacgcgcaggacactggcatcccgacccctctggggccactgggcaactggaagaaccggacttcggcatggcaggcacccagcgcccggaaggaggcgtcggggggcggccaggggcggaagctagagaggggtggcccgggagcagggtcgcagggcgcgggcaagggaagggctgcgggcggacctcgaggtcccagtcacctcgcgcgctccaccggccggaccggaccccgtagccggggaaggagtccggtctgcgacccccaggcccatggcctcggtgtgcccgtcggcgaaacgggctagcgccgacggctcacctgcagccagataccgcttctccaccccggtcttggcctccagcgcccccagcacttcggtgaccaggttcctttgctccaggaagtgctccacgcgctgcctcaggccgtccatggccccgacgcgcccggggttggctgctcgagctcgcccgcggaccagggcacccaccccgctgcacgcgcaccgctttcccgcagcctgagccgcgatgctccggccccgcgccggtgtccgcccccggccccccgctaggaccaatgggagggcagggcggacaaaggaggaggggcctgccccgtctcccccgccgcatagccctccgccacggccgccgctgcccagaccccgccgggagagggcggggcgcggcggcccagggcaccgattggccgggccggagcgagacgtagctgattggaagggcggtgtcagaggatgggattattggctgaagggtggagccagggcgaggagaggcgtgggggggcggaaccggggggaggggctaaagaaacatccgagccgattggagaaacgggacgcgattcattggcgagaccagtggagggcggggctgatcacaaaggaggcagggcggaatggtaggggcgggaacggggcgaggcttatcggaggaggcgggattacgcaaaagaatgattctgattaggccggacaggaggccgggctgattctcgaaggaggggtgtgttggaaagtgggagaggtcaaacaaagggtaggacgcgttatcgcaacagtgaacccgcttctctgggttagtcttgtcgttgtacaaatgggaaaactgaggctcccgagggtgtgggtctgcggaagacgggcaggcgtgcgtccctctcccgcttctgttagatcttcgcgcccctcctggctgagtagccgcaaggccccctgggagtcgaagccttctgcgttgctatggcgccgggggcgggtcggacgcctgggcccactcggcggtttggcgggagggaggggatttgcgcaggccccgctcccgccccgcctccatgcggcccgccccgattgcgctgtggctgcgcctggtcttggccctggcccttgtccgcccccgggctgtggggtgggccccggtccgagcccccatctatgtcagcagctgggccgtccaggtgtcccagggtaac

SEQ ID NO: 20244 - DNA, 2300 bp, Homo sapien
tgcggtatgcactcccaggagggaacaggggctgcggggtacactttccatagaactcagtgcctactgtatgcgctccctgcaggagacagcgccttatgtataccttccttgcaggatgcagcacctgctgtataccttccttgcaggatgcagcacctgctgtatatactctctacaggatgcagtgactgctgtatgcactcctctgaaggtgccatatctactgtatacactcctttgcagggcagagtctactctatgcatttctacaagatgcagcacctgctgtatacccttcctgcagagcataatgcctgctgtgtgtgctccctgtgggcgctgtgctttctgtataccttccctgcggggcacagggcctgctgtctgcactcccagtggagctctgtggactggacatctgggaatggggcacatctgaggaggatacaattgtcctaatgacacattgacacatgtcctgagctgacttctttctttctttctttccttttttttttttttttttttttttgagacggagtctcgcctgtctcccaggctggagtgcagtggcgtgatctcggctcactgccacctctgcctcccgggtttaagcgattctcgtgcctcagtcttccgagtagctgggattacaggcactcaccgccatgcctggctaagttttatatttttagtagatactgggtttcaccatgttgtccaagctggcttcaaactcctgacctcaggtgatccgcctgcctcggcctcccacagtgctgggattccaggcatgaggcgccgcgcccggcctgcccttctctcttgaccccttcagtgagggccttcttgacatccccgcaaccaccaccccccaacctggggccatcagtggtgggcctgggctattttctccaatagtccaggtcagaaggtggggggtcatacattccagggggctgccttacccgctggcctgggactggctgggttgttcacagctgtgcacacagtaggtgctcaataaatggcatatgggtggctctgctgacatgctacaggctggagggcagactgagttggaccagcaacaccctgtatgtccccagcaaacctctctccctgtggtcagcgctgtgggacagcagggtgggcttcctggaggagggggtgctcagaccgagcctgggtggagcccagggagcaggacagtccctccaccccctcctttagtgccccagtccctcagcccgcccgccagggggcgccgtggggcgacaccagaaactggtggagcccagaacccagggcctggtctcatccctgcgtgggtgggcacggggcggctcacagacgcccggcgggaaagggtggggtggggggagtcccggggtgccccctcgcgttgccggtccgcgcagagccggattccagatggaaggttcgcggtggagatccctgccgggcccactgctgggatggggaaactgaggccggagagggtgtggccgcggctgtgagggagagggaccgcctggacccgggtctggctctgaagccccgctggcagccccggggcccggcagggagggcgggaggcggggtggggcgcgtcccctggtgacagcagcgcccgggaatgcgccagctgggagggtctctccgccccccgcgcgcggcccacggggccgagcctctccccagtgcgctggggccctgcgctgggggtgaccgggacctgggtcggggaacccccggatgggagcccaggcgcgccagggtccccatccacgagcaggtcgaccccccgcgagaggggtgaggggcaggaccaggggagggggctgtgaccggggatggggacgccggtgggacgcaatccgggcgtcggcggggtaggggcagcgcccgggactcccagacccagggcggggtgacctcggttcgcgcacattcccgggccctgagcgcggcgcccggaatagcagccccggggcagaggagggcggtcagtccccgcgccgcgcccccgcccgagcctgccaaggtcacccggacccgggcgcccgacaccagcctgcggctccgggacccctgcgctcgcgtccgccgggcagtcccctgccgcagatccgcgcccgccgcgcgagggcgcccggggccgccgcccctcctgacccgggcctgggcgcgcctgcggaggccgcggtgggagggaccgtcccaggctccccaccccgcccagcaccttgggccccgccgcttccgctcgccctggggccgctcagggagccggg

SEQ ID NO: 20245 - DNA, 2300 bp, Homo sapien
cctagactccaggctcagccacatgcagtccgcggtgatcctgggctggcaccggacgttcggagcctcagtttcctcatctgtaacacagggctaagaacagcacctgcctcagggacaagttactgcccagaacgggcctggctcacttccttccacctccaaagctttccttgacccctgacttggtgaagtcttggacgttcttgcagtccgttaagcagtggtccttttacgaggacagggctgggtctgccttgggctcgcacagcctgacacaggcccatatgcagtaagtgcttaacaaatgcctgaactgatgccaggatggactggtgctatcaggaaggaaccggaagccaggcctggtggctcacgcctgtcatcccagcattttgggaggccgaggcaggcgggtcatttgaggtcaggagtttgagaccagcctgaccaacatggtgaaacccgtctctactaaaaatacaaataaataaatacatcagctgggtgtggtggtgcatacctgtagtcccagctacttgggaggctgaggcaggagaattgcttgaactcgggagatggaggttgcagtgagccaagatcacaccacggcactccagcccgggtgacagagcaagactctctttcaaaaaaacaaacaaacaaaaaaaaaagcaaggaactggctttctgcccctggaggattccagggtgacagtcgtgtgacagctcagacactcgggccccgagcagcccaccttgcagccacctcacctgattctcatcagcaggggacttgggctccccagctgcaacccggtggccccaggctggccaggaatcttccgccctggccctgggaccagaaaccccgcaaaggtgcccgagctcagccccgtccaatgcacgggggccccattcgtgacaccaggtggacacgtgacggctcagaaggtgtttcctgtccctagtggtgtggccgggccagattccgaaatctggtccctggaaaattccagccccacggagcctggtaacccctccccattcctggtgttatgtaacatttggggattaataccgcaggcgtccaggggcggctgccgggattcaaacccagcgctgccctttcctgggctgactgagcgactttgcgtccctgggtctcaatgtcttgcctgtacaatggggacaaggcccgtttttgtgtcccaggctgggtggaagggtgagggaagacctcaccaggaaaggggtgcacctgagtctggggcagggcttggagcaaccacccccacgattccgggggagtctcaagccccccactgtcttcccacccagctgttctctgagttctctgaggtttctgatgctctctgaggtcgccatttcaaggacgtccccacctggctgtccgtgcaaaccccagccagggtccacctgctgctccacacagcccatcccttctccgggctgaagctccctcatatgggacatccactacactgtaggaccccagcccatgcgtccccaagccccggtcctgcctcctgggtccctgtcccaggcctcaccgccctccccaccagccccagcatcacaaacgctgggcttctctgccgctccgaattctgctgtggctccccagtgcccagggccatcaagccccaggttttcatgtgggccccagggacccgccagcagggaggacccgaaatggcacacattcagaacgtcgaggctcatacctcaagcgcactgtgggggagaagcccccggaagcccccaaccccccacgcgcgagagagcctcagtttcccgctcggtaaagcgggcgtatcagcggttcccagccagcccgggtgtgcagggtcggaggagctcgcgggctgagcgcggcccctggcgcccggttggcgtgcgggactcgggcgcgctctggtccgtggaacttccccagccgcggcgtccccgccgctcacgcgccccccactccacggccgggcacctcccgcccctccccgggctggacctgcgcccgggctccgccccctccccgcccccgcggccaataaaacgctccccggcggctcctgcgccctcagagcggccccggagcggccgcagcgcggtggtctcggcccggctgcgccagagtccgcgcgatggagccccggccgcggcggcggcgcaggagtcgccccctggtcgccgccttcctgcgagacccgggctcgggccgcgtgtacaggcgcgggaagctgatcggcaaggtgggaggcccgcgccccgagtccgcg

SEQ ID NO: 20246 - DNA, 2300 bp, Homo sapien
gagctcagccccgtccaatgcacgggggccccattcgtgacaccaggtggacacgtgacggctcagaaggtgtttcctgtccctagtggtgtggccgggccagattccgaaatctggtccctggaaaattccagccccacggagcctggtaacccctccccattcctggtgttatgtaacatttggggattaataccgcaggcgtccaggggcggctgccgggattcaaacccagcgctgccctttcctgggctgactgagcgactttgcgtccctgggtctcaatgtcttgcctgtacaatggggacaaggcccgtttttgtgtcccaggctgggtggaagggtgagggaagacctcaccaggaaaggggtgcacctgagtctggggcagggcttggagcaaccacccccacgattccgggggagtctcaagccccccactgtcttcccacccagctgttctctgagttctctgaggtttctgatgctctctgaggtcgccatttcaaggacgtccccacctggctgtccgtgcaaaccccagccagggtccacctgctgctccacacagcccatcccttctccgggctgaagctccctcatatgggacatccactacactgtaggaccccagcccatgcgtccccaagccccggtcctgcctcctgggtccctgtcccaggcctcaccgccctccccaccagccccagcatcacaaacgctgggcttctctgccgctccgaattctgctgtggctccccagtgcccagggccatcaagccccaggttttcatgtgggccccagggacccgccagcagggaggacccgaaatggcacacattcagaacgtcgaggctcatacctcaagcgcactgtgggggagaagcccccggaagcccccaaccccccacgcgcgagagagcctcagtttcccgctcggtaaagcgggcgtatcagcggttcccagccagcccgggtgtgcagggtcggaggagctcgcgggctgagcgcggcccctggcgcccggttggcgtgcgggactcgggcgcgctctggtccgtggaacttccccagccgcggcgtccccgccgctcacgcgccccccactccacggccgggcacctcccgcccctccccgggctggacctgcgcccgggctccgccccctccccgcccccgcggccaataaaacgctccccggcggctcctgcgccctcagagcggccccggagcggccgcagcgcggtggtctcggcccggctgcgccagagtccgcgcgatggagccccggccgcggcggcggcgcaggagtcgccccctggtcgccgccttcctgcgagacccgggctcgggccgcgtgtacaggcgcgggaagctgatcggcaaggtgggaggcccgcgccccgagtccgcgacggggccggaccgggctgggctggggtcccggggcgcgcgggcgatcctgcgcggtctacgcggcgcgtccctgcgagcgcggggtctggagcgggcgcgcgtccggagccgcggggcctcccgtgcggggtttcgcatggcgggaaccgtgttgagcgcgctgtgcgtcgtgtccgtgggttgcgtgtccggggtgtgggcgtgcggctcggcctcgggatgcgacgctgtgttgcccctgggtgtgtgtgcgagcctggcgagggtctgagtgtgccgcgtctgtgcccgctgcttccaagtgtctgggtgctgtgcggtgttcgtgtgtgtgtgtgtgtgtgtgtgtgtgtgtgtctgggtgttgtgttgcttgttcacctgttgtttgtgcgtcatgcctttgtgtgtccagtcattgtgttgtgtgtctgggtgttgtgtgttcatgtggtgtgcttgtgtgtttgtgtgttcatatgtggtgtgtctaggagttgtgtgttcatgtgtttgtatctgtgtctttgtccatgtgttgtactgtgtgtccaggtgttgtgtgttcatgtgtttgtgtgttcctgtgctgtgtctgggtattgtgttgtgtgtccacacgtggtgactgtgtgtccagacattgtatattcatgtgtttgtgtgttgctgcgttgtgtatctgggtgttgtgttgtgtgtccatgcatggtgactctgtgtctgggcgttgcgtgtttgtgtgtcgtattcaggcgtggtgttgtgcatccggtgctgtcttctggtccgtggcctctatgcaccaggcgtggatgtgtctgtgtctgtgtctctgtgccttcttgtgtgcatcatgtcttgtgtgtccaggcgggagggt

SEQ ID NO: 20247 - DNA, 2300 bp, Homo sapien
gaggagaagccttgctaggcaaaggggcaggctgccccactcctgcccagagagccctgccttcggtccaagtttgcacagccagccagggacaggtctggtagaagaggggggcaggtagacccagccagacaggtttatcacaaaaaaccccacaggtgcaaggaaggccccgaaggacagctggaggaagagccgctgggaaagcggctattttttttttttttttttttttttgagaggagtcttgctctgtcaaccaggctggagtgcagtggtgcaatctcgactcactgcaaccaccacctccagggttcaagcaattatcctgcctcagcttcctgagtagctgggattacaggtgcgcgccaccacgcctggctaatttttgtatttttagtagagtcgggggtttcaccatgttggccaggctggtctctaactcctgacctcgtgatccacccgcctcggcctcccaaactgctgggatgacaggcatgagccaccgcgcccggcaagggtggctttagaggtggacaacgcccgttgcggggaaaggcaccccagaagagggtggggctccacatggagggttctggctggtgtgagcctgccctcgccatggaagcaccactgtggtagagaggtctctggctgggggcacagagaccgggtctgtggccttgggtggggcggaggaggtggcgtggaggaggtggcctgatcccaaagccgggagccagccagaggggagctaggagagactaggggagagggacctcaggccctggggtgtgcatgattgtggagctgtccctggcacagaggctgggggtggggcaggggcctgaccctaaagcccacctgatagcaaggggtacttggggactgggaccccaggccctggggggtgcaccgtggggcgggggttggaccctggcacagaggcggtgggcgggcaggagcctgacttcgaagtccagtgggatcgcgagggggacttggagaggaccccacgcctttatgcagggaggtgggggtccctggcacaaggaagcgggcgtggagcaagagacctcgcttgggggcgacccggatctctaggggaaattggggagcgggacctcgggccctggggcgcgcgaggcagggactctcaggcttggggagggagcgctgtccaggcaggggctgagccgcacacacctgcagcagcgcccgcacgtgcggatgcgcccgggttcccgcccgagcgccgggcggaggcggggcctggaccacgtgcccggcgccggccccgccccggccccgccccgcgcgcctgcgccctgggggccgcccattgttgggccgcggcgtgacgtcgcgggggcggggccggggcggggccgcgggaggcggcgggagggaaggagcgtcccgcgccgccgccgccgcctcggccgccgaggagccgccgccgccgtcgccgccgccgccgagccgcagccagagtcgctgccgccgcccggcccggcccggcccggccccgagcagccccgcgccgccgccgccccgcccgcccggccccccgtgcccgcccccgccgctggatgcaggcggccggcggcccagctcgcagaggcggagggcggcgcgggcggcggcggcggcgcgggcggcaggagcgcgggccccagcgctagctcccgccatgcccagctcgctcggccagcccgacggcggcgggggcgggggcggcggcggcggcggcgtgggggcggcgggggaggaccccggacccggacctgcgcccccgcccgagggcgcccaggaggccgcgcccgcgccccggccgccgcccgaacccgacgacgcggccgccgcgctccgcctggcgctggaccagctgtcggcgctcgggctggggggcgctggcgacacggacgaggagggggcggccggggacggcgcagcggcggcggggggcgcggacggcggggcggctccggagcctgtgccccccgacggacctgaggccggcgcgcccccgaccctggcccccgccgtggcccccgggtcgctgccgctgctggaccccaacgcgagtcccccgccgccgccgccgccccggccgtcgccccccgacgtgttcgcgggcttcgcgccccaccccgcggccctggggcccccgacgctgctggccgaccagatgagcgtgatcggcagccgcaagaaaagcgtcaacatgaccgagtgcgtcccggtgcccagctccgagcacgtcgccgagatcgtgggtcgccagggtgagtggccct

SEQ ID NO: 20248 - DNA, 2300 bp, Homo sapien
cacagtcgaggcacgtcatcgggcagccttccctgtgtgccaacgccagccttcgcttctgaaaaccaaactccagccgctgccagtcgggacttggtcgcccggcgctgccagaatgctccactgccagccggcccccctgcctcggtttcccttctgtttagtggcgacacaggcacccagctttggggtggtgctgacgctcccaggggtgccaggagccactgggacagggtgaggctcccagacgctcctcgaggtgcccagctctccagggagcttctggcccaaggccgtctgagggatctgctccttaaccccccagtgccttggcgagggcaggttccaagccacagacgcctgccccgagtggactctgcggccagtccctggtgccctcctggccctgctgcccagtgagggctcctacgggtgggttcattggcctgggcccagcgagcccccacctgcattgaccttaggcccatagagagggcctgtcccggtgctgccccagccaggatctggtcgctgccccagggggactgatgggcagagtcgcccctgtggctggactgtgaccatccctgatggggcctgaccgcgggagctgaggaagcgccgctccaccgtctgccctccaaggacccgcatggaggcagtgggctggcagcttcctgctgctccctgtcagagtcaaagcacaaatcctcaggacgggctcaagggccagggcagccgagggaagctccaggtggggaccacgtcttcctgaggttggtgcccactggctgggaccctttgcagtggggtggcctcccctctgtctgcctggtggagggagccgtgggcgtggggacgtgactgaataaagccaccatgggtggatgtgcttggagcctggagttcggtgcgtccgctagactttggtgcccacgtttgagcttctgtctttggttgggtgatgaaaggctgaaagcggtgtggggacagggccagcaggtcccccaacctcgcggacattcacaacccaagagtcaggcttaggggtattcagagaagaccaggccggcctgggcatctgtgggcaagggccgtgccccctgaggtgccgctggctcagcctagggatcgtgggtcttggccctgctgccccggtgaggaagatgggctggggctcagacccagcaccgctccttccaaaggaagggaagcaggaggggctgcctggcagggagggccccccaggtcctcaggtcctgcacagccgctgcagggaggggagctgtgccccgggaccctggacttcagctcactagccatggccactggaagctgctttctggacctgaaggctgggaggccaccctcccctcatctgcccggcactcagagacactctgtttccctcttcccatctcccactgtgtccctgtctcccttggtctctctctgtctctgtctatccctgtctctatctctccctcttgtctctctcttgcgccgtctccctctctgtccctctttgtttcttgctctctctcctgtctctctccctcggtctctgtctctgtctcttgctgtctctccctctctgtcgcagcccagcttcctgtcactgacagaccccgatcagtccctctgatcccggggttctggccatgtcctggccttggtctgagatgtgatgatccctacccctgccacagggccctccccactggaagcccatccaggccctgggctgtcgctgttgacgaagcttgagggtcctttcctctctccctgaaaccttggggacccccacaggccaaggcaatactggcctttgctagaggtcgtgcccggtgagaagtgagttgtaggcgtgggcacctgaggggccagcccagtgctcaggccctcgtcaaattccctgccctggaaaagtctcagaccctcaggctgaaccccctgggcgcaccgaggctccacactccagccccagaacccagacctggcatggggcggggaagcctgagctcccaatgctgggatctttcgtgggggcctcatgaccagcctgccctgtgcggtgcctggccccatcctcaaaggccacttggctgcccccagccccgcccatgtctcagccccaagaccttctgggactttttttttttttagacaagagtttcgctcttctttcgctcttgttgcacaggctggagtgcagtggcgtgatctgggctcactgcaacctccaccttctgggttcaagcctcagcctcccgagtagccaccacgcccagctaattttt

SEQ ID NO: 20249 - DNA, 2300 bp, Homo sapien
aaagaaggagccaagacccggaacggccagggaggcgctgggcatgcgggtttcctgtggcagcagccggggttaaaggcccctgggcacaagaagagaccctgtgcccccacacagggtgaacagatggacctgagacgccacccccacaagcacacaaactgtgggcgccaagggttccatccggagcggctggcggcatcctcctccggccgtggtacctctgggccccctcttttgggtttgaggtccatttacactctctgcgcgctcagagaacttcccgaaatgaagatggtgaaataggaagaattgtcaacaaaagaaaagaacaagactgtgaaaaatagcagacagatcattaaaagccctgcagaacttgcagaaataaggccgggcacagtggctgacgcctgtaatcccagcactttgggaggccgaggcgggaggatcacctgaggtcaggagttgaagaccagcctggccaacatggtgaaaccccgtctccactaaaaataaaataattagctgggtgttttggcacatgcctgtagtcccaggtactcgggaggctgaggcaggagaatcactggagcctgggaggcggagttgagatcctgccactgcaattcaacctgggtgacagagttaaaaaaataaaataagaacttatagaaatagaaaagggcattgaaatgaggaactcggtggtgggttccgcaggaggtagggtcctgtctggaaagatgacgagcaggtggtggctgcagtcgagtaggtgagccagggtgttccgggtggtggggacagagtgagagggagcagctcaggtctgcaggagccgctggagagagaccccggaggcagggggcggctgagcctcggccacaactggggagaaacaaagtcagctttgcctgggactgaaagcagaacagagacgggctctttgggcagccggagagggaggtgggcagaagcacgtgctgcggccccggaggcggcaggcagaggagcggccaccctggagtgcctggcatcagcttgtaggccccgaggaggaggccccccatccctggtggtgggttgagacgagggtgtggattctttttctcaggccgcccgagccatggtaaaggagtacacgctggtgcatagtgggcagcggaaaggtgacccccggcctgcgagggtgggggctgctgcgggctgatggtagctgattttggtgaggcttgcttttttttttttttttttttttttttttggcagaatctggctctgttgcccatgctggagtgcaatggcgccatcccagcccactgcaacctccgcctcccgggttcaagtgattctcctgcctcagcctcccaagtagctgggactacaggcggccgccaccacgcccagctaatttttatatttttagtagagatggggtttcgtcatgttggtcaggctggtctcgaacgcctgacctcaagtgatctgcccacctcggcctcccaaagtgctgggattacaggcatgagcctctacctggcctggtgagggttttcctgccccactcagtgcctgtcaagggacaggagcaagggtttacacagctgagccccggggaggctcagggccaagtctggggactgaagggtcaggcccctcccttggtcccagtagaggtggcaggggggccatctgggagggtggcggacgctggcgatggccagcggcagccggtcattctctgcgtggattgtgaagggaggggtggcacgggccagggctggtcctgggggggtgcctgtggatccctcgggcctcccctcccagctgaggtccccacgttcatcctgtgtccatgtcctgctggccgctcaccttggtgtaacgcaaggtccatgtgtccccaggaagcaggaagagctggtgcagcaggtgcggaagcggctggaggaggcgctgatggccgacatgctggcgcacgtggaggagctggcccgtgacggggaggcgccgctggacaaggcctgcgctgaggacgacgacgaggaagacgaggaggaggaggaggaggagcccgacccggacccggagatggagcacgtctagggcaggtgctgcggggccacgggggctccctggagtcgggtcctggcagtggggactgcctggtgaacacagatgtgcttgggatgacgggtgcctcccaagagcttcccatctccctagaagagcccaagcgtccccgtcccgtggagtcgctaaagccagccctccctgtcctttccagaggccctgcc

SEQ ID NO: 20250 - DNA, 2300 bp, Homo sapien
agactccatctcaaaaaaaaaaaaattaggcgtggtggcttgtgcctgtcgtcctagctacttgggagactaaggtggaaggatcaccctagcccaggagttcaaggttgcagtgagctgtgattgagccattgcattccagcctgggcaagagtgagaccctatctccaaaaggaaagagagaaacgaagtcctgtccctatcagcagccactccacatcctgcaccccagcctctggcactacgcgtccccttcctgtctctgaattatcctgttctagacatttcttagaaatgggatcacacactgtgtggccttttgtgtctggcgtctctcactgaatgtggcgtcctcaaggtgcatccacgctgtggcctgtgtcagagcctcgctccttttcatggctgagtatgtcccatcgtgtggatgggcgtttgtccgttcatccattgaaggcgtctgggctgcttccaccttctggctcctggggacatccgtgtagaagtgatggtgtggatgcgtgctcatttttcgggcagatacctaagagtggcgtggccgggtcatctggaaactcagtgaagagctgtcaggcttttccaacatggctgttccatcttacatcccaaccatgatgacggtgtgttgggttgggtgcttgtcatcctgtagtgtgacctcatgtgacacacagggcaacccattggtgggtgtccttatgtcctggagaggatgagttgccggcgcttgtccatggcaggctgagagcagagccccgtgtctgagagcaggtctgtgtttacctggctgccttgttgcgagctctccagtcgggttatgcccaagcagctgttagggcctggccccagatcttagaacgagaccccttcccagtctggccctgctgctgtaaccccaaggtggaagaagattgcttttagggctgtccctcacatacctgttctccgtggggtcttttctcaagaatgtgacctaaattccatgtctggaatgttctggacatgtgagccatcctcccagagccggggcccaaagccctgtaggtagtagcgtttgtacccgaactcagcgtctgctgtgcctgacgctgccagggcctacggtggggaggattcagaggggaccggggttgggggtctggagcaaggatccgatgtggaggctggggctagggccagggtgtgaggatcggggccagtgctctgggtctggctggcgcccagatctaggggccagttgtggggtgctggggtctgggatgaaggtctggggtcacgccagggttggggtctggggctggggccagggcctgcctgggtttggggtcagggccgtgttggggtctggggctggggtcgcgacctgaagctggggctgggactgggtttgggtctgcggccgaggcctgggtttggggtctggggtccgcccggggcgccgaccgtcccgcctccccgcagcccgagcgggaagaagttccgcagcaagccgcagctggcgcgctacctgggcggctccatggacctgagcaccttcgacttccgcacgggcaagatgctgatgagcaagatgaacaagagccgccagcgcgtgcgctacgactcctccaaccaggtcaaggtgagtggtggcgtcacgcaggtgacgtcggcgcggggcgttctaggcggggacgcggccatgacgtgagctgcaggcgacacagcccggcgtcctgagcgcaggaggtcacagcgggcggagggcacagagcggaaggcgcaggccacagggtgcagagcgcaaggcgcatggcgaggacgcggcccgcggcgggcgttccagagccggccggaccgaccctgcgggagcggcctccccggaccgtgggggtcctggcgggcgcgggggacacgaggggcgccggcaaagcagggggtcacccgggccccgcaccccctgaggctccgcgccgccggggcgcccccaggccggactgcatatccttcctcccgcagggcaagcccgacctgaacacggcgctgcccgtgcgccagacggcgtccatcttcaagcagccggtgaccaagattaccaaccaccccagcaacaaggtcaagagcgacccgcagaaggcggtggaccagccgcgccaggtgagctcaacgcacagcgaccccagccttcccggccgggttgttcactttggtgggtggacgtttggaatgaggtcgtacgtggagcggacgtagtgagcgcaggagttccaggctagcctgggcaacatgacgaggcaaaa

SEQ ID NO: 20251 - DNA, 2300 bp, Homo sapien
ggtggctcacgcctgtaatcccagcactttgggaggccaaggcagccagatcatgaggtcaggaggtcgcgaccatcctggctaacactgtgaaaccccacctctactaaaaatataaaaaattagccgggcgtggtggtgggcagctgtagtcccagctactcgggaggctgagtcaggagaatggtgtgaacccggaagtcggaggttgcagtgagccaagatcgcaccactgcactctagcctgggtgacagagcgagactccgtcttaaaaaaaaaaaaaattaggccgggcacggtgactcacacctgtaatcccagcactttgggaggctgaggcggacagatcacctgaggtcaggagttcgtgaccagcctggccaacacagtgaaacctggtctctactaaaaatacaaaaatcagccaggtgtggtggcgggcacctgtactcccagctactcaggaggctcaggcaggagaatcacttgaacctgggaggtggaggttgcagagagccaagatcgagccacttcactccagcctgggcgacagagtgagactccatctcaaaaaaaaaaaaattaggcgtggtggcttgtgcctgtcgtcctagctacttgggagactaaggtggaaggatcaccctagcccaggagttcaaggttgcagtgagctgtgattgagccattgcattccagcctgggcaagagtgagaccctatctccaaaaggaaagagagaaacgaagtcctgtccctatcagcagccactccacatcctgcaccccagcctctggcactacgcgtccccttcctgtctctgaattatcctgttctagacatttcttagaaatgggatcacacactgtgtggccttttgtgtctggcgtctctcactgaatgtggcgtcctcaaggtgcatccacgctgtggcctgtgtcagagcctcgctccttttcatggctgagtatgtcccatcgtgtggatgggcgtttgtccgttcatccattgaaggcgtctgggctgcttccaccttctggctcctggggacatccgtgtagaagtgatggtgtggatgcgtgctcatttttcgggcagatacctaagagtggcgtggccgggtcatctggaaactcagtgaagagctgtcaggcttttccaacatggctgttccatcttacatcccaaccatgatgacggtgtgttgggttgggtgcttgtcatcctgtagtgtgacctcatgtgacacacagggcaacccattggtgggtgtccttatgtcctggagaggatgagttgccggcgcttgtccatggcaggctgagagcagagccccgtgtctgagagcaggtctgtgtttacctggctgccttgttgcgagctctccagtcgggttatgcccaagcagctgttagggcctggccccagatcttagaacgagaccccttcccagtctggccctgctgctgtaaccccaaggtggaagaagattgcttttagggctgtccctcacatacctgttctccgtggggtcttttctcaagaatgtgacctaaattccatgtctggaatgttctggacatgtgagccatcctcccagagccggggcccaaagccctgtaggtagtagcgtttgtacccgaactcagcgtctgctgtgcctgacgctgccagggcctacggtggggaggattcagaggggaccggggttgggggtctggagcaaggatccgatgtggaggctggggctagggccagggtgtgaggatcggggccagtgctctgggtctggctggcgcccagatctaggggccagttgtggggtgctggggtctgggatgaaggtctggggtcacgccagggttggggtctggggctggggccagggcctgcctgggtttggggtcagggccgtgttggggtctggggctggggtcgcgacctgaagctggggctgggactgggtttgggtctgcggccgaggcctgggtttggggtctggggtccgcccggggcgccgaccgtcccgcctccccgcagcccgagcgggaagaagttccgcagcaagccgcagctggcgcgctacctgggcggctccatggacctgagcaccttcgacttccgcacgggcaagatgctgatgagcaagatgaacaagagccgccagcgcgtgcgctacgactcctccaaccaggtcaaggtgagtggtggcgtcacgcaggtgacgtcggcgcggggcgttctaggcggggacgcggccatgacgtgagctgcaggcgacacagcccggcgtcctgagc

SEQ ID NO: 20252 - DNA, 2300 bp, Homo sapien
aatctcccagccgggcgtggtggctggcgcctgtgatcccagcactttgggaggctgaggcaggcacattgcttgagctcaggaggttacagtgagccaagatcacgccactgcactccagcctaggcaacaaagtgaaaccctgtctcaaaacataattatcatctcccttgcatgggggcaggccttgctctggctgccctagtcaggtaccacggctggttctggggtgtaactgcctggctttgagtccacagcatagactttcctgtctccttgggagcactgattcttccatggcagcccaatgccatggggcctcggtctcaggccagtaaccagctcctgagcttctcgggagacagagctggctgtctcacacctcacctcacctcacgacgaggtggggtgagcggggcatccgaccatcatccacccatccatcctgatttattcagtgcttctgtggtcagcacaacatcccgaaaatgtgcccgttccgtcggccgctgtggctcacacctggaaccccagcacttagggaggccgaggtgggcggatcacttgaggtcaggagttcgaaaccagctggccaacaaggtcaaatcccatctcttctaaaaattcaaaaaaattagccgggcatggtggtgggcgcctgtagtcccagctacttgggaggctgaggcaggagaattacttgaacccgggaggtggaggttgcagtgagccgagatcacgccattgcactcgagcctgggcaacagagcaagactctgtctccatcagtcagtcaatcaatcaataaatgaatgtgcctgtcctactccctggaacctgcagctaaagggactttgaaaatgggacgagatcttcagatgggaaagcatcccagatcgggtggacccaatgtcaacaaaagagtccttagaaccaggacagtttctccagctggaggcaggggagcacagcagctagactcagtccttgaacacctgtgcaggcccgcccagccctagccttgggagcgacgctgtcagggggaactgatggggggcagcccacccgtttccatttcaggatccctctggctggctggggaaggggttaaggggagacaacagggggtgggcgattccgcaggaaggtcctggaactctcccggccagagatggtggctggactaaggtgcagggggtggtcggggagctgggggggggtgctcagattcctggattttgagggttcaaaaagcagctggacggggcgcagtggctcacgcctgtaatcccagcgctttgggaggccgaagtgggctgatcacctgaagtaaggagttcgagtccagcctggccaacatggtgaaatcccgtctctactaaaactacaaaaattagccgtccgtggaaccagctacttgggaggctgaggcataacaacttgaacccgggaggcggaggctacagtgagccaagatcgcgcctctgcactccagcctgggtgacagagaccccgtctcaaaaaaaaaaaagctactggagggaacttgggggcgtggaaggggtggtcacgggggaagtcccccagatttggacgctcgtaaaaagctcggaagctgggagaccaggagggcggggaagtcgaggtccagtcactgggccagagtccccaagacttgggctggagaaaggtcggaggaaaggaccccactagtccgaaagcatgtccccgcgcacgcgcaccaggcggccggcagagacagggcacagtaaaaggagccgcgcggactccgggcacagctgctgggcactggcagctcgcaaggcacagcgcgcaggcgcgcacgccacttaaggccccgccccctcccagcgcgctgattggcggggccgtagaggggcgggggcatggcgccgcggctgcgcagcgcggggccccgcgcgggcgggtgggcggagcgggccccccgagcgggggctggcgagcgcggggagggggccgaaagggcggcaaagccggcgcgcgcccggctgggggcggagggcgggggcccgcgggccggaacagccgcggcaagtggcggcggcggcagcggcagcggaggcagctgaggcggcggcggcgagtgggggtccgggcggcggcggcgggcccggcggcgggccgaggagccgggcgcaatggagcggaagaggtgggagtgcccggcgctcccgcagggctgggagagggaagaagtgcccagaaggtcggggctgtcggccggccacagggatgtcttttactataggtgaatgagc

SEQ ID NO: 20253 - DNA, 2300 bp, Homo sapien
agatggtccaacaaaataacaaaaaccggctcaagaaacaaaaaggaagttctatgtcatgttgaatggcttcaggcacagctggatccaggtgtcattacaaatctctctccatctctcagctcttgtttatgtcactgtctctgatgaactcttttttttgtctgtttgttttgagacggagtttcactcttgttgcccaggctgcagtgcaatggcgtgatctcggctcaccgcaacctctgcctcccgggttttcaagcaattttcctgcctcagcctcccgagtagctggaattacaggcatccgtcaccatgtccggttaattttgtatttttagtagagatggggtttctccatgttggtcacgctggtctcgaactcccagtctcaggtgatctgcccgcctcaacctcccaaagtgctgggattataggcgtgagccaccgtgcccggccactggtgaactcttacattgtggcatctggaaactctgggctgacattccagcagcccttgtgttcctgtcctttctcttaatagtctctgtgtcagcccctgcatcccacttttttaagtttccaccaatgggaagagtcttattcaggtgctctctgatcccaagctcaaaaaccccaagccaactggaaagttctacaaacaatgcccagggccgggcccggtggcttacacctgtaatcccagcattttgggaggcggatcacttgaggtcaggaattcaagacaagcctggccaacatggccaaaccccatctctactaaaaatacaaaaactagccaggtgtggtggctcacgcctgtagtcccagctacttgggaggctgaggcaggagaagcttgaacccgggaagcggaggttgcagtgagccgagatcgtgtcattgcactccagcctgggccacagagcgagactccgtctcaaaaaaaaaaagaaagaaaaacagtgcccagactgtggtgtccaaaacctatttccggctcccaccctgagtccttaaccagggatagggatgggttagcacccgcagtccccagagagctgcaggcttggggtgtactgaggggctgaccccaggaggacaggccaggctgggcagaagaacccacggtgtccattccttatcacgaggcctgcaagtgacgctggcgcccgagagacaaatcacgcccagtgccccgtctaggctatggcctttccgttcatgctgtaaaggtgcctgtgggtcaggcagtccaggagggcttcctgagggaggcaactcttgaatatgggggaaaaggcacaaaagtgcaatggcggtgtctgggaatatgcccctcttccttctgcccacaccggcccggtgtgcaggggggaggctggaagctgggagctgagtgagcatgtacggtgctgcgccgggttgtgggagagcagaggaagcagggactggagaaaggcgagcccaagcgagcctggtgcggtggaaagcaggaggcagaaagacctgcctgtcatcagctaagagcatccagagacgttcaccgagcaaggagccaggccaccctctgctgccggaatgaggaataacccaggctcgcaaacggaatcctgcaaagagatttccgacagggcctccaagcaacgggcaacgctgaggctcagggaagcactgccgctcgaccaaagtcctacagcgaatcaggaacaacgcctgacgcctccaaaagtgggctccaatcccagctcttcccctctgtgtgactctgagcaagacccttccccgctggacctcagtttccttcattgtaaataacgttctggcacatactaggcgcacaaaatcactggcaggtagccccgcggagcccagaagcacaatcggccgccagaccacgtggccagaaagcaccgccctaacgccgcccactccggaccacttctccgcggtcgtccaaccctcgccggaagttactgtaagtggcttccgggtctgcgcgcacagtggcggatgatgtttttttttcctccccccccccccgccctccccgcgcgcgtgcgcgccgcggccgcgcctgcgcagtgtagccgggtcagctggacagggtcatcctgagggtgcgactccgccgcgatggtgacccggttcctgggcccacgctaccgggagctggtcaagaactggtgaggacgccgacccgcggccccatccgcgctcccgcctcggcccagccccgcgccgctgcgttccgtatttgtgcgcgtttccgggggccgggccgggccgggcccaggtcc

SEQ ID NO: 20254 - DNA, 2300 bp, Homo sapien
gggccctctccccagcgcccctgcgccgtccactcgcaggcctctcccgaggcagccaggctggcccagggcaggaaggtgcccttcccgggtaaaactctgcggtgcttcaccaaagaaatcacagaaaaccacactctgacagcagtgtcttattctattagtacattttaattagaacaggagcaatggatgcattatgaatattcatggtgggttattaaaatgcatcattaatcggtgggggggattttaataactgtattaatgtgggggctgtccttatttttgtcatttctaggaggaggccaaggctgggtgagggagggttcccccaaagggcagattgaggccgcagtgcctctggcacaggcctgttggagtgaacttcgggggcgatccctgggcatggggccccaggaggtcccccaccacaccaggccttccaggggatgagggctggggtgccaggagcctcccgtttgctcagttgggggtctctgcacctcctggggtactggctatggccggaggggaccagacaacatgcaggtggtatagaggcaaactgagacccagagggtgccggcgctgtgcccacccctacacagccagcccaccctggcctcagcagctgccctgttcaccagggcccacgtgcaggaccaggatcttggggtgcagatggcccagacctggcagcgaatgccgtgtggattcctggagaccacaggagccccctgcctggcccccaacccagccaaggcagcatcccagccccccactcataatcacattggaaatttttgattagaaaacaaaatctaaatgaggcgcatgaatattcattagacttggagattaatatgcataattatgcaaatcagacagcaattaaacaccaatactccccggggggaatgattaacacaaaggcaccgaaatagaaggatgcgatttgaaagaagtttctggtgtggatgagcagggagggcagggggcggggcgggggagcctgcagaacagcctgaggtggtgccggtcacagacatcagcactgggctgggtcccccaggcctggctctcgggaagcctctggacttgggagttggacatggacacccccagccctgcaaaagtagggcctgtttgtaaatcatttatagagagggaaaccaaggcagggcagcaactccgtggccaagctgaggaggcccagggcccgctcctgcttctccacgggtgtgctctgtggcccccgatggaagggggaaggatccaagcaggccctccctgcccagggcagaagattctggagtcctgggcgttgcctgtgagtgttctgagagataagggccccgcccgccccgccccgggaccaaggtcctcgtcccgtcccttgctgcgccgggaactcctgccccacgcaggcttctggtctccacactgggcttgttcctgggtgatgagattcggctccaccctcacgggctgccagcctcctgcccgatgggtgagcctctgctgctgcttcagcaaagggcggccccacttcccacactggcaggtggggacagggagaccctgggcctccccagagctcatgggttagcttccacaccctcatgctgtcatgagcctttctcacagggtcagaagagtctgcatctgacacagagaccccagtccacatagtcagggctgggccagagggagggacttggggctgatggggaggaggctcggcgtgagagtgaggtctttgcccaaggagggtatgaaagctggggctttagtgggtgggtaggagttggccagcagagagccgacggaagagttaatttaagtttatggacctgtaagtgctccgagtcccagggtgtctgggtgttagctgctgactggtgtcctcatgagtcgggctgggtgaggctgggttaggaagggttccacaagccccccgggtccactgaggtttgcccctgagatgatgaaccgaagcttttagagctgggcaggcgtgagggtgacccataactctctctgtcctgcctgcaggtcttgaggaccggcccagctcaggctcctggggcagcggcgaccagagcagctcctcctttgaccccagccgggtaggagtccccgtgaggcctgagaccctgagtttcctgtccccagagttgggggcgaggggtgtggggaaactgaggctgagagaaggggccagccttccaggggtttggactgggggacatgggtttgagtcctgcctctccagctgtaatgcggggtggaggggg

SEQ ID NO: 20255 - DNA, 2300 bp, Homo sapien
acctttgtccgggggggggcccccccgcttcatgccgccgcccccccccacgcgccgcgtgcccggccgcgcccagcaggtgagcccggcggggggcggggggcgcgcccggtacccccgtgctttgtgcccagggaaccccggcccgccccgcgcgcgcttgttgggggggggcgcggaggaagttggggcgggggcggtgtcggggggcgccccgcggcccgggagtcattgttctccaacttcgcgcggcgccgggggggcggcgacgtggaggagcccggagctcgccaggcccgcgtcgcccccgtcgggccgggcacttcgggaaactttaagcagccccgggcgggggcgcggggggcgccggacgggctgtgcaacttaggcgcgaggaccgtcccccccagcccgggcgcacggggaccccggggcgccccctttctcgggtagaggggggcccggcccgggcgccggagtttggggtggggagcgcgcgggagggacgtccttttgtctgcgcggggaaggtgccgcgcgctgcaggcgctggtcggggccgggcgggccgggggggggcgcgcgggtaacatctgctccgcgttaatgcggggcgaggcggcggccgcgctgcgagcttcaaaggctcccgggccgcaccgcctgcaccggctgcggggggaggggggtccggcttcccgggccgcctccccccgggaaaaaggcgttccagcgcgccccccgccttcggcgccgtgcaaagtggcttcaaacattctccaagtctctcaaagtccttgggacgccccagaagtcttccagctcccgtagaatgcccgttttagctcgccacccccccaactaagtctgtcttaaaatcggtttcagctaccccacaaaaaagtgcggtttcgtagtcctcaaaaaaagtcagtttcacacgccctccaaaaaagaaaaaaactgagcgggggaggggctgcgctggggcgcccgcttcacacccggcctccagttggcagacaaagaggggatttctctgcttctgaagttgggtctccctcgacctcggaggctcctccccacccccagcctcggaggtgtctcccgggctgcccccgtccccacctggggacccctggggaaagtcgagactggaggggcctggagtgcatttctttggaatggaaatttttctctgtacctttttctgggggtggaatgggtcttggcaggtggatcccccatcccccatcttagaatggagccccctgggaccacgcgggagcaccctggtcttgagacgctctccccgctcatggagggcaggcaagggatgttgtcaaagttttgcttaaaaataattcccggatacatcgcgacagtaaagcaatctagggctgttttttttttctttcctgaatactgttggggttttcttggggggagggagattgagggtggaggaaagctttgctggtccctgcataggatgcgcgtcccccccacccccggcactttaagtcttgaagcttgtaaaagagtttcgtggttttctgacttgtggatttccttcatgttgaatttgggggcgacctggtcttcaacgggctgtgccatctgctgggggaggggggaatcaccaaatttccctcggggcggggtaggatcgggctgttcctccctttcccgggggtagggggcctcagaggaagcccggggttggttggaaatgagagagttggagaaaggagaggttctggctgccctgcgtgcagtttaaacttggcaacttgatgccctggtgttccctgggggagttagggagtttatatttgcacaccctccccccatttttcagactccctgtggtctctggggaggactctgcagggacctagactctggaattccagcttccctgcgcctgctcccagggctccccgtgcccccagggctctgctggaactcagaccccagggcggttgagggttttttaggtggcttttagcactctgtgctttgaccactcacaactcttctcccctccctgtttctccctgtccatctgtccccacatccaccaagcagggtttccaggcctgaggtgcccgccctggccccaggagaatgaaccagccgcagaggatggcgcctgtgggcacagacaaggagctcagtgacctcctggacttcagcatggtgagccaggacccccgcccagcccccgacacccctttgcctccacagttcacgggaaggttttcaggggagagtgtttgctgaatacttcagcgatg

SEQ ID NO: 20256 - DNA, 2300 bp, Homo sapien
aggaggggcttgtggctttggtggggggcccctgtggccccgcctccccgccggcctggcataggtgcagcattgaactgtgatgactcaggggctccagataggggtgggaaaagcctcccaggtagaggacaaagcaaacgtagaggcccggggtggggatgagcttagcaagttctggaccatccagagggcaggatggctggagccaagcgggccagcgagatggtggcatcttcccaggctgggagtggagtgtaaatttccctttggggccccagggagccctgggagattgtgttattttcatttatttgtttagttattttacttttttttttgagacggagcctcgttctgtcgcccagcctggagtgcagtgctgcgatctctgctcactgcaacctctgcctcctgggtttaagcgattctcctgcctcagcttcccgagtagctgagattataggtgtatgccaccacgcccagctaatttttgtatttttattttattttacttatttatttatttattttgagacggagtttcgtccttgttgcccaggctggagtacaatggcgtgctctcggctcattgcaacctccgcctttcgggtgaaagcgattctgctgcctcagcctcccgagtagctaggactacaggtgcccgccaccatgcccggctaatttttgtatttttagtagagatggggtttcaccgtgttggccagagaggtctcgaactcctgacttcaggtgatctgcccgccttggcctcccaaagtgctgggaatacaagcgtgggccaccgcgtccggtcaactttttaaattattattttaaattattttaaatatttttagagacgggtgtgggtggggggggtttcactatgttgttcaggctgttctcgaactcctggcctcaagcgatcttcccgcctcggcctccttcaaagcgctgggatcacaggcaggagccacggcgcccgatcctaggcggggtcactttttactaaaatgtagacacggactactaagaatcaggaagccagatctggcctgagttctgtccaaagtcaggtccaaattcacagatgccgagacggagactcaagtcggcaaaggcaccgctgagactccccgcggggctctctgacccagagccggagccagagtcggttttcccgccgggaaaatgggtctgacgtagccccctcggggccgtgatacccgctcgcaccactcagcacgcggggccggcccgaggaacgcaaatataaccaagcagaaggctccgcgcgggcggccacgccaacctgagaacaaaactccaggacccaccccggccgcctctcgcggcctctcgctcgcagagtcccgcctctgctgaggggcggggccgagaagaaaggaggcggggcctcaccacgaatggctaggatccccgcccatcagactttcgcggcttccgattgaccagactgctctgccttagctttcaatctcacgggccttactcgcttgcgtcatggactaagcgcacagctcgtgtgtgcttccgcggacggggatagtccgtgatttctccccgcgccgtggcccgaccgcctcctctgcgcgtccccgctcccaggctctggacctcacgggattcggggtcctcacgagggtgctcgagaggccgagctagggcgttcgggcccgagccgcccggaggtggcggagggatccgcgtgggccgccgggcggggcactcgggggcggggcaggggcggggcctgcacggggcggggcggggcggcgcgggcggggggcggaacatgtctcccgccgcaggaagatgaggcagcggcggcggctgcgggcgtagcgggccggagccgacgcggcggcgggcaccgcgggcaccgcgcacgccgctgccccaggggcgccccggccggccgcgcgcacgggccccgcgggacgggccacgcgggggtgggaggggcccgggccacgcgcgccgccgccgccgcccacgcgcgaccctcgggggcccggccgcgacgcacctttgtccgggggggggcccccccgcttcatgccgccgcccccccccacgcgccgcgtgcccggccgcgcccagcaggtgagcccggcggggggcggggggcgcgcccggtacccccgtgctttgtgcccagggaaccccggcccgccccgcgcgcgcttgttgggggggggcgcggaggaagttggggcgggggcggtgtcggggggcgccccgcggcccgggagtcattgttctccaacttcgcg

SEQ ID NO: 20257 - DNA, 2300 bp, Homo sapien
agccacacacagagagtggccaccctactggcctgcccgaggagatcctgatctctgttgggtgtcccccgccccccacccaatcccaagagcttctgcttgccccaaggacgtgagcgcagagcagagcctggagaagccggagctgtacgtggtggggcagaaggacgagctcttcaactactgggtcttcgtccaagccatcgcccatggtgtgaccacctctctggtcaacttcttcatgacactgtggatcagccgcgacacggcgggacccgccagcttcagcgaccaccagtcctttgcggtcgtggtggccctgtcttgcctgctgtccatcaccatggaggtgggcaaggtcctcacctccccggggccttggacatggcctatggaggcctcctcccctggggacccctgctttgggggcattgccaggtgcccttcctggaccccaggggctggtgtcctggtgcaagccccgctaggccccggatttaccccaccgctgcctgtccaggtcattcttatcatcaagtactggaccgccctgtgcgtggcgaccatcctcctcagccttggtttctacgccatcatgactaccaccacccagagcttctggctcttcagagtatcccccacgaccttcccgtttctgtgtgagcccccatggggaagtgggacgggcggtcgtggtgcaggggagccccgatggaagaggttgcaggttgctcatgacagtcgtccggcaaagtgtcctggggaaggcgctcctttatggaccaggcacaaaggcaccaaggcgctccctagcctgggggcatccttggagctgggggtaggctctgctgtgaccccgccctgtccccagatgccgacctcagcgtgatgtcctctccctccatcctgctggtggtcctgctgagtgtgtccataaacaccttccctgtcctggccctccgagtcatcttcccagccctcaaggagctacgtgccaaggtgaggtgggcctgggcctggggtcctcatctggtacattccaggaccctggttggggagccgtgcagggcgtagggactgcaaggtgtcccggcccctctcggccctccaagacactaggcttgggggaagggtgggtgcggagccccggacacacgcccagtgcccccggggcccgatttcccaagaagggagacctcactcccccgacaaagcagcagagagcacccaaacgccgccctggattccagtgctgatgccatcgggctcttaaggttttatttatttatttatttttactttttgagaagggtcttgtgctgtcacccaggctggagtgcagtggcacaatctcggctcactgcagcctcgaccttccgggctcaaaggatcctcccacctcagctttccaagtagctgagaccacgggcatgtaccaccacgcccagctaattttgtagttattttctagagatggagactcattatggtgcccaggctggttcaaactcctgggctcacgcaatcctcctgccttggcctcataacatgttgggatttcaggcatgagccacactgtgcctggctgacaccatcagattctaccgtgaatgatctagagcttgggggttgagatgacggaaacaaccttgaaatggtttaggcaaaaggaggaacttagaaataagagtctgttgacagatgagtgggtcaacacggcacgctccatctgtgcaatgaaacacgcctgagccgtgagaaggagtgaggctctgacacaggccacagcgtggatgcaccttgaggacatgtgctcaaggccaggcgcagcggttcacacctgtaatcccagcactttgagaggctgaagcaggtggcttgcttgagcctgggaggttgaggctgcagtgagctatgatttttgccactgcactcctatctgggcaacagagcaagaccccacctcaaaaaaaagggaggggacttactagcccacgtaaccaaagcatgcatggaaaagcaagttgcagctgagatgggccccagaattgactggaatggtgtacctgccctgccacctctgttctccctgcccagctcctgccacctttactgcacaggctgggcacctggctgtcccaggctcacctctcctggatttgccaccaaagggcagccaaggcacctggtggctggtccagagtcggggaaggactctgattggctgagccagggttaagtcccagggaaggactctgattgggtggtcccgagttaagtcccagggaataactctgatt

SEQ ID NO: 20258 - DNA, 2300 bp, Homo sapien
caattatttcccttctgatttaaaaagatattgagacattttgtgggttcctgaaggcactgtggatcctaggcacatgtgcctgctgatcctggcctcagacacatctctgggcagcccagtcccggccagaactacagccaaaatctcagggctggctctcattggtgagcctgggttacaagcccttctctgaaccaatcaccatggccagggggtggggcatgtggctgccattggtcgggccaggattcaccgggcagagtgggcgtggcccccaggcagccagtgcggggcgggtcgcagaggcgctgagctggtctgcttcgcagaaacggctgtgaacatcggcttcgcctgcgagctgctgtcagagaatatgctcattctggaggagaaggagattaggtaagaagtggggagttggggggtgagcaaggggagtggggaggtgaggacaaggagcacccaggtgcgtgtctcactggacggggagcccaaggcacagtgggaagggggggattgagaggggagggaagggtaggaggaaggagtgtggtaatggggagtggagggagcttggagggaagggggaggggcagtggagggagaaggggagaggcagaggagggggaggagcagaggagggagggggaagagggagggaaggtgagggcagggggaggggcaggggtggcgaagtgggcagtggagggagagggtaggggagagggaagggaggggaggggagaggggaggggagagggaagggaggggagggggaggtgcaggggtgagggagtgggcagtggaggggaaggatgggggcagtggggaggaggggaggggcagtggagggagggggaggggagagggaggggaggggggagcagcggaggggagtgggcggtggagggggaggggaggagagaggaggcagaggggaggagagagggaagggggaggggcaggggtgggggagtgggcagtggaggggaaggggaggggcagcggcgggaggaggaggaaaggggaggggaagagggaagtggggaggagaaggggcaggggtgggggagtgggcagtggaaggggtgggaggggcagtggagcccccggggaagtggggagaagcccgccccctcccctgccccgctgacccctgcgccccgcagccgcatcctggagacctactgggaaaacagtaacaaccttctaaccagggagtccctgtcgcaggtcaagctggccttggtcattaacggagacttcctggtcagtgtcgctcagggtggacggcggggtcccggcgccagggaggggcctggaggggcggcgggctcggggtggggactgctggcgaggccgagggccgggtagggtccagtctggcctggaggccacggcgcctggcacagccccctccccgccggccaggacaaactgctggtgtccctgcggaaggagccgcgcgccctggcgcagaacgtgaacatggacgaggcgtggcaggagctcggccagtccaggagggatttcctctacgccaggcgcctgtccctgctgtgccggaggttcgggctcccgctggctgcaccgccagcccaggactccagagcccgccgtagctccgaggtgctgcaggagcgcgccttcgtggacctggcgtccaagtgccaggcggtcatctgctgccgcgtgacgcccaagcagaaggccctgatcgtggccctggtcaagaagtaccaccaggtggtgaccctggccatcggggacggtgccaacgacatcaacatgatcaagagtgggtggcggcggcggggctgggggtgcctgggacgagtggggggcggctgacggaggcggtggtgggactggggggacctggggcaggtgaggggggcgctgatggaggcggcggtgggactggggggacctgaagcagatggggggggctgatagggggcagaacagtgcgggggtctgggggggcgggcgggactgggggcgtgcggggggctgaccagctgcttgtgccctgcagccgcggacgtgggcgtggggctggcgggccaggagggcatgcaggcagttcagaacagcgacttcgtgctcggccagttctgcttcctgcagcgcctcctgctggtgcacggccgctggtcctacgtgcggatctgcaagttcctgcgctacttcttctacaagagcatggccagcatgatggtgcaggtctggtttgcctgctacaacggcttcaccggccaggtgcgtcccccaccctggctgccccatgacca

SEQ ID NO: 20259 - DNA, 2300 bp, Homo sapien
gtgtccaacctgttcttcctcatcatcatcatcctgcaggtgaggcgtgttgcctcctccaggaagtcccccctagccacctggcagcatcgatgtgtttgtctgtgtgatgggtgggttcacgtcccactccccacagactgggaccctcagcgctgagtccctactaccctgcccagggcctggcacacaagaggcgctcagtacatgttgaatgacaaaggtggatggatgcaccctccaggtctgatgacggcaccctctccacgccccgctggttcctgctgggcagggctgggcatcgggaggcatagctgttccccagcctaaacggcctcggccacgcagctcccctggcccccgccctcccagctgacctcagaggcgagggggaaggaggagcccagagcatgttctcaggacctgtggagccacttcccggtacctgggtggtccaggccagcgtggggccggcatccggccaggggcgctgttttcagagcaaacactctcacccaacatctcatttctgttctggatggagaggttctcctttcatccatcgagtcattcagcattaatggagtacctactgtgtgcaggccgctggccgggtgccagggtaggggatggtggagctcacacctgcagggtgacctggggaagcagggacatgggagggagggggagcagtggcggccaagcttggggctgggggaggctccctggagaaggcaccgtgggagctgggcttggacgggagaaggggagtttgctggggagacgaggcgtgtgggagaagttccaggcaggtggagggatgccggggcgtttgtcccgagggctgggggttgcaggagatggctggaccccggtcaaggtggccagcagatgtgtcacgtggtgtcgagtgcggggctaggtcggcttggtggaagggcaggggacgggggagtgggctggtgtgacccttcctgtggccccctcacgtcagagcattcccgacatctccacgctgccctggttctcgctcagtacccctatggtctgcctcctcttcatccgtgccacccgggacctggtggacgacatggtgagtgctgttggatgcagctgcctgggggagggagcggggccggtcgggggggtctcttgatccctgggcgagagtgggaggagggctgggcttcctggagcattaggggaacgtgggcctgggagcctcagctgctggggctacattgtccttatctgctagcacccacattgggcaggtgccgcaggtggcgttggctctgtcggtgcgtggttttggggccattgagctttggtggggggtggtctggcaggcactctaggtggtgggcagcacgcctgtcttctccccgccaatagcagtgggtccagtggcccccacgtccgggatccctgagcagacgcaacgtggcgtggggccagcggacagggaccccgtgttgcgggcgggcactgctgggctgcagtgcggcagcggcctgggcgggggcaggagaggctggacggtctctctgatcctttccctcctggcccaggggagacacaagagtgacagagccatcaacaacagaccctgccagattctgatggggaagaggtgaggctggggctgcagctggggatccgcggggacacgggggctccagcccagcagggtcatcggcctcggcaagtgtccatcaccttccgtgctccctgatctcccggctggttgagtccgacaggaaccgggcctgcattcattaggcgtttggccgggacgaggacagaggccgaggccctgatggcgaacccttgcagagcttagggctcgggcgatggggaggacaaggaaagtctgaagaggacgtgggtgcaggaccctggaggtcactgggtgggagcgtggacccgcggggagtggggtgggagcccggggaaggcttcctgagggggcaaaggcccggaggtggggactgcagctgcgggccccccgtcatcccgtgcctctggtctcccggtgtggggagggtttgcagagggaggggcctccttcacaaccccctctccccgcagcttcaagcagaagaaatggcaggatctgtgcgtgggggatgtggtctgtctccgcaaggacaacatcgtcccagtgagctggggttgaccccgaggtcccagaaccacgcgccccctcaccgagagcacccctcccagggtggggagggctgccgcacccccaatttgtcttgcatcccctcttgcaacgctgccccccactccacacc

SEQ ID NO: 20260 - DNA, 2300 bp, Homo sapien
tttgagacacagtctcgctttgtcacccagtctcagctggctgcaacctctgtctgccgagtagctgggattatggctgtgccatcacacctggctaatttcgtatttttagtagagatggggtttcaccacgttggccaagctggtctcgaactcctgacctcaagtgatccacctgcctcggcctcccaaagcgttgggattacaggcatgagccactgtgcccggctctgtgttctaaataaatggcgcaggcgtgtatgcgctctgtttctgtgcattcccatgtgatgtctgcctcccccttcccagaacgcacctggtgcctcaggacatagcccacggggggtcccaaggctggccagccctggcttcagcccccagggactcccttcagcttgtgaagccacctgttgccactggaggcttcagggcctttgcacaagtgccctgggcaagctcctgcccccagatagtgccccctgcgaaggctggggtgggggaatctggtcctcacagctgcacccaaccaggtctcttctaaagtttattagaacagtgtgttcaaactcccagccccggctttttttcgtaaccactgagcaagcaagcaagcacaggggaagtgttgaaggaatgaaaggagagaagtcaaacacagtggcctgcctgcctgcttgtggtcccagctactctggaggctgaggcaggaggatcgcttgagcccaggaggtggaggctgcagtgagctctgatcgcaccactgcactccagcccgggtgacacagtgagactctgtctccaaaaaaagagaggttccctggcagcctccagggccaagcaggcttccaatttgggcttccaaagaaagagggtttgtgatcaccgagagccctcaggtggttgccgctttgatgggggaggtggcttccctatccccctccacccatgtttgcctctccctttgggccctcaccccaggtagcctcactcttgggggcatttcatcttcagcagcccctccgcacacactttctgaccctggctccaggccctatcgctggcctggacccgccctagcctcgtcgctgaactcacccctgccacttcttcagtaaggatccctgagcccctgccacctgctggaaagaaccctgcgggcttcctcttggccttagggtggtctcaatggctataaccgcctctccccagcctggtgctcagccctgcatctgcgcctaggaggcgctcgttgaacgtgtatgggatgaatgaacgaacccaggacacggatcagacatgacttacataaccgccgttacctgtggtccttcctcctgcactctgccacgctggccgcaccagcctcagccccgtcaggtctgcaaggcccattccgacctgacccaggcccacctttccaagaacccttccaaccccgccctgcggtgcaggttctttctgctccctgaccaagcccggcccggccctgccctgacaccctcttccctttcaggctccgcccctgcactggcactgctccctaaggccctcccaaggccctgccttctgtcctggacccaccctgagcgccctcctaccctgaccctgctctgcgcggccccgccttcctcctttgtaacggctccggatcccagccccgcccctaccataacactgctccgcaaggccatgctcaaccccgcttcccgctctggccaagcccctgagtcctggccccgcccctactctgactttgctcagcgagaccccgctcgtcctcgccttccttctagtcccttccccaaagtcccggcccctccccagacccaggcactgctcccgagcgtcttctatcccggcctgttctgcgaggctctgcgaggccccgcccttcggccgtgaccgcgtccctgaggcctggcccccatcctgctcggccgtgctccgctcggccccaccctcgaggccccgccccttcttcgccttggccccacccaccccctccaggccccgcccccggcccccttccggggtccgaactggctccaccttcgccttggccgggccccgaggccccgccccgagatcccgccccccgtttcaggaccgttggcaccgggctaacggttccaccacgtccgccgccctggacgcccgcggcctgcccccccctgcctctcctgcgccggtgagcggcgggtgctcccactgctgtgcgtccccgggagcccgcgcaccctctctgggctccacccaggctgagagctggggtcgtggcggcgggggtggagagcgcg

SEQ ID NO: 20261 - DNA, 2300 bp, Homo sapien
cacggccacattcaggtagatgttcttgctggggctgcggtcataggccaccttctcctcgttcagtgcctgggggacaggcggtgcccagctgaggccatgcctgcctggtgccggggagccccagcggtggggtcgccatggggtcggggacttgcatctctcccaggcagctccgggtcacagctgcggctgagaggccgggggatgtctggggaccaccctggacccctagtccccacccgaccggccagataggaactccaggacctcaccttctctatggcctcctggttggaggtacagaacttgagacactcctcgatgaacaggttgagatagcgctggcggatgacggtggggactttgcccccaaactctttggggataatgggtttctttaaactctagagggaaggcaaaagctgccatgggtgagggcctccacaaggcctccagcggggaacgcagacgcgatgaggccgtgcccatggctggaggcaagagtgaggtgcgctgggacagatcagcctggctgcagtagggacagacacgccaaggcaagacaggagcagcaggggaaactgagggcagcggaactaaggtcatgggaaactgaggccatgggggcacaagggaacttgctgtactttctgctcaattttcctagaaacctaaagttgctcaaaaaacataaagtctattaattaaaaacaaaacaaggccaagcgtggtggctcacgcctataatcccagcactttgggaggctgaggcaggaggatcacttgaggacaagagttcaagatcagcctggacaacgtggcaaaaccctgtctctacaaaataaaaaacaaaattattagctggggtgtgatgacaccggcttgtggtcccagctactcaggaggctgaggtggaaggatcacttgagcccaggaggtcgaggttgcagtgagccatgattgcgcccctgcactctagcctgggcaacagagaccctgtctctaaacaaaaaaaaaaaacaccaaccaaccaaaaaaacaaaacaagacaaaacaaaaaaacaccgccagggcggtcgggcatggtggctcacgcctgtaatcccagcactttgggaggccgaggcgggtggatcacgaggtcagaagatcgagaccatcctggctaacatggtgaaaccccgtttctactaaaaatacaaaaacagccaggcgtggtggcgggcgcctgtagtcccagctactcaggaggctgaggccagagaatggcgtgaacccaggaagcagagcttgcagtgagccaagatcgtgccactgcactccagcctgggcgacagagcgagactccatctcaaaaaaaaaaaaaaaacaccaaggcatggggagggaaggtgaaggctgtactgcggtgtggagcacgaaggcccgcagggcaggggcgaggctggccctccgcaggtcccatgtggccgggcctcagggcgtggtcttgggggtggtggtcctggccgagatgggaggggctacctgtaaggatggactgtgggcgattcgcttagggatgatggtggtggtagtcttggacgccatccccgacaatgtgcgtgttttcagctgctggccacctggctcagggccgttggaggactggctgccgctggccgcaagggtcctcttggcacctgtgggggctggcggggcacagggggtgtgggcacagggcgagtggctgcccatcaccacgtggcggagcaccaggcagccgcggccgctcagcgccagcagcacgtgcatctccgcgtgcagggggccgggccagggtgaggggctggggctgcgcaatggcatcaggctctagctgccttcaggcaagtccatcgaggcagaggacacaggtcaggctgcggaggccgctgaggacacgtcaccggtggggtggtccaggcctctgccacgtgttctgaccccaagcccaaggcgtcgatgtctgagggaaaggccctggctcccggacagaggaccgaagggtctcgggtgcccccacctgctcattggctttgccctgccctgcggcctctgtgttctgccttgccctttgatgaagtcacaaaccagagggaggaggccaggcctgcaggggctgcttcggagggctggccacgcgggcagctgcaacctgggcatgtacgtctgtgtggcaggggggcttctggactgggggctcggcaccgacccaggaaggggagctgtgagcagggacatctggccctagtctcagagcaacatccctcgaaatg

SEQ ID NO: 20262 - DNA, 2300 bp, Homo sapien
agatggggtttcaccatgttagtcaggctggtctcgaactcctgacctcaagtgatctgcctgcctcagcctcccaaagtgctgggattacaggcgagaggcaccatgcctggcccctaattttctgtaaaaccgcacaaatcccgccttccccatagaatcacccagaccagccctgtgcccagtccaggctcttctcctgtttctgttctcaaagcactttccacctggcttcaggctgtctcacttattgctgtgttcattgtcggcctccctgcctacaccatcacctccaccagagtggggttctctgctctgcttatggatgtttctagcattttgtggcacacagtaggtgctcagtaactatttgctgaatgaatgaccgacaccagccggcacggatggagcaatcgcataaatgagagttcatctctcacgcatcatcaggagccatgacagggagtctacgcctccactgcccatgataggacagctttgagattagatcaggtcctctgcagagtcgcccatgacccatcccaacccacgtcccctcatcattgcatcctgtcatttatttataattgtggtaaaatcacatgcacataacataaaatttgtcatcttaaccattgtattgttatttgagacggactgtcactctgtcacccaggctggagtgcagtggtgcaatcttggctcactgcaacctccgcttcccaggttcaagtgattctcctgcttcagcctcccaagtagttgggactacaggcgcccgccaccacgcccagctaatttttgtatttttaatagaggtggggtttcgccatcttggccaggctggtctcaaactcctgacctcggttgatcttccctcctcggcctcccaaagagctgggattacaggcgtgagccatcgcgcccagctaatttttgtatttttagtaggacagggttttgccatattggccaagctggtcttgaaatcctgggctcaagtgatccacccgcctcagcctcccagagtgttgggattacagacatgagccactgtgcccgacctaagactttgctttctattctttttgggtgtatacccaggaatagagttgctcatagggtaattctgtttaactttttccatctctacacaaaatacaaaaaattagccaggcatgatggtgcacacctgtggttttagctactcgggaggctgaggtgggagaatcacctgagccagggaagtcgaggctgcagtgagccgtgatcgcaccactgctctccagcctgggtgacagagcaagaccctgtctcttaaaaacaaactttttgggttttttgttttacatagcagtggcactattttacaatcccaccaaaatgcaccaggttaaacttcccattaagacgtgggcctactccaccagactacagagttgccccatcccagccttgttcctcgtttgtctgttaaaatgcaccctctagctggtatacagtaggcgctcaatatttgttgaacaaatgagtgaacgtggacctggtcattagactgatgacaagagtcgaggttggggagattaaggcgtttcttgagagccagctgtataccagggcgaggggatttttaaagactgtgaacggagtaattcaaccatgagtttcacctggcccaggtttaaggccacctccccgcagaactctcctcgtccagcagagggcgccttaaggtgatatgctaacgaaaggaaataatatgcaaatgagtaatagcgggccccgcggggcttttttggtcaggcgcgccgtggacagccctggcgccgcaggggcctggggctcaagatggcgccgctacagccgccgaaggtcgggcggcggcgctggcgaggctcccggagaccgcaggcagggcagcccctgccctccttacttcctcccgcggccgtctgtcccggcccaggggtccgtcaccagccttggtcgcgcaggagcaggcgtttctgagcaggcgcgctgcgggcagcccctcccggggtcccttgcggcggcgtcccgagggcctccgggggcctcggagcaagatggcggcggcggggtccgtgaggcgcgggcggcggcgaccgcggcgccagtgagggggccctggggcccgggcggctccgggccggggccccgccgcgggacggaccatgctacgctccactggcttcttccgggccattgactgcccctattggtctggggcgcccggggggccctgccggcggccctactgccacttccggcaccgcggg

SEQ ID NO: 20263 - DNA, 2300 bp, Homo sapien
gcctggggccatgtggcccacccctggaggctgctcacccctgccccccatcgttagcctcccagttacaactgtaagccccttgagggcagggctggttggttctgctctaagcccaggaaacatcagtggaagacgcatggttgggtgtggaccctgaggcctcaagacacacctgtccacaagccaatgcggggttccaggaccctgggggctgctgggatggtggggacctgggggacctgcccaagtggcccatcgtcctagaagttcaaagacaacagaggcccagcaggagcaggaacgccgacccccagcgcccaccgaatggtaggggtgcagagagggctctggagcccaggcctaggagaggggcaagtgtgtgcagggcaccctgtaccctcccacacttcgctgaacctcctctctctcggctccgctctgtccagccacgtagagtgggcttactggggcccagggagggctcagctggcttaaccaagcatggttgagcccaggcgcagtgcgggcgacccagggaacagtggtcagcctcagggcgtcagctggggttgcaggtgggcgggggatggggctagagaagccccgaatcgggtcagggcctctgtccatgcccaacccagagcaggaggtcgccgcaggccaaagcagctccgccccctggaggcagctccggccactgcgcagtccccgccgccccgccggagctgggaaggggcgggagcgcggtcgcgaccgaggggggccgcccagtttctgtgcccccgccgccttgggcctgcgaactgggccatccgcgtccctggtgtcccccctaatatttaacaagttggcctggacgtcctcgcggccgggaggcccgaatacctggcctcagttttcccgtccgaaccccaagaatcgatgcctgggaatggaaagagaagccccggaccccggtgtcccagcagggcggggaacctctgacccgctcaggcgcccccagcccagcccagccctttgcgttcggccccctcttcccgtccccctatcccgaccctctgggacccaaccggccctccccacccccagtggggcgcgctctagtagctccggaactgggtgcaaaaagaggaacgaacgcagccttgccccaccctcccgggccccgccgcgggcgcgggataccgggtgtctcggccgggaggctccgaggggctctgtgagcggcgagggggaaccccagagaagaggacgagcagatgcctgagtgcggggtcaaagcagggccccaggccgggagaagaggggggaagggtcgcgcacgtggcctgggggcggggccggccgcttccgcacccctccaaccccggccacgtggggatcggagccctcctccatcgcgaacgggggcgcgcccggggccaggagggaagcatccggggagggggcgggctcccgccggccgcgcgccccggcgtggggtgggcgcgccagcgaggaggcggggcgcgctctgggagggaggggcgtgccgggatggggcggggcgcgctctcggaaggaggggcgtgccggagagggggcggggtcctcggcctcccgccccggcttgagggggtggtgctccgggaaagggtacgggggcgcgcgctggagtggggcgcgccgggagggggcggggctcccggccttgcaccctagcgcggagaaggcgcgctccgggcctaagacgctaggcgctggcggaggccggagtgggcgcgccggggggcgggttcctccggcccgagccccgcccccggcggccgcgcgcggctcggagagtggtggagggcgcgccgggcggggggcgtggctgcggcgccccgagggggcgtcctccgggcggggcgggctgtggccgcccccgcgggctccggtgcgtcaggacgcgtcaggcggggcggggcaggccgagcgcgggcgtcggcggcggcgcgcgccgggcctcctcctcctcctcctccgcctcccgcactcgagcagccgccgccggccggacggacgccgctcccgccgcctccgctccgcccgccgcgccgcgcgcccttgctcggcatgtcggcggccgtggcgtgcgtggattacttcgccgccgacgtgctcatggccatctcttcgggcgccgtggtgcaccgcgggcggcccggccccgagggcgcgggccccgccgccggcctggatgtgcgcgcggcgcgccgcgaggccgcctcacccgggaccccggggccacccccgccgccccccgccgcttctgg

SEQ ID NO: 20264 - DNA, 2300 bp, Homo sapien
ttgcatttgtgtcgtgaaagattgtttggctgctgggggagaatgtcctggagcaggtgatcagcaaggagggaggctgttgctgtggctctggtgaaaggtgatggaggcagggaccgggcggtggctgatgggagacaggcagagccaccgggctggtgatggaccggctcagatccagtgggtggaaggaggtgtcaaggataacatctttgtttctggcctggatagtggggccctggccacctcggtgtgccccttcgtctccggggtctccaggggcctgctgctgtccactgggctctcaggacccagctgcatgatgccacctaaactgcagggccctccaagtccccagcaccagcggggcagcaccggtagggcctggacctctttgagaatatgttgaaaagctgacatcaacctcgacgctgtggatgttgggcctgatcattctttggggtgggtctgtcctgggcactgcagggtgctaagcagcctccacccagtccccagtggtgacacccaaaactgtgtccagacattgacaggtgtctccaggagggagactcgcctccatctgagaagcagaaccagcctgacagtccacctcccggctgaaaagtgcttgcatgtgcgatttgccttccgcctgggagtctgggggcactgggatgccatccttgccccaccctggctttcagagctctctcctctcctcctcgtgtgcccatgagtccggctcacaggaacgtgggtctcacatcaggtcctgagggagcaggtgtgtttctgggcctgaggctgctccttggtagtgagggtgtccccacgagccgtgtctgtggcgcctgcagctgcctgcatgtccatctgtgtccacatctgcctttgagcctcatcttcctggccccacggttttctcatgctgtgacccaaaagccaagcattccagggtgttctgctgaaattgagttgtgagcgtgtctctctcctcgctccagtctgaaggagaagcgtggtcggtagatagacgtctcagaccttcgtgttttcttcacgtctgtctgttggcaggtccttacactattgtggttgctttagcaacttagctgttgtcgacttaatgtgtttcatgacgttctgcagcaaggaagaaggtccgagtttccactctcaatcaggcaccttcgttcccctcccccctcacttgacttcctgtggggtgtgtggtgtctgcacttatagatgagaatgctgaggcctcaggagggcaagggactcgcccacggtcacggaaccctaagtcaggggtggagaaggaccccctgacgccagcccacctcccctgcccctcagcaggcctggctccagcacagagaagagccattgttgctgctctgggggccctaggagcctgggatgtatcctgcctttgtttctagagcctttgtttgttgtatttcctctgtctccagacatcgcaggccggtgggacccggcgcctgtgcacgctcacgtagcggggcctgttcgggtccctcgtgggtcccttcagttcgagctctgtccttgcctcagcggcccgtcacccatagggtggcagagatgggccgggggagggagtgggcagcagtgcggaccgagtcctggcgcatggggtttccctggtgctggagccgggcgtttcgggggtgtgggcggggctggggtcatatcccctgcatgccccgcatgccatggctgtactcacatggcaagaggtggtgatcgccagctcagggaaggtgggggttccttcatcctgtggagagggggctgaattggggtcccctgagctgtagggtgcagtgcctgacaggccgtggggagggccgaggggatggggactgacaggccccgggcccatgccgccccctggcacgggtggatgccccgcctcccgggggtgcccagctggactgtggcacccccaaaggaccccacatgtcactgttcccccgcagggcttcccacggcacgacatggagacctgtggttgcgaggctccctggggctcggcttggaccgcgatggggctgggccctggcctcctaacggggctgctgtctggggcggtagctgggggggcgctctcccccctgcccgcgactcggagcacccccacccctcccctgccgggccaggccgggcggcgttgttggcgggggccccggtggaggcccggcctgggcggcgcccgccatgaatgggctgtcgctgagtgagctctgctgcctcttctgctgcccgccctgccc

SEQ ID NO: 20265 - DNA, 2300 bp, Homo sapien
tcgcggccccgccatttctcccaggatgaagtgcaaactctcgggggcgcgacctcacccgtcccaggctctctcttaggacccttctgctcacttcttcctcccagggtctgctctagccaggagcctgctctgtcacctcggattttgctcctgcttgtccctctgtcccatccccctgtcacctggcccgtttgtctgccctctgatatggccgcgcctccccccaggcgggtttcccaccctgactggttgagtgaggtgcagtcaccgtctcccatatgtaggtcatcttccagtattttggctgctcggttgcttgctggtcctcagaacacctctagcttgcagagggttgcccagttaagtgcgtgggaacggaattggtgggattcagggtgtcaagggtgtgtgcccagtgagtgaggcgtctgggtttgcactccccagtccacgcccattagtgacactagggaggttccaggtacctgtggctggagaggagaggagactagactttcccttccctgtcaaagctggcggaccttggggattcttttcctcctgtgcttcctccttaattctgtgctgcctaccacctgcccattcctttagtgagtggcaggtcatggtcctgctctcatagagtttctggtttggaggtggggggagatctggccaaacgtgtgaaaaatacaagctgtggaaagagcgtgtaaggggtcctgtcccagctttgaggactctgagagcgttggcagtgaggtgcaaagggtggttgggttgggcaaggctgtctagtgaggttggggaagggagttcctggcagaggagcagaggcaggaaggggcaatttggcttgtcttgagggagccaggagtggcagggtgtgagatgagtgagtctggagaggtcggcctgagccggaatgcggacctggcaggctgtggggagggctttgatctctatccagggaataatgggaggcccccaggacaccccaagagggaagcggctccattgcatttgtgtcgtgaaagattgtttggctgctgggggagaatgtcctggagcaggtgatcagcaaggagggaggctgttgctgtggctctggtgaaaggtgatggaggcagggaccgggcggtggctgatgggagacaggcagagccaccgggctggtgatggaccggctcagatccagtgggtggaaggaggtgtcaaggataacatctttgtttctggcctggatagtggggccctggccacctcggtgtgccccttcgtctccggggtctccaggggcctgctgctgtccactgggctctcaggacccagctgcatgatgccacctaaactgcagggccctccaagtccccagcaccagcggggcagcaccggtagggcctggacctctttgagaatatgttgaaaagctgacatcaacctcgacgctgtggatgttgggcctgatcattctttggggtgggtctgtcctgggcactgcagggtgctaagcagcctccacccagtccccagtggtgacacccaaaactgtgtccagacattgacaggtgtctccaggagggagactcgcctccatctgagaagcagaaccagcctgacagtccacctcccggctgaaaagtgcttgcatgtgcgatttgccttccgcctgggagtctgggggcactgggatgccatccttgccccaccctggctttcagagctctctcctctcctcctcgtgtgcccatgagtccggctcacaggaacgtgggtctcacatcaggtcctgagggagcaggtgtgtttctgggcctgaggctgctccttggtagtgagggtgtccccacgagccgtgtctgtggcgcctgcagctgcctgcatgtccatctgtgtccacatctgcctttgagcctcatcttcctggccccacggttttctcatgctgtgacccaaaagccaagcattccagggtgttctgctgaaattgagttgtgagcgtgtctctctcctcgctccagtctgaaggagaagcgtggtcggtagatagacgtctcagaccttcgtgttttcttcacgtctgtctgttggcaggtccttacactattgtggttgctttagcaacttagctgttgtcgacttaatgtgtttcatgacgttctgcagcaaggaagaaggtccgagtttccactctcaatcaggcaccttcgttcccctcccccctcacttgacttcctgtggggtgtgtggtgtctgcacttatagatgagaatgctgaggcctcaggagggcaaggg

SEQ ID NO: 20266 - DNA, 2300 bp, Homo sapien
ccggtaatcccagctactcaggaggctgaggcaggagaatcgcttgatcccaggaggcagaagttgcagtgagctgagatcgcgccattgtactccagcctgggcgacagagcgcgactccatctcataaagaaaaatattttaaaacatttctaaatgttgatgtctgagttttttttggcgtccctgtaaattttgttttccaggcgagaactttactggcctcaacctattccgggtccccaagtgaatgaaacctaagtttggccccgcccacagagcagcaggccacgcccctcgacatatcagccccgcccccaggacgctagtcgcgcggtcgctctgtgcctgcagacccccgccccgcgcgctcctcgcgtcacttccggggcggtggtgagaacgaggctcacttccgtccgtggggggagctgcggcggtggcggtgcaggaggccgggcaggggtgcggagggaccgacggacgcacgggcgggcggccgggagccatggagcgcggccctggggcccgggggcgcgggccggggtggtgagtgccgggcaggggcgggggcgggcgcggccgcgcggggtcccgggccgggcctcgagggcctgacagcccggttggacgtccccgagacccctgcagtcccagggcttccgcgggtcctgcccgaggagcccagagcaggggcgcggaccgcggatgagcgtctgtgattgggaaagccctgtccccatccattcagccctccggcgtgggttgcgctcccaccctcctgcggacgcggcccttgccttcggggagcacccgtccgagccgcggattccgctcttttgccccgaaactgcccccagtccgacaaacgcttcggcctctcgccccccaaggcagctcccaggggccctcccgagccctgcttcccaaccagctcccagtcgctgtttcccttgtcaggcttcttcctgccaccctgactcctgggcgggcttcccggcctccgctcgcgtccgttctccgggatgcagcccttctcctatgttgtccatcgcttgctcgggacttcttcgcggccccgccatttctcccaggatgaagtgcaaactctcgggggcgcgacctcacccgtcccaggctctctcttaggacccttctgctcacttcttcctcccagggtctgctctagccaggagcctgctctgtcacctcggattttgctcctgcttgtccctctgtcccatccccctgtcacctggcccgtttgtctgccctctgatatggccgcgcctccccccaggcgggtttcccaccctgactggttgagtgaggtgcagtcaccgtctcccatatgtaggtcatcttccagtattttggctgctcggttgcttgctggtcctcagaacacctctagcttgcagagggttgcccagttaagtgcgtgggaacggaattggtgggattcagggtgtcaagggtgtgtgcccagtgagtgaggcgtctgggtttgcactccccagtccacgcccattagtgacactagggaggttccaggtacctgtggctggagaggagaggagactagactttcccttccctgtcaaagctggcggaccttggggattcttttcctcctgtgcttcctccttaattctgtgctgcctaccacctgcccattcctttagtgagtggcaggtcatggtcctgctctcatagagtttctggtttggaggtggggggagatctggccaaacgtgtgaaaaatacaagctgtggaaagagcgtgtaaggggtcctgtcccagctttgaggactctgagagcgttggcagtgaggtgcaaagggtggttgggttgggcaaggctgtctagtgaggttggggaagggagttcctggcagaggagcagaggcaggaaggggcaatttggcttgtcttgagggagccaggagtggcagggtgtgagatgagtgagtctggagaggtcggcctgagccggaatgcggacctggcaggctgtggggagggctttgatctctatccagggaataatgggaggcccccaggacaccccaagagggaagcggctccattgcatttgtgtcgtgaaagattgtttggctgctgggggagaatgtcctggagcaggtgatcagcaaggagggaggctgttgctgtggctctggtgaaaggtgatggaggcagggaccgggcggtggctgatgggagacaggcagagccaccgggctggtgatggaccggctcagatccagtgggtggaaggaggtgtcaaggataacat

SEQ ID NO: 20267 - DNA, 2300 bp, Homo sapien
tttgaggaatgagcccctgggggcaggattggcccaggagcctcaggcttatctcagaacagtggagctaagatgagagtccctgggacggagcgggggctgcggttgcctgcaggctggaggagcattttgagctggaaaaggcacgaaagctggggggaaggcacatatgagagaaggcctgaaaagcaaggcttcccaccaattcacactcacacttccaggctgggcccctttggtgtctgcagccctttctgcccctgtccctgtcacttccttagaaaggcctgccctgaccacgctctgagattctccagtaaccttcttccattttcttttctttactttttttttttttgaggcagagtcttgctctgtcgcccaggctggagtgcagtggcgtggagtagctgagattacaggtgcgcgccacaacagccggctaatttttgtatttttagtagagatggggtttcaccatgttggccagggtggcctaatttttgtatttttagtagagacaggatttcaccatgttggccaggctgaactcctaacttcaggtgatctgcctgcctcgttctcccaaagtgctgagattacaggcgtgagccactaggccctgccataatgcaattttttttttttttgagacggagtctcgctctgtcgcccagtctggagtgcagtggcgcggtctcagctcactgcaagctctgcctcctgggttcacgccgttctcctgcctcagcctcccgagtagctgggactacaggcgcccgccaccacgcccggctatctttttgtatttttagtagagatgaggtttcaccgtgttagccaggatggtcttgatctcctaacctcatgatctgcccgactcggcctcccaaagtgctgggattataggcgtgagccaccgcgcccagcccataatgaaatttttttaagagacaggatcttgctctctcgcccaggctggaatgcagtggagtgatcatagttttatttatttatttatttatttatttatttatttatttatttatctgagacagtcttcttgctctgtcacttgggctggagcacagtggcccgatcttggctcactgcaaccttcgcctcccgggttcaagcgattctcctgcctcagcctccggagtagctgggactacaggcgcgtgccaccatgcccggctaatatttgtatttttagtagagacagggtttcaccacgttggtcaggcttggtctcaaactcctgacttcaggtgatctacctgtttcagtctcccaaagtgctgggattacaggcatgagccaccgtgcccggcctaatgtaatattttaaaaactaatgcaaaagaatttctgatgagcaatatataaagactttaaataagctggtcatggtggcttgtgcctatagtcctagctactcaggaggctgaagtaggaggttcacttgatcctgggaggtcgaggctgcagtgagctatgatggcaccagcctgggtgacagagtagactctatgttaaaaaaaagaggccaggtgcggtggctgatgcctgtaatcccaacactttgggaggctgaggcaggaggattctggggtcaggagttcgaggccacactggccaacatggggaaaccccgtctctactgaaaacacaaaaattagctgggcatggtggtgggcgccggtaatcccagctactcaggaggctgaggcaggagaatcgcttgatcccaggaggcagaagttgcagtgagctgagatcgcgccattgtactccagcctgggcgacagagcgcgactccatctcataaagaaaaatattttaaaacatttctaaatgttgatgtctgagttttttttggcgtccctgtaaattttgttttccaggcgagaactttactggcctcaacctattccgggtccccaagtgaatgaaacctaagtttggccccgcccacagagcagcaggccacgcccctcgacatatcagccccgcccccaggacgctagtcgcgcggtcgctctgtgcctgcagacccccgccccgcgcgctcctcgcgtcacttccggggcggtggtgagaacgaggctcacttccgtccgtggggggagctgcggcggtggcggtgcaggaggccgggcaggggtgcggagggaccgacggacgcacgggcgggcggccgggagccatggagcgcggccctggggcccgggggcgcgggccggggtggtgagtgccgggcaggggcgggggcgggcgcggccgcgcggggtcccggg

SEQ ID NO: 20268 - DNA, 2300 bp, Homo sapien
aggcacgagccaccatgcctggcctagattcatttttttagatgcagagaatctgggctttggatttaatgacttaccaaataaaggctgtcttttttttttttaaaacaaatcagcaaaacaggggctcttggctagtttgcatgaggcatccagggatggagagatgtgtatttaagctaaaaaaagaaaaagtgaaactcacagcagtctgagtttttattcagaaaaggaaaaaagaaagcaactgagagcgaaatagtttcctggaatgctgtttttttttttttttttttttttttttttttttgagatggagtctcactctgtcgcccaggcaacagagtgcaatggtgcgatctcagctcatcgcaaccttcgtctcccgggttcaagtgattctcctgcctcagccttcccagcagctgggattaaaggcccctgccaccatgcctggctaatttttgtatttttagtggagatggggtttcgccatgttggccaggctggtctcgaacccctgacctcaggtgatccacccaccttggcctctcaaagtgctgggagtacaggcatgagccaccgcatccgaccttgaaatgcactttctttgaaacacgtcctcccctttctcaccataaactccctcacactctgcaggtttacctaactgtatgcatctaattatgtgattacctaaaagttccaggaacaggctgggcacggtggctcacgcctgtaatctcagcactttgggaggccgaggcgggcagatcacctgaagtcaggagtttgagaccagcctgaccaacatggagaaaccccatctctattaaaaatacaaaattagccaggtgtggtggcgtgtgcctgtaatcccagctactcgggaggctgaggcaggagaatcacttgaatctgggaggtggaggttgcggtgagctgagatcgtgctgctgcactccagcctcggtgacaagagcgagactgtctcgaaaaaaaagaaaaaagaaagaacgttttagagctaatctggagacaggccaagcacggagacccacctgcaaaatcccagagatttcctcaaggtggtctgcaacccggcccttattaggatgaggccagcctgcgcttttaagccaccaaaattcatgaacacacagagcttataatcagcacctcccctgcacacccaccattcccagttccccttttttagcccctcaccccagcctcaagtttgaaggggtttctggaggcctaaaccagctgcctccctgctgcgaactctgaaaggaagtcaccttcctttcactgcactttttcctccttactggtttgtcaagactctggcatcggagcctgagctggttacagccaggcactgtcaagctgttgggggaggggatgacaaattccctcccgttgagaaccacttggttaaacctgtccaactggaaggagtaacaaattgctcataaaatatgcatgttttggtgaaaccccttctctactaaaagtacaaaaactagccagaaatcgcttgaacccaggaggtggaggttgcagtgagcctagcactgcactccagcctgggtgacagactgaggctacgtctcaaaaaaaaaaaaaaaaatgtgcttgtttggcccaggagaggcaagaggtcttcttcacctacgttactggtgagaaaactcaaacctgagggcggcccacgccggagtgcagtaacaggcagaactggaacctggccccatcccggactcaggggacgggtgtcatataccccctctgcctcatccttcccactctgctaaccttccaaagatcccccgggttccgagttttccctggccgcttgatgggattcgaacctgcaaactcagcgctcgcccagcgcagcggccccgcctctcctcccctcccgccgcccggaggtcatgtgagcgcagtgccggagcggggcggggcgaggcggcggcgcgcagtgcctactagcaattgtagtccttgccccaccttggcctggcgaagatcccgcccctggaactacgctcccgtcgtgctccgcggctccaggcggagacgaggcggggtgaggtgggttgggccgggccggttgctaagacttggcgaagcgctgcgctcgcgcccggatccctcaggtaagcgcgcggccccgaggtctcgggttctccaggctcagacttccccagagggggagtaggggctgacatggggggtctcggcggtgaggggcgccggccgtttgtggggagaaaacggggggcccaggc

SEQ ID NO: 20269 - DNA, 2300 bp, Homo sapien
aaactcctaacctcgtgatccacccgcctcggcctcccaaagtgctgggattacaggcgtgagccactgtgcctggccaaatttgtggctttttaaataggctttttattttggaataatttgtaattctcagttgcagagagtgactgttctcgcccacgtccccgacgtgtctcccttgtccttggcacggcgggagctccccacgggtgacgctgctcacggagccgtgggtgcctttggtttcctgggctcccattagcaagctcctgttctggggttcctgccccacaagactgcggtactctcacgccagtgcacagatcagaatccagataaggtcccaggtttcctgggatggtgactcctctcccttcagggcccctcgatctgcaggcctctcccctcctgcacctgcgcctggcgccaggccctccagggtggctgggatctgtggtttgtgcacccctcggatgtgccgctgaagctggtctgtcacctgccaccccaagagcctgagtgacgttgccccagggatctgagttagagtcatagtgagcgtgtgcctgggactcccagctctgccagcctttggggtgcttccccctcctgcagaggctgtggctgcaggtcaaggcactgctcgtcatcctccgagtcctcctgagctcccagctgccagctcggctcccactggcccttccctgggctccagtgcctcctgtgagccgcctccccggtgcgtccccagctctcccaggctgagctgggtggacaggcctgtgcccgtgttgggtggtcctgagatcccggcatgaggtgagtgcccacatgtgaccctcagagacctccctgccccctcggccctcgtgcacgtgcggcagcagcgacttggctcttctcattggagcctgggtcatctcccgcaggtcacgggagaagctgagcatgcggtccctgcccgaggtggacagaaggtgaacgctcttgagaaagaaacccagcgggtcttaggagagcccggccccccttgtaatgagagaaatcaaaccacagcgcacagcgacttcatgtccaccgttggcttagtgaggccccacgctcagtgcgctgctgtggggcgagaggggacagccccgctctccctgtcctgggcggcttcaccagcgccacctccccacacactctgtgcactgctgtggggcaagaggcgacagccccgctctccctgccccgggcagcttcaccagcgtcacctccccaggggtgacgcatgcccgaggccatgagccacggcagcatctgtggtggcagaggactggaaactccagagaaatgacccccagcggggcctagctgtgtagatggtgagggtggccacatggcggcagccaggtactgaggacacggtgcagcaggggcccccggtgggccccgccaggaatcggacatcagcgggcgccgcagcctctaagcggagcatgcagcccactgacagtgtgctgggtgcctccctagacctgacacttgcatgcgggggcgtgcgatgctggccagtgggaagctgcgggggcggcggcaggagtcctcaaatgcctttgccgcttttcataaatctaaaattacatccaaacagaggtttacttttttaaaaaataaaagaggccaggcatggtggctgacgcctgtaatcccagcgctttgggaggccaaagcaggagaatcactgcttgaggccaggagttcagactggcctgggcaacatagggagaaaccatctctccagaaaaaaaaaaagaggaaggaatgacccaaagaccatgcagcctgtgatgctgtggaggctccaagcaggcgaacacaggacaggccagcatcttgcagggacgcggcggggggtaccgcgtgtgcgtgcatatcacgccccgtgcatgtgtgtgcataagctccccggacacatccgggggtgtgggtcctgcgggctgcctgtgcaccagggaggggagtcagcaggagagagactgtacgtcgtgcctgcctttaagttccctgaattttaaaccctgtggtttcatcacctgttaagacaaaaatctcaaaatgactgttttctgcctcctgggtctcaaaggcaggtgcaatgcccagaggctggtcctgcacagagggacccagggcgtgctggccttcccagtgtcccactggtggctgatctaagcagtgctttccctcgtttttttattttgagacagaatcttgctctgtcccccaggctggagagcaacggcacgatctcggct

SEQ ID NO: 20270 - DNA, 2300 bp, Homo sapien
aaggtacaaaaatcagctgggcatggtggcgggcgcctgtagtcccacctactcaggaggctgaggcaggagaatcccttgaacccgtgaggcggaggttgcaatgtgccgagatcatgccactgcactccagcctgggcaacagagcgaaactctgtctctaaataaataaataaataaaaaccctcaaaggggctagtctcacccccccaccagctgtccccaatgacatcctcatgattaaagctgaaatgaatcaggaacatgtggaccacatttgaagtgggttaaaaatgagaaagcaaggttggccacggtggtttacacctggaatcgcagcttttttacagttttttttttttttttgagacggagtcttgctctgtcacccgggctggagtgcagtggcacgatcctggctgactacaacctccgcctcccaggttcaagcgattctcctgcctcagcctccagactagttgggattacaggtgctcaccatcacgcccgcctaatttttgtatttttagtagagacgaggtttcgccatgttggtcaggctgtctccaattcctgacctcaggggatccacccatctcggcctctcaaagtgctgggattacaggcgtgagccaccgcccccggccttggccttattaagacagtcttgctctgtcaggcaggctagagtgcagtggtgcaatcacagcccactgcagcctcgacctcctggttgaagcaatcctcctgcctcaggatcccaagtagctggggccacaggcatgcgtcaccacgtcccgctacttttattttttgtagagacagggtctctgctactcaggctggtcttgaactcctgggctcaacgaagcctcctcctccgtcagcctcacaaagtgctgggattacaggcgtgagcaaccgcgcccgccccacaccctaccttataacatcatctgaaatcattacacagggctctctcctccccctaggaccgaggactccctaggaaacgatgccaagagtctagctcactgttctattctcagagccactggcaggcacttaatacatatttgaatgaatgtgtctccttcgactttaaaaatgcccccaccgggaagtgcgtgggggatgtgggaaggccggaaaccatttctgcagctgccagtccccttccaggccctgtcatgggatggagcagggcatcactgtgcggcgccttggcctgtggatcccctccccacgtttcttgcccggtgcaggccggaaggcaggcaggtacaagcaaggagtcggctctacgcgcagagccccaggggagcggcccgtgctgggcatggcagtcccagcagtgcatttgtctagctgccggccgcgggtccggggccacttcctctctgctccttgctgatgtcacggtggatgaagacaacggggcacccacgtcaccgctgttctccccctgaacacggagcagttattctagaactgttttcccctcctcgcccaggaaagccagatggaaaaaccctcttgccctgaaccagctcattttctggccagtcgccccttccagcgcctgtcccggaaacctcgcggcctagcgcgcgcagcccgccgcctccccgcgccgcgcccgccaccgccccacgcacggaacatcccgcggcgccgcccgtccgtgacgtcaggtggcgagactgtgacgtaacacacggcggcagggcggtgccaggacgaccagccacgcgtcgccatggcaacagcgggcggggaggggcgggcggcggaaggcccgcccctagaagggtgtggaaaccgttagaccccctttcctgcccgcgcgcgccctcgcggccacgcgctttcggtgtcccccgcgggcagcggcccggcggcctcgtagcggccgcaaaacgccgtggccgtcgcgcggcgccatccgttgtcgcaaagcggcgcgagaaacgcccagccgggtgttggccccgccccgcgctgtgacgtcggcggcgcgcgcccccggcgccgtggccgcggctgcgcagtggggcgcgtatggctgccgccccccgctggcagacgctggcggcgtaaggcgcgcgggccccggagcgggcgcggcggagcgcggcgagcccggcgcctcccgtcccgaacatgcggaggccggcccaggcggcgcgggagccggagcgggggcccaagcggcaccggagccggagcgcgagggggcgcggggcccggagcgggggtccgcgctgcgctgctgaggccgggccggccgcccagacgct

SEQ ID NO: 20271 - DNA, 2300 bp, Homo sapien
ctctgtggagggtcaacaccaaccactgaaagggccaatgccgcagggtaagcgcctgtgccacagccacagctgccgggtctgagtacagagtggccttgccggctaggatgcgtggtcttttgttttttgagacaggatctagctccatcacccaggctggagtgcagtggcaggatctcggctcattacaacctccgcctcccgagttcaagcaattttcccgcctcatcctcccaggtagctgggaccacaggcatgaggcaccatgccgtctgatcttggctcagctacatgcgttctggcttttgcagaacaaaaagcaccaaatccccatcccagctgcacctgcacagatgacaagccccaacccccagaacctgtgacgtgagcgctgccctgctgggtctacccactgctgggtctagggccccactgctcctggcatccccctggaagcctccttgtgcgacccccggcccctcgtctgggtggtgaccatcacctctcaggtcctggctcccgcagggcctctcggcacccctgccccatgacctggaggcaggaggatgagaaaggggcaggccctgcactcagggacccaacgctgtcgggagctggggtgaaggccagcccgggctgtgtgccgaccctgctccgcccggccaacgagcaggctgccccgctggcgtctgttctgatacagtggtcttggctgttgtggcccaggcaggttggggttgctactttctctctggccccctggatgagcactggcctccctgtgcccggcctcagggccggccgggagcaaaccccactgtgccctgcagagctgagccacacagatgcacacccggctttgcagatggagcccggagccgagcagcagcctcctccggtgacagcagtggcacgggggtccgctgagcactccctgcaccctcagggctggatcccgcctccaagcatctcacgacagcccctctgagggggtcgtgggcggacagcagagggagggcccagccacacccaccctaagcctgacatggacggagaagcccctgacctgggcgctgcccccgactcgcggagcctcgcccaggcacacgcccaccccgcggagcctcaccctggcacacgcccaccccgcggagcctcgcctcagcctgagcctcagtggggggcgctgacccacagccggtgaagggcagcccagtggaaaacgggagcactgcttgcacacctgccgcccacggtggccgctagcccacatcccccacctcaggagtggccccgagagtcaccgcctgcgcctgaggccctcgcagcagcagcagcagcagcaggagggcagtcagaggacaggcagggccgccaccctgggctgtgttccgtgggcacagggcgggtgcccagctccccctgcccccacaaacaagagccgccactccaagactcagcagcttccgagggcgcagatcactccctggaggcggtcaccactcggtcagggcccagcacccgtccatcaccaaggaggaagagcccggcctcttctggggctctccgaaccccagggggtgcccaagggaagccagacaaggccggggcctggaaggaagcgaggacgtaaaggctgggcacccacagtgcccacgcaggcctgggggttgggggcctgccctgttgcctgagggccacagcgaaaagcaacaaccccagggagggacgaagggacgctgatcctcacccagcctccacccaacccacgcagccacgattccgtcccagggggcgagtgccggctccgggtcacacgccaaggatggctcccgggcgccaacgaggggattgcagccatcccacaaggggctgctctctccccgtcagctcccatccccttccccagccctagcctcaggctgctacctgccctgttcttttcggggtcctccatctggtctgggcccagggccagttccctggggagggccccgggagcccccttctctgactgtctccactgagtgatgtcacagtccctgggctgacatcaccacacagccctcagcccagagcccagggcaaagctgaagggaggccagggacctcactgggctgggcaggtgcaggccaccgccgtcccagtgccctcagaggcacctagactcatgtggacccggccgcagaccgttctgggcagctctgtccaggccggccctgccctctgacctggggccgcaggggctggccactgtgggctcggttccctgccaccccaattcatctgcacccca

SEQ ID NO: 20272 - DNA, 2300 bp, Homo sapien
cccgagcgtccagttaacaccacagctgccacccttcagttctgcaggtggggctcctccctcctccccaggctgcccccaccacccttcagttctgcaggtggggctcctccttcctccctcctccccaggctgcccccgaccacccttcagttctgcaggtggggctcctccttcctccctcctccccaggctgcccccgaccacccttcagttctgcaggtggggctcctccctcctcccttctccccaggctgcccccgaccacccttcagttctgcaggtggggctcctccctcctcccttctccccaggctgcccccgaccacccttcagttctgcaggtggggctcctccctcctccccaggctgcccccgaccacccttcagttctgcaggtgggggctcctccctcctccccaggctgcccccaccacccttcagttctgcaggtggggctcctccctcctccctcctccccaggctgcccccgaccacccttcagttctgcaggtggggctcctccccaggctgtccctgaccacccttcagttctgcaggtggggctcctccctcctccctcctccccaggctgccccagaccacccttcagttctgcaggtggggctcctccctcctccccaggctgcccccgaccacccttcagttctgcaggtgggggctcctccctcctccccaggctgcccctgaccacccttcagttctgcaggtggggctcctccctcctccctcctccccaggctgtcccgaggctccttgctggggaccgtcctgcctcccgtcggggcctgcgctgagactgggctccatgccagccggggctggctggccccctcgctccagagagcgacctgcacagagtcccctcagccatgagcccctgtccagacacggcgtttctctgtgggtggcaacaggctctggggccctcagctctgggctcgggagcatttaaggtggtgcagactcagcgaggggctgtgggctggggtcccaccatcccgggagcagggactgcgtgttccttctcaggaccagaggcttctgtcttttcccctggggtagaagtttgctgcctgccccgtgcccagccttgcttaggtggctgttggctccgctggtccctcaagccccgccattccctcctcagctccgctctgcaccgaaggggatgggtccgacccagcctggcatcatcacagcctcgagtggcgtccagcctgccccgctccaccagtggctgctggagaagaacccgagcctgggtcaggccctgggggctcctgcatcagtgcccggctctccggggcctcctgccctccggcccactctccccgctctcagcatcaaccagtcgccatgggcaggggcagctcggtggctcctgtgtccctgcctcgggcctgcctgctgtcatctgcctccctccctctttcccagagcggccctgggcctggatacggggactgttgtgtggcccctctgtgtctgggggtgcgactgctcccctggcttcaggatcctcagggcttctacccgggattggcagtcatgctctcctggcagtacactctcccacctgtgccacccacccacccacccacccatcccgctttacagaaagccccctgagccctaccctgttcgtccccaggcagccacgccgagatctctggcctctgatgtcatgtgatgtgtgcttcccagctgggttccgggcagggacggtgctcatcatgccccggccttcagagctccttccagcccagcagtctcctggctgtgtcctctgtggcctccgccccgtgtcctcagtggccccgcgggggccttgccggtgctcacctgtgcctctgtttctctgcagctgtgagccgtgagctttgaggcggtgggatgtgtcagcagaatgtctcctgcccccgagagcgaccccgaggccactgagaagagcagcgcggcctggccggcccgaacgcctgcgtctcagtagctgggagccacgggcccacgcccgcccaccggccgcagtgatgttctagccacagaggagccaagacctcaggtttccagagacttgggatttgcacggcagcagagtcaccgtggagaggccagggtatcacaaacttatggattttgacaagaaaggagggaaaggggagacggaggagggccggagaatgtccaaggccggcgggggccggagcagccacggcatccggagctcggggaccagctcgggggtcctgatggtgggccccaacttccgcgtcggc

SEQ ID NO: 20273 - DNA, 2300 bp, Homo sapien
gggagggtccggggattgacagtgggagctttgggcctgggggagttgcacaggtgagctggggcctcaccacttgcagcaggtcaggagtttgggtcctagcacagccccacgggagtccggggccttggccaggaggccacaggccagagcccaccatcccagctgatggtgaccatctcgtcctccgatggtccatggctttgactttgctgttgaacagcttttgtcaaagctactcaagtctgtccttgtggcttaaaaacaaccacagccgaggaaaatgaaggggcgtggtcttgtgttgataaagctttatttataaacacactcacagggccagatttgggccacgggccatagttgccagcccggctttaactgctggtcctcacgttagtctcactgcctcctgcagggtgggcatgtgggtgtcgtgttcacgcagccccttcctccaccccacagacacgctggtggctgtcctggagcgcgacacactgggcatccgtgaggtgcggctgttcaatgccgttgtccgctggtccgaggccgagtgtcagcggcagcagctgcaggtgacgccagagaacaggcggaaggttctgggcaaggccctgggcctcattcgcttcccgctcatgaccatcgaggagttcgctgcaggtaacagagctcgggctcaggggctggtttgggaggggagtggcacacaggtgggcatctgggtaccgaggatagtgcccccgagttcactgcggaaagcctggcagatgcctggcatatacagataggaagaaacctggcttgtgaggacgcgtccacagggccatctgttagccccggcccggctctgtccccaccgtgcacactgccagaccccgcctctcgtgtctgtccagctgttttggtggcatcttcccaggagggaagggagtccccgtctcgcgcccttgtgctacctgctggtgcaggtaccagtgtctgtgacgagctcaggagggctctgacatggccggggtggctgtcatgcgcccgagtgggccttggggtcccctgctgcagggcctgggttccagggtgacgtgaaggggcagcgctaacgatgcctcctgccctcgtggctgctcactgcctgacgccatccagctctggagcaaaacaggcctggaactttccagaaggggctgggacagagccctggggctggtgcacactcgccgtctggccttccccaggtccacgcggcccccgctcttgcttagctgaaggtcgccagatttagcaagagggtctctgtcgcccaggctgagtgcggtggtacaatcacagctcactgcagcctcgacctcctgggctcaagtgatcctcctgcttcagactccggagtagctgggatcacaggtgccaccaccacacaaggcttatatttgtatttttttgtggggacagggtcttgctatgtcacctgggctggtcatgaactgggctccagccatcctcccatctcggcctcacaaagtgctgggattatggacatgggccaccgagcctggctagatacatacttcttaaaaatacaactgttgatcagctgggtgtggtggctcatgcctgtaatcccagctacccgggaggctgaggcaggagaatcacttgaacccaggaggtggaggttgtgatgagccgagatcgcgccactgcactccagcctgggcaacaagagtgaaactccatttaaaataaaaaaatatatacaattgttggccaggctgggtcactcactcctgtaatcccagcactttgggaggcccaagatggggggaatcacttgaggtcaggagtttgagaccagcctgaccaacagggtgaaaccccgtctctactaaaaatacaagattagctgggcatggtggcgcatgcctgtaaacccagctatgctggaggctgaggcaggagaattgcttgaaccctggagacggatgttgcggtgagccgagattacgccactgcactctagcctgggggacaagagcgaaactccgtcctgcactctagcctgggggacaagagcgaaactccgtctcaaaaaaaaaaaaaattgttaacattgtttattgagttttgatactcagtcttcctgattcacttaacccataatggtctgtttctcaccagttattaaactgtgtctgcactgggctggcttgcagctgagcgatgcggagttgagcccaccttggttgatgagtgattaggtctcaggcaggcagggctgctctcattagagcagagggtgc

SEQ ID NO: 20274 - DNA, 2300 bp, Homo sapien
aaaaaatatttcataaattagccaagcacgctggtgcatgtctggaatctcaactacttgggggaccaaagcaggaagattgcctgagcccgggaggttgaggctgcagtgagtggagatggcgccactgcactccagcctgagtgacagagtgagaccctgtctctaaaaaaaaagtaaaataatttttttttgagacggggtttctcttgttgcccaggctggagtgcaatggcacgatctcagctcactgcaacctccgcctccagcgttcaagcgattctcctgcctcagcctccacagtagctgggattacaggcccccaccaccgcgcctggctaaaaaaaaagaaaaaaaaaaaccagagagaactttctctctctctctaaggaaatgtcaggtagacagagcagggccagggatctcaggggaccccagttgggctctgtgcagcccaaagggcgggggctggggaggtcgtgcaggccagggaggctgagaggacgtggggccagtacgggtggacggccgcttgggagccgtgagctcctggtcgggggtggagggtggccagaggggacagcggcactgggtcctccaatgggctttgggggtccggcatcctggaaaggacccagaaccttctccccctccatcctggcaggtcagatgcagggcatcccggactcccacagggaggggtttcttgtccgggtcatctggtcgccttgctggagaggcctctgcctgagctgagaggaggctggagctcactccccgggcttcatcttgtggctgcctcagcctccctgcccctaaaaccactacgaacccacttgagaggtgtcctcgggaggatgcccgcagaaaggcctgcccgggtccctgctggcataggcccttccagcaccttccactaactaagcctctgtttccctaagagcacaggcgtcctccagctctgtcacctgactgtcagaagtcatgtctgctgtttgtcttgggatggagctgccggggacacggcccctcccaccacaagtggccaagggcatgttgtggtcgggaagcttcaccggtcggccccggccacctcacctctgcctgccactcggggtcctgggccctgctgccccccgagtgcagctgcaacgccccttttgcctaaagcagcaggccctgccgacagggacctgagcatctttttcttccttccttggcctctgaggtcctgagagggaactccccaactctcccgccccagtcagcggtcacaggggagtctctgggcccacaacagggccggcctggtggctgagaccctggtggctcctggccacgctcaggaaggcccgtgtggtcagggctgcatttgaaccggccccgcactggggatctgccgagggctgggtgctgatgtccccaccgcgccccccgtcgatgtctcttgccaggcgcgactcttcgatgaaccgcagctggccagcctgtgcctggagaacatcgacaaaaacactgcagacgccatcaccgcggagggcttcaccgacattgacctgggtaagggcccaggagcccaggtgtgggaatcccagcggggcctcggcgggagggtccggggattgacagtgggagctttgggcctgggggagttgcacaggtgagctggggcctcaccacttgcagcaggtcaggagtttgggtcctagcacagccccacgggagtccggggccttggccaggaggccacaggccagagcccaccatcccagctgatggtgaccatctcgtcctccgatggtccatggctttgactttgctgttgaacagcttttgtcaaagctactcaagtctgtccttgtggcttaaaaacaaccacagccgaggaaaatgaaggggcgtggtcttgtgttgataaagctttatttataaacacactcacagggccagatttgggccacgggccatagttgccagcccggctttaactgctggtcctcacgttagtctcactgcctcctgcagggtgggcatgtgggtgtcgtgttcacgcagccccttcctccaccccacagacacgctggtggctgtcctggagcgcgacacactgggcatccgtgaggtgcggctgttcaatgccgttgtccgctggtccgaggccgagtgtcagcggcagcagctgcaggtgacgccagagaacaggcggaaggttctgggcaaggccctgggcctcattcgcttcccgctcatgaccatcgaggagttcgctgcaggtaacagagctcgggctcaggggctgg

SEQ ID NO: 20275 - DNA, 2300 bp, Homo sapien
ctgcctggtagtaaaatgtgttttgggccgggcgtggttgctcacgcctgtaatcccggcactttgggaggccgaggcgggcagatcacctgagctcaggcgttccagaccagcctggccaacatggcgaaatcctatctctactaaaaacacaaaaaagagccgggcgtggtggcgggcacctgtaattccagctacttgggaggctgaggcaggagaattgcatgaacctgggaggtggaggttgcagtgagccgagatcgcaccactgcactccagcgtgcatgacagagcgagactccacctgaaaaaaaaagatgtgttttggacttttccgtgatacttcaaaaaattattggcagggtgcggtggctcacgcctgtaaccccagcactttgggaggccaagtagggaggattgcttgaggcccggagttctagaccagcctaggcaacatagagagaccccgtttctacaaaaaattaaaaaaagattcaggccgggcactgtggttcatgcctgtaatcccagcattttgggaggctgagacaggcagatcaccagaggtcaggagtttgagaccagcctggccaacatggtgaaacctcatctctactaaaaaaaaatatttcataaattagccaagcacgctggtgcatgtctggaatctcaactacttgggggaccaaagcaggaagattgcctgagcccgggaggttgaggctgcagtgagtggagatggcgccactgcactccagcctgagtgacagagtgagaccctgtctctaaaaaaaaagtaaaataatttttttttgagacggggtttctcttgttgcccaggctggagtgcaatggcacgatctcagctcactgcaacctccgcctccagcgttcaagcgattctcctgcctcagcctccacagtagctgggattacaggcccccaccaccgcgcctggctaaaaaaaaagaaaaaaaaaaaccagagagaactttctctctctctctaaggaaatgtcaggtagacagagcagggccagggatctcaggggaccccagttgggctctgtgcagcccaaagggcgggggctggggaggtcgtgcaggccagggaggctgagaggacgtggggccagtacgggtggacggccgcttgggagccgtgagctcctggtcgggggtggagggtggccagaggggacagcggcactgggtcctccaatgggctttgggggtccggcatcctggaaaggacccagaaccttctccccctccatcctggcaggtcagatgcagggcatcccggactcccacagggaggggtttcttgtccgggtcatctggtcgccttgctggagaggcctctgcctgagctgagaggaggctggagctcactccccgggcttcatcttgtggctgcctcagcctccctgcccctaaaaccactacgaacccacttgagaggtgtcctcgggaggatgcccgcagaaaggcctgcccgggtccctgctggcataggcccttccagcaccttccactaactaagcctctgtttccctaagagcacaggcgtcctccagctctgtcacctgactgtcagaagtcatgtctgctgtttgtcttgggatggagctgccggggacacggcccctcccaccacaagtggccaagggcatgttgtggtcgggaagcttcaccggtcggccccggccacctcacctctgcctgccactcggggtcctgggccctgctgccccccgagtgcagctgcaacgccccttttgcctaaagcagcaggccctgccgacagggacctgagcatctttttcttccttccttggcctctgaggtcctgagagggaactccccaactctcccgccccagtcagcggtcacaggggagtctctgggcccacaacagggccggcctggtggctgagaccctggtggctcctggccacgctcaggaaggcccgtgtggtcagggctgcatttgaaccggccccgcactggggatctgccgagggctgggtgctgatgtccccaccgcgccccccgtcgatgtctcttgccaggcgcgactcttcgatgaaccgcagctggccagcctgtgcctggagaacatcgacaaaaacactgcagacgccatcaccgcggagggcttcaccgacattgacctgggtaagggcccaggagcccaggtgtgggaatcccagcggggcctcggcgggagggtccggggattgacagtgggagctttgggcctgggggagttgcacaggtgagctggggcctcaccac

SEQ ID NO: 20276 - DNA, 2300 bp, Homo sapien
cgttttcatgggtgaccaccttgccaagtcgtgtccctatgtcagagggcaacggacaggggctaattctggaaggttcctcggggaacctgatgtgggtgtttgggtcctgccagctcaagggccggtggccgagtctaacggtctgagtggtcccctgacgctctcccctgggggcgggcatggcggtcccacctcacggccacccgcgttgcttctgcaggtttctctactcggacgaggtgcagattggcccggagacggtgatgaccacgctatacaccgccaagaagtacgcggtgccagcgctcgaggcccattgcgtggagttcctgaagaagaacctgcgagccgacaacgccttcatgctgctcacgcaggtgggcggggccggtacgaggcgggggcggggccaggcctggctggaggcggggccggggtggggcggaccgaggctggaggcggaggcggggccgggggcgggcccgggaggcagcaggctcctgcctggtagtaaaatgtgttttgggccgggcgtggttgctcacgcctgtaatcccggcactttgggaggccgaggcgggcagatcacctgagctcaggcgttccagaccagcctggccaacatggcgaaatcctatctctactaaaaacacaaaaaagagccgggcgtggtggcgggcacctgtaattccagctacttgggaggctgaggcaggagaattgcatgaacctgggaggtggaggttgcagtgagccgagatcgcaccactgcactccagcgtgcatgacagagcgagactccacctgaaaaaaaaagatgtgttttggacttttccgtgatacttcaaaaaattattggcagggtgcggtggctcacgcctgtaaccccagcactttgggaggccaagtagggaggattgcttgaggcccggagttctagaccagcctaggcaacatagagagaccccgtttctacaaaaaattaaaaaaagattcaggccgggcactgtggttcatgcctgtaatcccagcattttgggaggctgagacaggcagatcaccagaggtcaggagtttgagaccagcctggccaacatggtgaaacctcatctctactaaaaaaaaatatttcataaattagccaagcacgctggtgcatgtctggaatctcaactacttgggggaccaaagcaggaagattgcctgagcccgggaggttgaggctgcagtgagtggagatggcgccactgcactccagcctgagtgacagagtgagaccctgtctctaaaaaaaaagtaaaataatttttttttgagacggggtttctcttgttgcccaggctggagtgcaatggcacgatctcagctcactgcaacctccgcctccagcgttcaagcgattctcctgcctcagcctccacagtagctgggattacaggcccccaccaccgcgcctggctaaaaaaaaagaaaaaaaaaaaccagagagaactttctctctctctctaaggaaatgtcaggtagacagagcagggccagggatctcaggggaccccagttgggctctgtgcagcccaaagggcgggggctggggaggtcgtgcaggccagggaggctgagaggacgtggggccagtacgggtggacggccgcttgggagccgtgagctcctggtcgggggtggagggtggccagaggggacagcggcactgggtcctccaatgggctttgggggtccggcatcctggaaaggacccagaaccttctccccctccatcctggcaggtcagatgcagggcatcccggactcccacagggaggggtttcttgtccgggtcatctggtcgccttgctggagaggcctctgcctgagctgagaggaggctggagctcactccccgggcttcatcttgtggctgcctcagcctccctgcccctaaaaccactacgaacccacttgagaggtgtcctcgggaggatgcccgcagaaaggcctgcccgggtccctgctggcataggcccttccagcaccttccactaactaagcctctgtttccctaagagcacaggcgtcctccagctctgtcacctgactgtcagaagtcatgtctgctgtttgtcttgggatggagctgccggggacacggcccctcccaccacaagtggccaagggcatgttgtggtcgggaagcttcaccggtcggccccggccacctcacctctgcctgccactcggggtcctgggccctgctgccccccgagtgcagctgcaacgccccttttgcctaaagcagcagg

SEQ ID NO: 20277 - DNA, 2300 bp, Homo sapien
tttgggaggctgaggtgggtggatcacctgaggtcaggagttggagaccagcctgggcaacaaggcaaaaccccatctctacaaacatacaaaaattagctgggcatggtagcaggcacctgtaaccccagctactcaggaagctgaggcaggagaatcgcttgaacctgggaggcagaggttttagtaaaccaagactgcgccactgcactccagcttgggcgacagagcgagactctgtctcaacaacaacaaaaaaagaaaaaccagaatcaaatcttcatgacattgggtttgaccatgattacttggatatgacaccaaagacacagccaagaaaagaataaacaaagacattggacttagggaaaatgttaaaaatgtatacctcaaaggacaataccggcagagtggaaatgccacccacaggctgggagagaaaaaaaatatttttttattttttcattttttgagatggagtagcgctctgccaccatggctggagtgcagtggcacgatcctggctcactgcaacctctgcctcccgggttcaagtgattctcctgcatcagcctcctgagtacctgggactacaggcacacgccaccacgcctggctaatttttgtatttttagtagagacccggtttcatcatgttggccaggatggtctcgatctcctgatctcatgatccgcctgcctcagcctcccaaagtgctgggattacaggcctgagccactgtgcccagctgaaaaaaaaatgtgtttagagacaggatctcaccatgcccacactggtttccaactcctggtctcaggcaatcctctcgcctctgcctcccaacgtgctgggattacagatgtgagccactgctccaggctggagacatttttttattttttattttttttttgagagggagtctcactctgtctcccaggctgcagtgcagtgatacgatcttggctcactgcaacctccgcctcctgggttcaagcgattcttgtgcctcagcctcccaggtagctgggattacaggtgtctgccaccacacctggctaatttttgtatttttagtagagggggattttgccatgtcggccaggctagtctctaactcctggcctcaagtgatctgcccgcctcggcctctcaaagtgctgggattacaggcgtgaaccaccaggccggcctgtgctgcttttttttttttttttttttttttttttttttgagacggattctcgctctgtctccaggctggagtgcagtggcgagatctcagctcactgcaacatctgcctcccaggttcaagcgattctcttgcctcagcctcccaagtagctgggactacaggcgcccaccaccacgcccagctaatttttgtatttttagtagagacggggtttcaccatgttggccaggctggtctggcacttcttgacctcaggcgatctgcccgcctcagcctcccaaagtgctggggttacaggcgtgaaccaccaggcccagcctgtgcttctatttttgatcggcccaacttctgatctgtattcagtgtcgtgtgggcccctcgctggcaggtggtaatagcgtccatgattatccatgatcctaattagcgtgttgggttctatgatccacccagaagtggttgaggttttcggtggtgcccgaggtggggaaccaacagttcctcatggaaaaggtgcccaagaaggagacacccagctcccagtgccctctcctggggcatcccgggcagaacaagacaggccatatagacgcttccgggtgtgtgctgtgtagatgggttcagcctcttgctcgttttcatgggtgaccaccttgccaagtcgtgtccctatgtcagagggcaacggacaggggctaattctggaaggttcctcggggaacctgatgtgggtgtttgggtcctgccagctcaagggccggtggccgagtctaacggtctgagtggtcccctgacgctctcccctgggggcgggcatggcggtcccacctcacggccacccgcgttgcttctgcaggtttctctactcggacgaggtgcagattggcccggagacggtgatgaccacgctatacaccgccaagaagtacgcggtgccagcgctcgaggcccattgcgtggagttcctgaagaagaacctgcgagccgacaacgccttcatgctgctcacgcaggtgggcggggccggtacgaggcgggggcggggccaggcctggctggaggcggggccggggtggggcggaccgaggctggaggcggaggcg

SEQ ID NO: 20278 - DNA, 2300 bp, Homo sapien
gaagggcccggagatgggagtctgggcaggggtctagggtggtggcctggtggcaggggatcataggatggggtgcagggggtagcagggcccaggggagacaaccttctgcagagtccagggtccagagcctggcagtggcggagctggaggtgggtggtcactgaagtgggaggtggcagggcccaggggtctctggctgaggtgggggtccggggctggaggggctgtggatggtagtctatgatctggactgcagggcgggcagggggtatccctggaggggagcagcatggtttgaaggtctctgatccagatcatgtgctgagcctgggggtctccggtgggggtcactgggtctggaggcagcagggaggacgcagggagcaaggcctaggggtcttggcgcacaggggtgcgggtgggagtggcagggtccctggatggtgggggaagagggaggggtcttgtggtcatgggtgggggtggaggaaatagcacgacccctgaagggaggggtcctggagttcaggagtcataggttgggggttacggactgaggtggtgaggactggggacggggggtctcaggtgagagcggagaagtctctccatcctgggatgcaggggtgacacacttgagtgtagtggggtcccagggggccccgggagtagagagtggaagggcagtgggcaggggtgaaggacctggggaaggaggggtcctggagagtccctgggtacagggacggaggggtcaccagtaggggtcccagggggagaggggcggcaggcaagggtgcagggcctggggatggaggggtcctgaggatccccgggtatagggatggaggggtgtggcatgtggggtcatgggtcctagaaacagtgggttggggtcctgggaatggaggagcagataggggtacacgtcccagggttggagggtcacaggagtcccaggggtggtgggtgggggtgcagggccagggcatggaggggacccagggatgcaggccaggtggggtccagggatggaggggcctggggtgtaggcaggggttccagccggaggtggaggggcccagggatctgggggcagaggtgtctggggacctggggtgcagggaggggtgaggtccagggatggagcgtcctggggatggaagaatggagggtcctagggtgcaggcggggggtggagggccctgaggatggggtattcagggttctggggtgcgggctgggtggggtttgaggatggaggggcccaggggctccaagtgcaggccgagttggagggtcccaggaacggagggtaccggagtgcaggctgggtgggtccagggacggaggagagcaggggtcccaggggtacagggcctgggatcccggggaacaggctgggggcgcaagccagaggtggaggatccaggggggcctggggatggaggggtgcagaggcccagagtgcaggcctggtggggtctggggacagagaggtgcagaggcagggacagaggggtgcagagcccagggaactgggtggagtctagggatggaagggtgcaggccccggggtgcaggccgggtcggtttcaggaccggaggggtgcaggggtcccagggacagaggggtgcagggcctcaggtgcaggccccggggtgcaggccgagttgggttcggagcctgaggatgcaggggtgcaggggtcccggggacagaggggtgcagggctcggggatggaggggtgcgggggtctcggggacagaggggtgcagggcctcaggtgcagggcccgggcagcaggctgggtgggtcggggccagggctggcggggtcggggcgcccacctgtgcgcggggatgcgctgcgagctgagccccttgcccaccaggaagtgcacgtcgcacagcacctcgttgttgaagaggaaggcgaagcgctcctgcacggtgggcttgctggcctgccagttgtacgcggcctcgcgctgcagcgccgccgcccccgggcccgccgcctcctccgcccgctccgcgcccgcggcctgcgcgtctgtcccggggcccggcggggcgggcggcgtcggcccaggggcggcggcggcggcggcggcggcggcggcggcggcggccgcgttgccgggggccggggtggcggcggcgttggcgctgggcccgggactgccccccgtgcccgggccgaccccgacccccggcgggcacgacgcacgcccgccgctcccacccgccgccattttgtggctgcggcgtgggcgggggaggggaggaggga

SEQ ID NO: 20279 - DNA, 2300 bp, Homo sapien
tatatatgtatatacatacacacacacacatataaaattagccaggcatggtggcaggcgcctgtagttccagctactcgggaggctgaggcaggagaatggcgtgaatctgggaggcggagcttacagtgagccaagatcgcgccactgcactccagcctgggcgacagaacgagactgtctcaaaaacaaaacaaacaaacaaaaaaaaattagccttagccaggcgtggtggcgggtacctgtaaccccagctactcaggaggctgaggcgggagaattgcttgaaccaggaggctgagattgcagtgagccaagatcgccatcactgcaccccagcctgggcaatagagggagactctaaaaagaaaaaagaaaaaagaaaaaaaaattgtaactacctcaaccacccactctggagaactgaaaatagcattatcacttgggtttttttaataccctattttctttttcttctttgttttttttttttttcgagacaggatcttgctctgttgcccaggctggagggcagtggtggagtcatagctcatcaaaagctcaaccttccaggctcaagtgatgcttccgtctcagccttctgagtagctgggacaacaggtgcgtaccaccacgcctagttttttttttgttttgttttgtttgtttgtttgtttgtttgagacggagttttgttcttgttgttcaggctggagtgcaatggcgcggtctcggctcactgcaacctccgcctcccaggttcaagtgattctcctgcctcagcctcccgagtagctgggattacaggcacccgccaccaagcctggctaattttcgtatttttagtagagatggggtttcaccatgatggggtttcaccaggatggtctcgatctcccgacctggtgatccgcccgcctcggcctcccaaagtgctgggattacagacgtgagccaccgcgcctggctaatttttgtattttttgtagagacagggttttgccatgttgcccaggctggtctccaactcttgaccttaggtgatgcaccccccgccttggcctcctgaagtgctgggattacaggcgtgagccactgcgcccgacctggttcctcaatctttgtggcatttgtctaccttgacattatgtatgtagtaagcgttttgggggagtcccagctccgtccacactgaccaccccccacacctggcctggagagggtgctgggcgtctgctgagtgtcagtgcacgtggcctgcatcctgctcgctcatccgcagcttcccggcctcaggctatgtctctgtacagcggagcctgcgccacggagcaggcccgccacctgggtccggggtctggggtctggagtttgcgcttggtctttgggttgggggttccgggtctgaggtatgggatctggaatccggagtctgaagtctggggttcagagtctgggatctaggattcaaggtctgaggcctgggatcccggactgaggtctgtgctccagggtttaggattcccggtctggagtctggggcctggtgcctggaccccaaattctggacctcggtctggagtctgggcttcaggtcaggatgcttagggagtggagcaagaggtcttccaccagctcctcccctctacaggcccctcctactcttccctctcctccccgtcccctcccctgcaacagcctcccccattcacctcccttctcccctccctcctcccctcccacctcccctcctttcccctccctctcctcccctccctccttccccctcctttcccctccctctcctcccctccctccttccccctcctttcccctccctctcctcccctccctccttccccctcctttcccctccctctcctcccctccctccttccccctcctttcccctccctctcctcccctccctccttcccgcttcccctcccctccctcctcccctcctttcccctccctcctcttttcccctcccctccctcctccccctcctccccctactctcctcctttcccctccctccttccctcctcccctccctccttccctcctcccctcccccgcccacgccgcagccacaaaatggcggcgggtgggagcggcgggcgtgcgtcgtgcccgccgggggtcggggtcggcccgggcacggggggcagtcccgggcccagcgccaacgccgccgccaccccggcccccggcaacgcggccgccgccgccgccgccgccgccgccgccgccgccgcccctgggccgacgccgcccgccccgccgggccccgggac

SEQ ID NO: 20280 - DNA, 2300 bp, Homo sapien
ctacctggtgtttgagaagatgcggggaggtacctgggggctccaggctgtgaggagggagggagctgggaggtattacgggatgggggcctagtgccacctgcaggagggggcttgtggggtgagtgtcctgcccaaatggtggctcaggggtgaggcctttgtgctggaggaagccagtgtgggggcgtccccgccaaagtggaggtgggtgctggccttgaggggactttgaggtgacctgcgtgttccccctgtcctgccctgccctgccctgcccaggctccatcctgagccacatccacaagcgccggcacttcaacgagctggaggccagcgtggtggtgcaggacgtggccagcgccttggactttctgcataacaaaggtaggtggtgaccccgcccggagtctcctagggccgcctgccaaggactcctggaagacctccagaccctcaccccgtcgtggttctgtggcttctcccccaggcatcgcccacagggacctaaagccggaaaacatcctctgtgagcaccccaaccaggtaggccagttccggcagggtggccccgcgggaggggtggaccgcgtgggaccccaggctcacggaccttttggcccctcccaggtctcccccgtgaagatctgtgacttcgacctgggcagcggcatcaaactcaacggggactgctcccctatctccaccccggagctgctcactccggtgagggcccgcggggagggctgggggctcggccgcctgctctgcggttgcataacctcgcggagcctgggccatccagcagctccaggccgcggagctcgggcttccgcctagcaacagccgctgattggttgggcggggtgtcgcggcggggcctcgagcaggcgccccaacgcgtcggtgtttggccgggtggggcggggccgcggcgggggaggggcgagctctgcacctgctgattgggcgggggcgcgttcccggcagccgctgattggtcgggcccggcggggcggggtccgagccggctggcgcaggtgacccgcagttacccgggctcggttcccacgtaatgctgggaaaccccggctgacgcgcccctcccccgcccgcagtgcggctcggcggagtacatggccccggaggtagtggaggccttcagcgaggaggctagcatctacgacaagcgctgcgacctgtggagcctgggcgtcatcttgtatatcctactcagcggctacccgcccttcgtgggccgctgtggcagcgactgcggctgggaccgcggcgaggcctgccctgcctgccaggtgcggcggcccgcgcaccctcctctcctgggcaccctcctcccccgggcctgccctgaacaccccctaaccccaggggacctgccctgcgcaccctctaagtccaggggacctgccccctgaccaccccctaaccctcggggacctgccctgtgtgctccccagacccccggggacctactctgtactccccctaacccctggggacctgcccggtgtgccctactccctgatgccatccacagggcagtgccgccctgtctgccagtttcccgaaggcttttcaggtttgcctgcccaagggaaaccccagacagggttcagagagctgagaggtggagtgaggcccctggtttggggggatcaggctcaggctccctgcccgcggcttaaggctcagcatctgtggcctgtggtccctggaaccaggtccctcagagctgcttttttgtaaatccagctccacttgggtggagctgactctcctggtccggctcccagccccctctgccccaggcgtgcgtggtctagggcctggtctagggcctggttggggtccggttggagccacgtgtcagtgcacagtatccaggcccttgggcaggtctaagctcccctgtgttctatgtccccagaacatgctgtttgagagcatccaggagggcaagtacgagttccccgacaaggactgggcccacatctcctgcgctgccaaagacctcatctccaagctgctggtccgtgacgccaagcagaggctgagtgccgcccaagtcctgcagcacccctgggttcagggggtgagtaccagccgcacgggcggcaggaggggtatgggggcgctgcagggtggcctcagagcgagcatgggaagccctgagggtgtagcctggacaccctgagatgcactgaggcttgagagcacaggctctgccctgggatgaggggtgcagccgaaatccccaccgcccgcctgtgcacggtgcc

SEQ ID NO: 20281 - DNA, 2300 bp, Homo sapien
caggtacccaccctgtggggaaagaggactacagctgactgtctctgggtcagggagggtggccgcccagggcagggaaccctcacgtcctgtgggggtattttgcagaagtcataggtctcaaatgtgtctctgagggctgtcagggtcacaggtggagagcagcctccactggctttttttttttttttttttttttttttttgaggcgaagtctcactctgtcaccaggatgctggagtgcaatggcgcgatctcagctccctgcaacctccacctcccgggttcaagtgattctcctgcctcagcctcacaagtagttgggattacaggcgtgtaccaccacacccagctaatttttatattttcagtagagacagggttttgccatgttggccaggatggtctcaatctcctgacctcatgatccacccgccttggcctcccaaagtgctgggatgacaggcgtgagccctgctttctagagttgcagggcgttaagtgtggtgaattccagccgtggcagtggagtttctggccccttctcgactatgagcgtcccaccaacccaggtgctgtgtcctttcgcctgtttcagatcattgagaagcagccaggccacattcggagcagggttttcagggaggtggagatgctgtaccagtgccagggacacaggtaggtgagccacccttgccaccgcactggcctgagctgtctttcagtggatgaagggcctgagtgccacatcacccccagcaagcgtctgtagggcacccagtttcccaggccctgcattcccctccctgaagcaggctggctgacagccccaggcgggcagtgtgaagctggcctattgccccagtcccagcttccggtggacaggccagcaccaagagggtgggcccctcctaggccgggcagcaggtacccaggggcctcaggaagcctcagctcctctcctgcccccacccccaccccaggaacgtcctagagctgattgagttcttcgaggaggaggaccgcttctacctggtgtttgagaagatgcggggaggtacctgggggctccaggctgtgaggagggagggagctgggaggtattacgggatgggggcctagtgccacctgcaggagggggcttgtggggtgagtgtcctgcccaaatggtggctcaggggtgaggcctttgtgctggaggaagccagtgtgggggcgtccccgccaaagtggaggtgggtgctggccttgaggggactttgaggtgacctgcgtgttccccctgtcctgccctgccctgccctgcccaggctccatcctgagccacatccacaagcgccggcacttcaacgagctggaggccagcgtggtggtgcaggacgtggccagcgccttggactttctgcataacaaaggtaggtggtgaccccgcccggagtctcctagggccgcctgccaaggactcctggaagacctccagaccctcaccccgtcgtggttctgtggcttctcccccaggcatcgcccacagggacctaaagccggaaaacatcctctgtgagcaccccaaccaggtaggccagttccggcagggtggccccgcgggaggggtggaccgcgtgggaccccaggctcacggaccttttggcccctcccaggtctcccccgtgaagatctgtgacttcgacctgggcagcggcatcaaactcaacggggactgctcccctatctccaccccggagctgctcactccggtgagggcccgcggggagggctgggggctcggccgcctgctctgcggttgcataacctcgcggagcctgggccatccagcagctccaggccgcggagctcgggcttccgcctagcaacagccgctgattggttgggcggggtgtcgcggcggggcctcgagcaggcgccccaacgcgtcggtgtttggccgggtggggcggggccgcggcgggggaggggcgagctctgcacctgctgattgggcgggggcgcgttcccggcagccgctgattggtcgggcccggcggggcggggtccgagccggctggcgcaggtgacccgcagttacccgggctcggttcccacgtaatgctgggaaaccccggctgacgcgcccctcccccgcccgcagtgcggctcggcggagtacatggccccggaggtagtggaggccttcagcgaggaggctagcatctacgacaagcgctgcgacctgtggagcctgggcgtcatcttgtatatcctactcagcggctacccgcccttcgtgggccgctgtggcagcg

SEQ ID NO: 20282 - DNA, 2300 bp, Homo sapien
gccccttccatgccaggaggggctgcgccccctccctgaagcagcattctagccagccacccaagggacaggacgaggttcagttttgtccagaaccatctgcagtgcctgctgggcacagctttcagcagcggcctgggtggtggtatttcaggacaccctggcgtccagttgttctcttgcccctcgctgggacagtgttgtctgtcagtatagacatgggactgcagaggcaggagccagggactcaagggtggaatgccacatccctgctgccaccaggccatcgcactgggcagggaaccctgggcagagtgctcatgcagccaggcacccgcccagtgagaggggctaacatgtccagcctggcaggagggtcccagcaggtgccaggggaagctgcagacgcctcctcaccccacctctgtgagtgaaggtggcagggagcagctggagctgctgggggcagtagagtggcttcctgaggctctggggctcagggaggctggatccgccagtggctgggacagccaaccagggtgggcccgaaacagatattggctgaggcggcaggcaagtgtctgcccaggctggcacggagctggggagcaggacttggtgctgtggccacatgtgaggtggggcctggtgggctggcagccaggtgtcctgaggcctccctagttctatgggtgaccaggtacccaccctgtggggaaagaggactacagctgactgtctctgggtcagggagggtggccgcccagggcagggaaccctcacgtcctgtgggggtattttgcagaagtcataggtctcaaatgtgtctctgagggctgtcagggtcacaggtggagagcagcctccactggctttttttttttttttttttttttttttttgaggcgaagtctcactctgtcaccaggatgctggagtgcaatggcgcgatctcagctccctgcaacctccacctcccgggttcaagtgattctcctgcctcagcctcacaagtagttgggattacaggcgtgtaccaccacacccagctaatttttatattttcagtagagacagggttttgccatgttggccaggatggtctcaatctcctgacctcatgatccacccgccttggcctcccaaagtgctgggatgacaggcgtgagccctgctttctagagttgcagggcgttaagtgtggtgaattccagccgtggcagtggagtttctggccccttctcgactatgagcgtcccaccaacccaggtgctgtgtcctttcgcctgtttcagatcattgagaagcagccaggccacattcggagcagggttttcagggaggtggagatgctgtaccagtgccagggacacaggtaggtgagccacccttgccaccgcactggcctgagctgtctttcagtggatgaagggcctgagtgccacatcacccccagcaagcgtctgtagggcacccagtttcccaggccctgcattcccctccctgaagcaggctggctgacagccccaggcgggcagtgtgaagctggcctattgccccagtcccagcttccggtggacaggccagcaccaagagggtgggcccctcctaggccgggcagcaggtacccaggggcctcaggaagcctcagctcctctcctgcccccacccccaccccaggaacgtcctagagctgattgagttcttcgaggaggaggaccgcttctacctggtgtttgagaagatgcggggaggtacctgggggctccaggctgtgaggagggagggagctgggaggtattacgggatgggggcctagtgccacctgcaggagggggcttgtggggtgagtgtcctgcccaaatggtggctcaggggtgaggcctttgtgctggaggaagccagtgtgggggcgtccccgccaaagtggaggtgggtgctggccttgaggggactttgaggtgacctgcgtgttccccctgtcctgccctgccctgccctgcccaggctccatcctgagccacatccacaagcgccggcacttcaacgagctggaggccagcgtggtggtgcaggacgtggccagcgccttggactttctgcataacaaaggtaggtggtgaccccgcccggagtctcctagggccgcctgccaaggactcctggaagacctccagaccctcaccccgtcgtggttctgtggcttctcccccaggcatcgcccacagggacctaaagccggaaaacatcctctgtgagcaccccaaccaggtaggccagttccggcagggtggccccgc

SEQ ID NO: 20283 - DNA, 2300 bp, Homo sapien
tcaggaggctgggataggaggatcgcttgagcccaggaagttgaggctgccgtgagctatgaatgtgtccctgcactccagcttgggcgacagagtgagaccctgtctcaaaaaatagtaaaataggccgggtgcagtggctcacgcctgtaatcccagcactttgggaggccaaggcgggtggatcatgaggtcaggagttcaaaaccagcctggccaacatggtgaaaccccatctctactaaaaatacaaaaaactatccgggtgtggtggtgcgcgcctgtattcccagctacttaggaggctgaggcagaagaatcacttgaacccgggaggcgaaggttgcagtgagctgagattgtgccaccgtactccagcctgggtgacagaatgagactccatctcaaaaaaaaaaaaaaaaaaaaaggaaaataaaataagaagaggagacacacacacagaggaggaggcagagactggagtgatgcggccacaaaccgaggaccaccagagcccccagaagctggcagaggcaggaagcatcctcctagagcacttggaggaagcaaagctctgcccacacttctagacttctgggctccaggactgtgagagcacacatttctgttgttttaagccccccagtttgtggtcctgcattacagtggccccaggaagctcacacgaccacacaacccctacgtgcgcgtgtgcgcgtgcacacacacacacactcttatcctttcctccaagcactatttactaggcgccctctgtgagccaggcccaggcaagcaggtctagcagctccacccctagttggcacctggagctaacgtgtgtttgtgcgtgtatgtgttcacacgcacacacacgcacccacatgcacaataaggggggctgggggacctggttttctgtccccccattgccaagagtcagggcaatgccaggtgctgggctgggttctggctgggaattccccacaggcttccccccaatgccccgggggtggctgaggccaggcctcccagcccctgtggcctgagagctgtggccttgcaggcaggggccctccagcttcaggtcagtggggctccagcccctcttgagctcagggcctggttgggggatggtgggatgggctgtgcgaagcttctggaaacccctgcagaagaggagaccacagtccacccagcaggggaacccccactccttgtgtgccccaggcccggggcctggggagcactttgaaccaggatgctgtgggatgggggactggcagctcaggacaggctgattctatctaagcctggtttggggccccagccaaaatgggactgtgttttacttcctgtcctggcgaccatccaccccttgggctctttcccagtgggtctcaggtcccagttctccctgaaatgctattcgaggacagaggaagggtccttcacagacctcggtccccaccctctactctggttcctgccaaccacaaagcaaactcggggagctcagtgctccccaggcagggtggcccaggggaagaagaaagtaggtggcggtggctggtcccccagcactagaagggagtggctgggactccaagcgtgctggtggtgcacgagggggactgctggagccagcactggagaactgcaagagggagccatggcaggttctagagcgagggcatgaaccaagggagtcggggtatactaggcctgggttgacaggccaagggagttgccctgtgtggggccaggcggtaggacacggcccagggcctcgcaggtcccacgggccccgcgagcctcaggcggcaaaaacaggccagctccgggcgcgccgcagggtcgctgcctaggttccgcaccgagacccccgtgcgccgcactgcgcaggcgtgcgctagccgtttcggacacgccccaccgccggagcgcgcagccgcactgggttcccggagagcgccctcttctggctccgcccacgtcgtgcgcagggggtgaggccgggcggagcctgcgtcgggggcggggccagagcaggtccgggcctataaaggtggcggcggcggcgacgcgcccggctcctctcagcggcggtggcccaggtagaggggtccgcgctggcggcggcggcggcgctgttccccgcgcggtccgcggagcggggtccgggctgcgcgacgtggggcggcggcggcactgcggccccggcccaagcccgaccccggtgagtgcgaaccccagggcggccccgaggacaccgacccggtagcgggaaacgggccccg

SEQ ID NO: 20284 - DNA, 2300 bp, Homo sapien
acctcgtttctactaaaaataaagaaacttacccaggtgtggtggtgtgtgcctatagtcccagctattcaggaggctaagttgagaggatcgcttgggcctgggaggcagaggttgcagtgagctgtgatggcaccactgtactccagccggggcaacagagtaagaccctgtctcaaaaaacaaaacaaaatcctgccgcttgtgccctcagcacgagtttccgggaaattctgtcgcctccagcaggtcatgattcccctgtgtatttcaggtccgcgggagagctgtggggcttggtgagtgtttcgtggcctctcgggttggtcagcacccccagccagctggcccaggacccctctacagaagtccaggagagcaggcgtcaccaagatgtccaaccccttcctgaagcaagtcttcaacaaggacaagacattccgccccaagcgcaagtttgagccaggcacccagcgcttcgagctgcacaagaaggcgcaggcgtcgctgaacgccgggctggacctgcggctggccgtgcagttgcccccgggcgaggacctgaacgactgggtggctgttcacgtggtggacttctttaaccgcgtcaacctcatctacggcaccatcagcgacggctgcacggagcagtcctgccccgtcatgtcggggggccccaagtatgagtaccgctggcaggatgagcataagttccggaagcccacggcactctccgcgcccaggtacatggacctgctgatggactggatcgaggcgcagatcaacaacgaggacctcttccccaccaacgttggtgagtcagagctggcaggggctcggggatacagagccttccagaaaagtcagggaggccgagcacagtggctcacacccgtaatgccagcgctttgggaggccgagcccagggatcgcttgagcccaggagtttgagctcagcctgggcaacatagcaagatcccatctctacaaaaaattttaaaaattagccaggcatggtggcacacgcctttggtcgcagctactcgggaggctaaggtgggaggatcgcttgaggctaggaggttgaggctgcagtaaactatgatcgtgccactgtactccagcctgggtgacagagcaagaccctgtctcaaaaaaaaaaaaaggattccatttctgagtattctcctaagttgggctgctcttagtagccccccttcatcctgaatcactcctggtgactcctgtctcctcaccccaaagcagagaatgacaggatcagcatcaggcctggagtccttcgcagaggagacaagcacccctgccagtgctgggcccagtgttctcagtggtttcagaatcactgccatggagcccctgggcccaccaggatcatcaccccgttggcgggaccccctgcccagctcgatgtgtaatgcactgcatggctctcagggacaccccataaacgtgggtttgaggatgatcattagggcacgtccctccagagtacagcgtacctttcttttcttttctttttctttttttttttgagacagtgtctcactctgtcacccaggctggagtgcagtggcacgatctcggctcacttcaacctctacctcccaggttcaagcgattcttctgcctcagcctcctgagtagctgggattacaggcatgagccaccacacccggctaatatttgtattttttagtaaagatggggtttctccatgttggccaggctggtctcgaactccagacctcaagtgatctgcctgcctcggcctcccaaagtgctgggattacaggcgtcagccaccgcgcccgatctgccagcaatttctgtctggaagccccttgtcacatccaggagcaaagggttctggacatggacttggctgagtccgtggacccgtcccacccctctccctgcaggcactccgtttcccaagaacttcctgcagacggtgcggaagatcctgtcgcggctgttccgcgtgttcgtgcacgtctacatccaccactttgaccgcatcgcgcagatgggctccgaggcccacgtgaacacctgctacaagcacttctactatttcgtcaaggagttcggcctcatcgacaccaaggagctggagccactggtgcgcgggcttggggctgagggcgtgcggttacggtggggctggtggcccgtggcagaggaacccttccggggccaggaccctgactgcttgcggtcggcccagcagctggcggccccggctggagttgggccccggggaccctgctgatgggaca

SEQ ID NO: 20285 - DNA, 2300 bp, Homo sapien
gactacaggtgcccaccactacgcccggctatttttttgtatttttagtagagacgagtttcaccgagttagccaggatggtcttgatctcctgatcttgtgatccgcccacctcggcctcccagagtgctgggattacaggcgtgagccaccgcgcccagcgccttttttagcaggacagattctgggctgggagcatcttccagccaagtatgagggctgggctgccaggccgggagccagtgttgtgcactgacctagaacatatggaactgacttctccactcagggcttgtctctcaggcgcctcccgtgctctggggcagcggtccccgaggcagtggcaggatgtggaaacctccggaaggaagtgggtgactgtggtccgtgagctgctacacctcggtgggggaggggtcataccagttggttgcttagagaaactgtgttgttcaaaaaaaaaaaaaaaaaaagtgttgcagcaggggaatttgtcatttcacctttcatttctctagaagtttccaagggtcacttgtgtctcgtccgtgggaagaccgggggagcccagaaggccttggtgtggaattctgagagctgattcctgccttgtcttctccactgttcctggaggaatccgagaagagcagagcggagggagccccagacacggtaacctgcccccggcctcaggggacaacgagggcgggagtcagggtcccgaggccaccccggcctttctttggaaaagacccctttctgtggccaatcacccctccgccaaggagcctgtgtttgttcctgatagaaaacgctttgctcgggccggacatggtggctcacgtctgtaatcccagcactttgggaggctgaggtgggaggattgcgtgaggccaggaattggagagcagcctaggcaacatggtgaaacccctgtctctaaataaaaaaaaaactaggccgggcacggtggctcacgcctgtaatcccagcactttgggagggcaaagcgggcagatcacgaggtaaagagtttgagaccagcctggccagcatggtgaaacgccatctctactaaaagtacaaaaattagctgggtgtggtggcgggcgcctgtagtcccagctactcaggaggctgagacaggagaattgcttgaacctgggaggcagagtttgcagtgagccaagatcatgccactgcactccagcctgggcgacagagtaagatcctgtctcaaaaaaaataaaaaggaaaaaaaaaaccgtctgctgtgacgggaactctgccagtccacaaggttcttcagaagatgttaacttccactgaaaatcctgcacctttttctttttgtgacggagtctcactctgtcaccagggctggagtgcagtggcgtgatctcagctcactgtagcctccgcctccctgggttcaagcgattctcctgcctcagcctcctgagtagctgggattataggcacatgccaccacacccggctagttttttgtatttttagtggagatagggtttcaccatgttggccaggctggtctcgaactcctgacctcaagtgatccacccacctcggcctcccaaagtgcagggattacaggcatgagccacctcgcctggcacccctcaccttctgaaaggagacagacatgccaagaggaagtttacaagctcctcgggctgccctgtcttgttttctggaactgtcttggtgtgagtctggtagacaagcttaaaaggatatagacaaagataagcctcagccaggcacggtggctcacgcctgtaatcccagcactttgggaagctgacgtaggaggatcacttgagaccaggagttcaagaccagcctgggcaatgtagtgagaccctatctctacaaaaagttttaaaaagacaagcgggggcctgtgggaacagccgctttctccctgaggctcagcccaggtagggggtctcctcccatggctgcagtcagcccagggctgcaataccactgctggaaggccccgcctgcccaaccaggtggcacggttggaagctaagcccccaaattggcatgggaggccctgaaatcaacaaacggcagcaccaggctgtggcaggttgggttttgctctgtgctgtgatttctgttggagttggaaagttggctgtgagtcggcccagatgtgaagcggaaacggggaggagggaggtgagtgggcctggctgggtggatggggatctgctcgcctgcacggtttcctctttggtaaagtggggcctgcactcgccccatctaga

SEQ ID NO: 20286 - DNA, 2300 bp, Homo sapien
ttttaggggtgaggaaagtgttctggaattagataaaggtggtgtttgcgcaacgccaaacgtgccaggagtcacgtaactgtactcctgaactgtaactgaaaaggttaaaacgtgtgggatgtgagtcatatgtcaatctaaaaacagaagaaaagactatcaggagaattaggacagtatgctaagccctcgatagcacctggcccagaggggcctgggcaggccttgcttcctgcctgtctgctttcccacgagagaagtcagagatgcagtaggcacagtggctcacacctgtaatccctgcactttgggtggctgaggtgggaagatcgcttgactccagaagctcaagaccagcctggacaacatagcaagaccccatctctacaaaaatacaaaaattatacaggtgtggtgttgtgtgcctgtagtcccagctactcaagaggctgaggtgggaggatcacttgagcccgggaggtcaaggctgcagtgagctgtgattgcactactgcactccagcctgggcaacagagcaagaccctgtctctaaaaaaaacaaaaatgtaaaccagacaaaagcacaaaacagtgacaggatgcacgcctgggtgatcagggaagacgcagccatcctccagcaggagtgagggtggcctaccagcaccaggagcagttgtaacgtttaaaagtaaaccctcaggccaggcatgctggctcacgcctgtaatcccagcactttgggaggccgaggtgggcagatcacctgaggtcaggagtttgagaccagcctggccaacatggtggaacagtttctcctaaaaatacaaaaattaggcaggcatggtggcgtgtgtctgtaatcccagctatacaggaggctgaccaggagaatcgcttgaacccaggaggcagaggttgcagtgagccgagatcacgccactgcactccagcctgggtgacagagcaacacttcacctcaaaaaaataaaaataaaaaagtaaaaataaacactcagaggctgggcgttatggttcacgcctgtaatcccagcactttgggaggccgaggtgggcagatcacttgaggtcaggagttcgagaccagcctggccaacatggcgaaaccccacctctactaaaaatacaaaattagtcgggcgttgtagcgggcacctgtagtccctgttacttgggaggctgaggcaggagaatcgcttgaacctgggagacagaggttgtagtgagctgagatcgtaccactgcactccagcctgggcaacaagagcaaaactccgtctcaaaaaaataaataaatgaaagtaaaaataaataaatactcagattttggaaggtggctccgggatgctgcctttttttttttttttttttttttgagacagagtcttgctctgtcgcccaggctggagtgcagtggcacaatctccgctcactgcaagctctgcctcccgggttcaggccattctcctgcctcagcctcccaagtagctgggactacaggtgcccaccactacgcccggctatttttttgtatttttagtagagacgagtttcaccgagttagccaggatggtcttgatctcctgatcttgtgatccgcccacctcggcctcccagagtgctgggattacaggcgtgagccaccgcgcccagcgccttttttagcaggacagattctgggctgggagcatcttccagccaagtatgagggctgggctgccaggccgggagccagtgttgtgcactgacctagaacatatggaactgacttctccactcagggcttgtctctcaggcgcctcccgtgctctggggcagcggtccccgaggcagtggcaggatgtggaaacctccggaaggaagtgggtgactgtggtccgtgagctgctacacctcggtgggggaggggtcataccagttggttgcttagagaaactgtgttgttcaaaaaaaaaaaaaaaaaaagtgttgcagcaggggaatttgtcatttcacctttcatttctctagaagtttccaagggtcacttgtgtctcgtccgtgggaagaccgggggagcccagaaggccttggtgtggaattctgagagctgattcctgccttgtcttctccactgttcctggaggaatccgagaagagcagagcggagggagccccagacacggtaacctgcccccggcctcaggggacaacgagggcgggagtcagggtcccgaggccaccccggcctttctttggaaaagacccctttctgtggccaatcacccctccgccaa

SEQ ID NO: 20287 - DNA, 2300 bp, Homo sapien
atgtcaacatttatccaaccatctgctttgaatacgggcagtttattgcatgtcaattaaacccgtataaactgttaaggagaaaacgaagaaaaaagcaagtgcgaaaaaagcagtgtgggccgggcgcggtggctcacgcctgtaatcccagcactttgggaggccgaggcgggcggatcacctgaggtcaggagctcaagaccagcctggccaacatggcgaaactccgtctctactaaaagtacaaaaattaactgggtgtggtggttggcgcctgtaatcccagctactcaggaggctgaggcaggaggatcacttgcacccgggaggcagagtttgcagtgagcagagatcgcgccactgctctccagcctgggcgtgagtgagactccaaactccgtctcaaaaacaaacaaacaaacaaacaaacaaacaaaaaaacagtgtgtacaaagactggaaatcttacccccaggatgagctgcggcttggagcactgattttctgctctgtgactgcattttccaatttcccctcccctctcagtgactcctaataaaatgcaccctcgcttacactttctagcccctcttcgctgcagggaggaggggcagcttgtccctggcgggcgcctccttccggggtgggggggccctgccagcgactttggggaccccgagcaagaagggcctattcgaaagggcccgaccgccgcgttggcttggggatcctgaagccctgcagaattttaatccacaccgggaggtgcggggtcctgcgggagggcagcgggcagggccaggagttcacccccgcagctcgaccccgcaccctgtatccccctccggggtaatcggtctccccgccgcccgcgttcgcccctcctgggggatcggcctcctcgccgcctaagttcacccctcctgaaggatccggcttccctgccgcctgagttcgcccttccttttttcttttttcttttgttcttttttttttttcccccgctctggttgcccaggctggagtgcagtgatgtgatctcggctcactgcaacctctgcctcctgggttcaagtgattctcctgcctcagcctcctcagcagctgggattacaggtgcgcgccacctcgtccggctaattttgtatttttggtacagacggggtttcaccatgttggccagactggtctcgaactcccgacctcaggtgatccacccgcgtcggcctcccaaagtgctgggattacaggcgtgagccaccgcgcccggcctcgcccttcctgaaggctcggcctccccgtagcctaagttcgcccgtctgagggatccagcttccccgccgccagggttcgcccttcctgagaactcggtctcctcgccgcctaagttcacccctcccgggcacccacctggccgcctctgccgcccgccttcgcccctcccggacacccacctgatcgcctctgccgcccgccttcgcccctcccggtacccaactggccgcctcggccgcctcagccgccgcaccgcctcgcagccgccgcggagggacacggccgcgggaacgccccacacgcatgcccgaccgcacccgcggaccggacctactttccttaaagggcccggggctccgcgcagaagcggcgtgcaggggtctcccagactcggtcccgcgggctttaaggggcccgggcggcgaaggcgcacggagccaagttccgggcagcagccctgggatgccctgagccgggccgggcggaggtctccgttgcctagcaaccggggccgcggcctgtgggcggagcctgcaccgtggctgcgacacggggcggggcctcagcgggagccggccgaggagcgggcaccggccattggcacaggcacgggccattggcgcatgcgtagggcgcggccttggggcggggcccacccagtggcggagtcttctgaggggcgggtcgtgggcggggcctggaggcggagccggcgccgtcagtagtcggctgaggacggaggcggggctgggcctgggatggggcggggcctgcgctggtggggcgggcgggggaggagacacggccaagcgcccgagtgggggccgttggttggtgcgcggctgaagggtgtggcgcgagcagcgtcgttggttggccggcggcgggccgggacgggcatggccctgctgctgtgcctggtgtgcctgacggcggcgctggcccacggctgtctgcactgccacagcaacttctccaagaagttctccttctaccgccaccatgtgaacttcaagtcctgg

SEQ ID NO: 20288 - DNA, 2300 bp, Homo sapien
gccgagtggccgtggccagtgttccctcccaggcccaggtgagcttgctgccacccaaagaccccactcacatgtagttcaggaggccctggacagctgacttccactgcgccgaggacctgtgggacacaggcttggaagtggtgcgcccctgaacccacggccccgccctacccgatgacagccaggtggaaggcggggagccccctccaaggagagcctgggaccccagggacagtagggccctggcacgggtgggtgtgatgcctgagccctactcgcagttatagccaaagcaggcgacgtgcgagtctgtgcagttgttgcaggagatggtctcgtactggaagatgcctgaaacacgtacaagagccgccagggctcccctcagcctccagggccccgagctgccaccggcacgcccctcagcctggacggagccttgcttaccacagcggtgctgacagtcgatgcggcctgtgggagggcaggacagcgccatcttaccaggcccagccttgtccccagtcctgcctcctcccaaccctccaaagcctcagggcctgtccctcggcactggggcccaggctcacctggttttcatgtatgtgtgtccatggcccggagggaaggggtccccaggttgacccccagcgtgagatggagcaaacttcaggggagggcggtggcaacactcccagcgcctctgggggctacttaggggaggtccccgcggggtgatggcattgatccttcaggtgctaggctgggtccctccctggagagctgccctcctccccagctgcctggtgccaggtgccctgttcacatcactccagcctcagccaagccccgtgggtctccgaggctctgggcaacacctccctcctctgaagccttatttgctcactttcgatgatggcgttctggatgaggtgcacctgctcccggaagatgtttcgcagctcgttggggaaataccctgagtcgtcgaggcaggagaaggtcaggctcaggcggtgggcggggtgtcccggggtgggggggccccgcctcggtttcgcgccccttaccggggaagtacatcttcccctggtacagctgatccatcatctggtacactgctgtcgccacttggtccagcttctcccgggctgcgggcaggaggagaagccaggtgaccggcctgccccggggtctcgctggcggggtagtcgggactgggctgggctccggcactcactgatcttggcggggatggccaggtgcagctccttcatcgtgtcgtcgctccagtcggtgagcagcgcccctgacacggggatgtcgcccacccaccaggacttgaagttcacatggtggcggtagaaggagaacttcttggagaagttgctgtggcagtgcagacagccgtgggccagcgccgccgtcaggcacaccaggcacagcagcagggccatgcccgtcccggcccgccgccggccaaccaacgacgctgctcgcgccacacccttcagccgcgcaccaaccaacggcccccactcgggcgcttggccgtgtctcctcccccgcccgccccaccagcgcaggccccgccccatcccaggcccagccccgcctccgtcctcagccgactactgacggcgccggctccgcctccaggccccgcccacgacccgcccctcagaagactccgccactgggtgggccccgccccaaggccgcgccctacgcatgcgccaatggcccgtgcctgtgccaatggccggtgcccgctcctcggccggctcccgctgaggccccgccccgtgtcgcagccacggtgcaggctccgcccacaggccgcggccccggttgctaggcaacggagacctccgcccggcccggctcagggcatcccagggctgctgcccggaacttggctccgtgcgccttcgccgcccgggccccttaaagcccgcgggaccgagtctgggagacccctgcacgccgcttctgcgcggagccccgggccctttaaggaaagtaggtccggtccgcgggtgcggtcgggcatgcgtgtggggcgttcccgcggccgtgtccctccgcggcggctgcgaggcggtgcggcggctgaggcggccgaggcggccagttgggtaccgggaggggcgaaggcgggcggcagaggcgatcaggtgggtgtccgggaggggcgaaggcgggcggcagaggcggccaggtgggtgcccgggaggggtgaacttaggcggcgaggagaccgagttctcaggaagggcgaaccctggcggcgggga

SEQ ID NO: 20289 - DNA, 2300 bp, Homo sapien
gtgtggcccgcatgggcagtcccactgcgtcccagatagatggcgttccaccaggccacaagggcgggttccagtgatggggttcctctcttcctgtcagaatgctctgcccagcgacgaggatgacaaagaccccaacgacccctacagggctctggatattgacctggataagtgagtccatatgggttcagggtgagggtggaggccacatgtggttgcttcccttcctctcgtcctcccttccgggtggggccgggctctgcagggtgggcaggctggggtggggtgcgggcgggccttccccagaccacgtcctcactgcactgctcttggctggccctcccaaccaagactcttaagtgtggactctgaagtctccaggcctggggtgctcgggaggtctccatgccttgacagggcagggtgtggccaccacagaccctcccatgagagcctccagcaggctgtgttgagtagatctatgttgggccatggctggggccaggggctggaggagcaggtcccgcactgccacatgcttggacacggcatgtactgagtggtcctggggggtggccagtggtgctgatgtgtggcccggtcattcctcctccaggcccttagccgacagcgagaaactgcctattcagaaacacagaaacaccgagacctcaaaatcccctgagaaggacgttcccatggtagaaaagaagagcaagaaacccaagaagaaagagaaaaaacacaaagagaaagagagagacaaggagaagaagaaggagaaggagaagaaggtaaggctagtgcccagggcggcggccttctccattcccctcccttgccgtgaactcccaggagacagcggtgagctcaggggaaatggctgtgagtctgagtcaggcagcgagtgccagccgcctcgccctgtgccccggcggagtgaggacatgtggcttctgaggggagctgactgtgcacttgtgtcaggggagactgaggaggacccaacgatcccatgggtgagccgtgtcctcacctgtgttggggggacatggtcagagctcggcgtggtccagatgccaccctcacgtgcagctccagaaccgtttctgcagtgtctgtgtgcagattttcacatagagaaagaaatgggtttttcaaaggagcatgtgtttgcagggcctgggagcctgtccacacccacgtcaggtggcccaggcagacataagacatatgggccgccacgggccttctgaccactggaatggcacacacccacccacagctttgtccccggccctcttctggcagcgaaagccagagccagcagggctggctgaggacatcgccttcagctcctggattcccaggctctgcaaggcccagctagtccaggaccctgggggcagcgagggcagctggggcctccttggccctgctgtccccgtcccctcttcccaggaccattgcactgcgtttgctgacagcctgtcttgtggtttcaggctgaggacctggacttctggctgtctaccaccccaccgcctgcccccgcccccgcccccgcccccgttccatccacggtaagagactggcagctggccagtgccagcctcggtgtctgcagaggtcatacctggcactcagggaagagccctgggtctcctgaggccctgtgctctcgcggtcagcaccgtgcacctgtgggacccagcactgagtggagccggggtcatgctcccgggtcccagtgggccaagcaggggccaggggaaggggaggacagccagggcctctgtgctcacaggctccctgtcactcggagggcactgtggcctctcaggcaggcgtgagggcaagctgagggtgtgtggcatggaggctgtctggggtgcagtggagtggggcccctcattgcccagcatgagccccaagccctggctccctgcagggggagctcagtgtgaacactgtcactaccccgaaggacgagtgtgaggacgccaagacggaggcgcagggcgaggaggacgatgccgaggggcaagaccaggacaaggtgaggctgtcactcccccaggggctgtggagggctgcatgagccccagcaccccaacgtggggccggacacagcttccgccacccaggtcccagggcagccctgctctcgcatttgtgttggcgttctcacgggccttttgttgtggttgtggtcttgtgtttttttaataaccttcttattcacacatggttcataagtctcatagagtttattcatttgaagtatgtatacagtg

SEQ ID NO: 20290 - DNA, 2300 bp, Homo sapien
ggattacaggcgttagccaccgtgcccgccctcactttctgtatttttagtagagatggggtttcaccgtgttggccaggctggtctcaaactcctgacctcgtgatctgcctgcctcggcctcccagagtgctgggattataggcgtgagccaccacacccggccacttctatcattttcttattgggaaaaaagtggactagaaacatattcaagtcccaaggcattgtgtcagacgccagtgaggcgcaccccgaggccccactgtcccacagatcagggtctcccggttccgtctgttccctgcccatcctgcttatcctcccagggccagctgcacagttgaccccgttgtcctttttcctcttctgacctttcctccattcagtggctctgtcatctccacatctctgccttgtttgtgttacgggctgttgacggcctgtggtttcttctacttcgtgtctcagcccctggagaccgctcagggaatgggaagggcccagagtcaccttgttggtgacgagcccaggcctcctaggtcctcacctgctagagaggagccccgggattggcatcctgggggctcacagtgtttcctgtcctcaggcatctgcaggaaccacaccacactttggaggccatgctgcggcccagagtcaccacgctgccaggccacatccaggccgtgtatgtgcagaacgtggtcaagctctacgcctccatcctgcagcagaaggagcaggccggggaggcagagggcgctcaggccgtcacccagctcatggtggaccggctgccccagtttgtgcagagcgcagacctggaggtgcaggagcgggtaagatccaacactccgtgttgggccgagcctcagggagccctcagtgcctttctgtccagtggcggccaggtcgacggggcctcgcttcctcttccgaagccactcactgagattcttttgttgccacttgtgccagctggggtttggggttagtcagtgggacctggaggtcagcaggacgggggatccgtcagtaggactggggcaggtctctggggtgctgggtatgtgagggtgctgctcctggccacaggaagaggttgtttcacatgcggcgagacagcaggtgtgagagcctggggctggcagtggctctttctggtggctgcaggtgacgtgggttctaggttgagcagactgtacacctgtgccaggcggtgcccaccacttcccaggtgtctgtttttctgcttgttttttgttttgttttgatttttcgagatggagtttcactcctttgcccaggctggagtcaagtggtgcgatctcagctcatgacaacctccatcccctgggttcaagggattcttctgcctcagcctccctagtagctgggattataggtacccgccaccacgcccggctaatttttgtatttttagtaaagacggagtttcaccttgttggccaggctggtctcaaactcctgacgtcaggtgatccacactccacagcctcccaaagtgcaaggattacgggtgtgaaccatcgcacctggccatctgtgagagaggtcgggagtggcgtcagcctgtccaatggctgaggagacccagcttcaaggctgcatggggcgtggccccgggctcctctgtgcggtggcattagctcggggctggccatgatccttggcccatggtcactgttggagctgcccagcctggctgtgtctgagttggagccagcacagaggcggggagcccgcgggggccgagggaggtggtgcttctggtgtcggggcactgacctgatgggaggcatttctgcagtgggcaaagctccctgttgtgcccccatctctgttctgtttccggactggtctgtttctgccgcttcctggcgaggatgatgacgacagagacggcatgaaggctgggctctctgtggctatgtggctgtaccagggggcccacacgtcactgtgccaggggctgagccaccccgtgtccctgaaggtggccgagtggccttccgggcaggtgccagcagtgacccctgtgtcccccacaggcgtcctgcatcctgcagctggtcaagcacatccagaagcttcaggccaaggacgtgcctgtggcagaggaggtcagcgctctctttgctggggagctgaacccagtggcccccaaggcccagaagaaggttccagtccccgaagggtaaggatacgggggtgggggcattgcaaccatggccctgacatggtcccttgatgcctggtggcacagcgggggctcc

SEQ ID NO: 20291 - DNA, 2300 bp, Homo sapien
tctcccaggcttgagtgtaatggggcaatctcagctcactgcaacctccgccccctgggcggagccattctcctgcctcagcctccccaatagctgggattacaggtgcccacaaccatgcctgactaatttttgtatttttagtagaggtggaatttcaccatgttggccacgctggtctcaaactcctgacctcaagtgatctgtcctcctcggcctcccgaagtgctggggttataggcgtgaaccgctgtgcccggtccccccccccacttcttttttgagaccatgtttcgctcttttgcccagcctagagtgcagtggcgcaatctcagctcactgcaacctctgcctcctggactcatgtcattctcctgcctcagtctcccaagtggctggaattacaggtgccctccaccacgtctggctaattttttaatttttagtagagatgggctttcatcatgttggccaggctggtctcgaactcctgacctcatgtgatctgtccctttaggcctcccgaagtgctggaattactggtttgaaccactgcgcccatcctcccctccccctgcctttttttttttttttttttaagatgggtgtctgactatattgctctagctgtcctttatctcctgggctcaagcaattcttcctaaactctgggattttacaggtgtcagccatcctgccccaccaggatataagtcatttgtcagatatatgtattgtaaatatcttaccccagtttttttggtttgttttgtttttttgagacaagagtctcgctctgttgcccagagtacagtgcagtggcgcgatctcggctcactgcaacctctgcctcctgggttcaagagattcttctgcctcagcctcccaagtagctgggattacaggtgcatgccaccacgcccggctaatttttgtatttttagtagagatggggtttcaccatattggccaggctagtctcgaactcctgacctcatgatccacctgcctcggcctcccaaagtgctgggattacaggtgtgagccaccgcgcctggcccatcttaccccagtttttattgcgattactttctttctccctctcttttttttttagacggagtcttgctctgttgccaggctggagtgcagtggcgccatctcggctcactgcaacctctgccttctggtttcaagggattctcctgactcaccctcccgaatagctgggattacaggtgcccaccatcacacccagctagtttttgtatttttagtagagacagggtttcaccatgttggcctggctggtttcgaactcctgacctcaagtgatcttcccgcttacggcctctcaaagtgctgggattacaggcgtgagccaccacggctggccaagtttccagagcttttttttacaatctcaatgatgtatctcggaaggcagggactcagtatatctcatttaccgctgcatgcccagcaccccttaccatgcctggcacacaatgggccttcgacaaatgtttactgaatgaatgacaatgtcgtagtcctgtctctggcctcattttcttcctgtgggcatgttaatgtctgtcttgcccatttcacaggatgttgtgaggctgcgggaaccacaggatccgttcccccacccacccaggagttgggtttggaggctctcaggccgcgtcagctattacattcaggaaaggcggagctccagtcttcctcgggaacttgccggctaagctccacgtgggcgccccgcccacatccagccacgctcacacctgtcagctggtgggagggtcaggaccagcctctaaggggcgtggctagggctcagaactaggaagaaggcggagttccggaggccactgaccaatgagagcgcaagttttggggccggaaaaggcggggccgcgcgcaggagaaagaggtgccacatttccattggactacctgtcgtcgtcagggaaacgcagcgtctccctgccggggaggtggcggggcggggctttctgggaggcggggcttccggggccggctcggctgggaccgggcgctcgtcgtcagctgacccgccgccatcttgtccgccatttgcaaggggcccggagcgggatcgcggcacctgccgagcgggtcgccgcctctgccgcggtccttggaccccgccgccgccctggcctgggagcttgccccgccgcagcggccggcagcgcggcgctccgcgggcggcaggcacgggccccgggccccctcacggcgcccagccgcgggcctcccgaggc

SEQ ID NO: 20292 - DNA, 2300 bp, Homo sapien
tttttgagacacagtctcactctgtcgcccaggctggagtgcagtggcacgatctcgggtcactgcagcctctgcctcccggactcaagtgatttctcctgcctcagcctcatgagtagctgggactacaggcacgagtcaccacgcccggctaattttttgtatttttagtagagacggggtttcaccatgttagccaggatggtctcgatctcctgacctcgtgatccacccgcctcggcctcccaaagtgttgggattacaagcgtgagccaccgcacccggcccctgttgagatcttgatcaacactaaaggggccgggtgcggtggctgatgcctataaatctccgaatttcgaatttcgggaggctgaggagggcggatcacttgagtttgagattaggagttagagaccagcctggccaacatggcggaaatgcatctctactaaaactacaaaaattaaccgggcgtggtgactcgtgcctgtagtcccagctactcgggaggctgaggcaggagaaatctcttgagcctgggaggcagaggatgcagtgacccgagatcgtgccactgcactccagcctgggcgacagagcgagactgtgtgtcaaaaaacaaacccccccactcaaaaaaaaaaccccaaaaaacagtacaaggcacttgtacttgacactgaaaggctttaatcaccaggggctgtggcagtgactgcgggactctattgctgagaggaggaaagcatcggaggtcaagtgactctcccaacgtcacccagcagggaaggggtggggcagggctggaatctggctgggcagggagggtgttggtgtcccccggggacttggggaggtgctggtggtgaaaccgcctttgcaaaattatgactgagacagttaaagagatctaacttcaccgactccctcttccttctaacctccaagctgtccttgttcatccctgggcataggctgaactaactttgggagaaacttatagtttaattaaattaattaattaattaattaattatttttttgagacggagtcttgctctgttgcccaggccggagtgcagtggtgcaatatcggctcactgcaacctctgcctcctgggttcaagcgattctcctacctcagcccccgcagtagctgggattacaggcgcccgccaccgcgcccagctaatttttgtatttttaatagagacagggtttcaccatgttggccaggctgatctcgaactcctgacctcaggtgatcttcccgcctcggcctcacaaagtgctgggattacaggcatgagccagggctcctggccgtgagagggggtttctccatgttggtcaggctggtctcgaactcctgacctcaggtgatctgcccgccttggcctcccaaagtgctgggattacaggggtgaatcaccgcgcctggcctttttttttttttttgtacccaataaacagcattgttgtcgaatgaatactggacttggagctacagcaagtcctggaccgtgactcttatggggggaaattcggatttttggttttactaagccgtgtgtggggaggtgtccggcgtcctcctcctgggacgggattcgaacccgctatccgacgggcccgcccacagggtctccccgggtccccgcttcgggccggcgagtgggggaaggggtcggccgagggcaaccgaggacgtgcgtgcgtacgttcgtgcgtgcgtggattcgggcgggcgggcgagtccacggggcggggcgccgagggggtggcgcgcgcgggtcggcccgctgggcggcgggcacgcgccggcgtcttcgctccgggctcccctagcgcgcggggcgagtggttccgcccggcccccggctcattgtgctcgcttcacgccggcccaagatggcggaggcgctggaggccccgggcctgtgactacaaagagggagtcgggggccgggccggaccggagcgcggcggcggcggcggcggcggccgaggccgaggccaggccccctcccctcagcctcccgcccctccctcccgcccgccctcctccgcccaccggcggccccgcccctcccccaaccgcccgcctagcatggtgcggcggccgcgcgcgcggacatgggggagaagctggagctgagactgaagtcgcccgtgggggctgagcccgccgtctacccgtggccgctgccggtctacgtgagtgccgccctccaccgtccctacctcccggcctcccctcctccgccgcccctggggacaccccaaacccccccaagccg

SEQ ID NO: 20293 - DNA, 2300 bp, Homo sapien
cacaggtgccccctgccctctggtgggctctgccccgatgctgttgggttgtgggcacttaggtaatgagggtttgccttgcggccagggcaaggagggcagagttgctgcggggggactgagtctcactgtggaccctgctgtgccgtgtctgacatgacacactgctgacgtgacacactgctgacgtgacacactgctgacatgacacactgctgacgtgtgaatgagttggagctttggaaggacacgctcacagagcagtgtgggtgggggtgaggcatcttcctttctgcagtgctcactcctcctgcacctgcccgggcagaggcctggtggtccctgggagaccccagccgttcacctgcctctggcgatggtggctgtccccagccagggcaaggaagaccctctaaggccggccccagggtttcccacttggggggctggcctcagtccccctcgagccctctttctctcctcacgcctccagcacacgtggacctcggctttgcgcgggagcctgggcaggtccagactgcctcagggctcagtgcttccctgcaccggactctcggccggccacctcgcttgtgtgtcaaacctgaaatctcctgcatcagggcggaaagcgaggcttctgccagaagggtcttggccagctggctggtggctgtccaggcagggaccacaccttggagcctgccttatccacatgctgtcccctcccatgcatgcggctggctcctgcccgcatgaccagggccttcccttgcctttttcagcttcgagagcatgcagaggctctgcgacaagtacaaccgtgccatcgacagcatccaccagctggtaggtggcttgcccctgcccagagggggttagtagtgccaggctcccggacccctccagaccccttatgtcaccgcctcggggcacagagctccccttagagcccctggggattggaatgtgcagcgtggggggacgatgggctgtgggtgagtggtgtgggggctgccgaggctgggctgtgtgctgtggccgtgtgccaaagcagagccgtccgtggtttgtgtgctgaggcagggccctgagggttgtggtgtctgcacacgcctctgcagccctgggttggtgtccgcaggtcccagcagaggcggggtccctgtcctccccgggctgtgtgaatgccggccttcccccttggacctcccccacaccgcctgccttcatcaggctggatgccggcctgggctgcacccttgggcaccccggtcctgctgtgtctcgtgaggctttcctcacagaggacggggcacacagtgagctggggtgtagcagggaggggaacgtgctgcttcccatgttctagaaagcaccgggggcccctggtgcatgggggtaggggagctctttcttgaaggtcttgctgtggagggagccctggtgggggtggcatgggctcacttggccctcctgagtgggactgggctgggctgggctgccccatcagcctgccacccggctctggcttcccctcaacctcatgcatgcagctctgtgggcccctgagagctgagctggcctgggcgagaggggaccacctcagcctgctgcagctggtggggaggaaggcggggtcccacgtagtcgagtcagatgaggtgtggtaggctcagggctttcacggggctcgtggcacctgacgggggtcccttggtgtcagcgccccaccctgctgccttggcccagaggaggggtggtggtcttggtggcctgtgtggttttggtggtcttgccagtggggagagaggcccgtggcaggaggtggagcctcctaggacccctctgagttggggcctgtccctggggatgctgctttactgcttgtaggaaatggggctgggttggaaactgacctgggagcccggcagccaccctgcagggggacgagaggccatgcagccgactccctgcttccgctgggaaaggtcccgggtcttggtggtggaggggctgggccgtgaggtttatgtgacatggccgggccaccctccgtccgcagtggaagggcaccacgcagcccatgaagctgaacacgcggccgtccactggactcctgcgccatatcctgcagcaggtctacaaccactcggtgaccgaccccgagaagctcaacaactacgagcccttctcccccgaggtgtacggggagacctccttcgacctggtggcccagatgattgatgagatcaagatgaccgacgacgacctgtttgtggacttggggagcggtgagt

SEQ ID NO: 20294 - DNA, 2300 bp, Homo sapien
aggctctggaaggcccgcctctgttgtggggtttgttcccagacgaattgcgccacctgtgaaagcttgtcgagcgcgtcacagcaggcaggcctgggcccctcggctggatggtttctcagcggccctgggtgtcatggagccacactctggcaggctcgaggtgtggggtcatgcgagcatcccaccatcgtggtgtgggtgctggagctgcctcatctgtccgtggggggccccagtctccgcgtgttccgcatcctcagcctgctattccagaaacggggtctgtgccctaagcacacatgctgttggctgaggcaggcccagggaaccctgccctgagagtgtggggtgtgctgggcaggcagccagccagtcgcaactgtcccatccctatcccctcagctcaaggctcgctgcgaggagctgcagctggactgggccacgctgtcgctggagaagctgttgaaggagaagcaggccctgaagagccagatctcggagaagcagaggcactgcctggagctgcaggtgggctgcgcgcgaggctgcactccgtggtgtccgagcctctcccatcagcctccctgtgacgtcgttgagcctagggtggttgcggttgcagcagcctaggaagaaggtggaggaggacagttgggtggaggcttatggaaccttctgtcttgggccgcaggctgcccgtgtggatgactctgcctcactctagccctcagctctcgggggcatctcgggattgcttggctgaatgcgcagcgctaacctaggatttcctgatttcctggctgcctccttgcaaatcatttctgtaacagtcataggggagaatttgctcattagaaaaacagctggatcggtgcaggggcttatgcctgtaatcccagcaccttgggaggctgaggcgggcagatcacctgaggctaggagttggagaacagcctggccaacacagtgggactctgtctctagcaaaaatacaaaaattagccgggtgtggtggtgtgtgcctatagtcccagctcccagggaggctgaggcaggagttctggctcccaggatggcatccccaagggccatattgaggcaaaaagggccgtgtttgagcccgggaggtggaggctgcagcaagctgagattgcaccactgcactccagcctgggtgacagagccaggccccatctgaaaaataaaatagcttgtactttctgacaccgagaaacgcattcgtggaggccgagtagaggaagtgtggaggagggtgtgcagcgggaaggtgctctcctccctgctcccaggcagaggcaggtgctggtgggcggtgcccacagctgccgtgcagcctagaaagcagcaggtcacgggctttgttcccagagccccatcccgtcgacactgtgcccgcctgctcaccttacgtgtccccagcgtggtttcactgttgatggacctggtgccctgtcgctggacctctgctgccttttcaaatgactgcaccaaaccgttgctgcaaggctgtccccggaggcgggctctcacgggcggctgacggacgtcgggaagcaccactcacgtgctcccgagctgctccctcacgtgtgtggcccaggcgagcctcaccagcgtacattagagaaacggaggtcgccgacctctttaccacagccgggccctgtgggtctgcctggagtagagccctcgggaagagcatatttgggttctgaccatttttgtcatcatcttttctgtgtaataaaaaaacaatgtgtttgttaaaagaaaggaaagcaggtaaacagaacagataaactaaaaggaaaaagcccctctcagactcagcgcccggggaagctgccacgctcgagtggcgtgtccctccacaggttttacacttagtgaaactggatgttttacacttagagtctattttgagagacgagagctctttgtatcttcctgttgctctttttgaagaaggtgcttccatgtcagcaaaaaccatcctcggccctccacatgactttatttgacgcccccagcttcccgaccccgcctctatgtggtcggcagctttggtttttccatcccacacaagcagcgggggtcctggccacccctccgggtgtccatctgtggcagtcttggttccctggagtggtcccccggtggggcgggcctgacaccatctctcctcctgcagatcagcattgtggagctagagaagagccagcggcagcaggagctcctgcagctcaagtcctgtgtgccgcctgacgacgccctgt

SEQ ID NO: 20295 - DNA, 2300 bp, Homo sapien
ccacgctgccaaggccctgcaaccttccccacgcagtcaggccctcctggacaccggctttgggacactccagagggacggcacgctcctggtgtctgaaagcaatgcccatctgtcccctccagcctgcccgcccggctcggtgggcagtcacccgtggggccaccaagcctcccagggcccacatccatcactgccaagtccatgcaacgtcaccgtccttccctctccatccctgtgcacacaggccagtgcccccggggaagtcctcatgggcagcggcctcccaaactgggctctgtgtctctaccagcacttgccgtccgtcactgagaactaagaggcatcagggacaccctgacaaaccccatgtcctccatggcacctgcccaacgtcacctgtgacctgtccttactggttgcccccaactctgccacaacatcctactccaggtcagccccagtacctcaccgtgccccaaggtcaactaggacaagccctcctgctagcaactcgctcaggccgcctctgctgagcacctccctgagcccggggcaggggtcgcggcccgcaccttctcactgctcttctctccagcaagctgcaaggccccaggggacaggggccgcgggtcctgagggctcagcttcatgctgccaggcacgctggggctctggtagggaaggccgttctccttggtgtgctcagctctggaatgagaagctgcagtcactctcgagggccgtgggctggcactcagaggcagcggcctggcccagcacctccccacctcagtctcctcaacaaacacactcctgctgagaacccgacagcctgagcacaccaggcagagtcggcaggtaccagctgcagacccccagccccaccagggcactcacctcgaatgcagctcactggcagccggcctgccgggcaccgtgtggtcctggctcaggtgccgcctcagcacaatcttggccggggacagcctagtgtagtcgggtgcggctaggccagacagcttctccaggcgcggccggccgacgtggctaggggtacagggcaccacctcctggtccaggggtgaggccaggtactggggcgtgttctgcttcgacgaaggccggctcagcacaccgcagagctcatagccagcagcctggccgttcatggagagctccgggctcatgctgctcaagtgaggcagcgagaacttggtgcagtccagctccaggtgcagccggctggcgtcaggctccagctcgcggcccagggcgcccttcccacgcaggtgcagggacagggcgtcgtcaggcggcacacaggacttgagctgcaggagctcctgctgccgctggctcttctctagctccacaatgctgatctgcaggaggagagatggtgtcaggcccgccccaccgggggaccactccagggaaccaagactgccacagatggacacccggaggggtggccaggacccccgctgcttgtgtgggatggaaaaaccaaagctgccgaccacatagaggcggggtcgggaagctgggggcgtcaaataaagtcatgtggagggccgaggatggtttttgctgacatggaagcaccttcttcaaaaagagcaacaggaagatacaaagagctctcgtctctcaaaatagactctaagtgtaaaacatccagtttcactaagtgtaaaacctgtggagggacacgccactcgagcgtggcagcttccccgggcgctgagtctgagaggggctttttccttttagtttatctgttctgtttacctgctttcctttcttttaacaaacacattgtttttttattacacagaaaagatgatgacaaaaatggtcagaacccaaatatgctcttcccgagggctctactccaggcagacccacagggcccggctgtggtaaagaggtcggcgacctccgtttctctaatgtacgctggtgaggctcgcctgggccacacacgtgagggagcagctcgggagcacgtgagtggtgcttcccgacgtccgtcagccgcccgtgagagcccgcctccggggacagccttgcagcaacggtttggtgcagtcatttgaaaaggcagcagaggtccagcgacagggcaccaggtccatcaacagtgaaaccacgctggggacacgtaaggtgagcaggcgggcacagtgtcgacgggatggggctctgggaacaaagcccgtgacctgctgctttctaggctgcacggcagctgtgggcaccgcccaccagcacctgcctctgcctgggagcaggga

SEQ ID NO: 20296 - DNA, 2300 bp, Homo sapien
ctggggtgatcatgggggctgctgccccaaaccgccacgcctcattactgacaccctttcctgcatcccacgagctgggatgcggatcgggctcagctgcagccatctcggcctcatacctgggtctcccgacactgacacctcctgcttgggtgtattaattcagcccgtgaggtcggccccagtgctctcgggggctcctgtactcacagctgggaggcccctgactcaggatcggctccacacacagcagtgcccaatggcacacgaccgtgggcctccgtgctggtagcggcatggtttctggttccttgagaaggtgccgcctgagcagtctctgctgttagcccagtttctgcagagagccagagaggatgccactttggcttttgttgacactgcaggcctgtctgttgtggaagccgcagagacagcatgtcagcgggcatggctgtgtgccagcaaaactgtacttaaaacagcagaggacatgagacccccaggctggtttgctggccccaggttgagatgcggtatgatgcggcagctacttttttaggagtaaaaagtaaaatgtggccgggcgtggtggctcatgcctgtaatcccagcaccttgggatgccgaggtgggcggatcacctgaggacaggagtttgagaccagcctggccaacatggtgaaaccaccgtctgtactaaaaatacaaaaattagccggatgtggtggcagacgcctgtaatcccagccactcgagaggctgaggcaggagaatcgtttgatcctgggaggtggaggttgcagtgagctgagatcgcaccactgcactcccgcctgggcaaaaagagtaaaactccatctcaaaaacaaaacaacaacaaaacaagtaaaatgtacatggccgctattgagacaggaggggctctagggaggctgggcaggcttcacggttggccacgtgagggccctggagaggccaccgaagcccgggcagttctgccctcgcagggctgggttgtgcccttggggtgaggtctgctctgcgagaggcagtgacagtttcaggagattttcaactgggtggcaaacagccaactccagaagcgccttgctgcgcccctgcactgaggcctcattggcagaagcagggaggccgccctttgtccccgggtggtcatggaagtgcaccactcatcgtgggctgggaagcatggctgcggccttcaaggcggccatagcttggagtatccaagctgagttgtcttctgagaacaggagggagggaggccacgcagccatgggctttcctcatggtgtctctgagatcacggggccagagggcaacttactcagaggaagcctagctcagcggggagcccgcaccaggaggcttcttgggaggcagcgtctcagccgggacctgcagggcacaggcagcccagatgggcgggaggaggcacagggtcagccctgagccttgagcttgcccacagagccttctggttccaccccagaggggccgttttcagactcccaaccccttccccacttccccgcctctcctggagcccacagagctcctagggggtggtgctcccacagcaaggctttctctttggccatcctgtgtcccctgagacccccatgtccttcccggcaggcttctcctacgctggctcggtggccatcagcggggccttggcgggcagcccggcctctctcacacctggagccgagccggccaccttggatgagtcctccagctctgggagcctttttgccaccgtggggtcccgcagctccacgccacagcaccccctgctgctggcacagccccggaactcgcttcctgcctctcccgcccaccagctctcctccagtccccggcttggtggggccgcccagggcccgttgcccgaggccagcaagggagacctgccctccgattccggcttctcagatcctgagagtgaagccaagaggaggattgtgttcaccatcaccactggtgcgggcagtgccaagcagtcgccctccagcaagcacagccccctgaccgccagcgcccgtggggactgtgtgccgagccacgggcaggacagtcgcaggcgcggccggcggaagcgagcatctgcggggacgcccagcttgagcgcaggcgtgtcccccaagcgccgagccctgccgtccgtcgctggccttttcacacagccttcggggtctcccctcaacctcaactccatggtaaggatggggaccggcagggctggggagcgcggcctgtgaaagaaagaccagagg

SEQ ID NO: 20297 - DNA, 2300 bp, Homo sapien
ttggccggcgtgtccaggtgtcaggctccctggtctgtcacggggcacgcccgtcgtctgttgtggttagaggagctggcactatgcctgtcatggtgctggccccaggtggcgtgtgtgctcgtgggaggcctcggtccccagcctgggtgagtgttgggctcccccaggcgcgatggtaacctcaggccgctcttcccgctgtgcccttctgcaggtaactaggatttctacctcaaccgcgagacctatgcaaggacggtgtggaccaactcgcgcccgcggcatggtgcccgccggcctgccgggctcccacccctggacggcagaggcaaggacggacgggagctccactgtgaatcggcggcacgcgccgcaggaggctgggactggtccagtttgtactgtcgatagttttagataaagtatttatcattttttaaaaagtataaacaattctgacttattttattccatctaagtggtaaaaggcaacttattgagaaatataaatatctatatatgagagctctatataaagacacgtgtctgcagggcgggcccgccagcggattcgccacagcctgccccggtgctatctcgtccccaggcccgcgcctgcctccacccgcttggtgctgactagacgctgacaacgccgaaccccgttctcggaaacgccgcccggccggctcccccgacgcgctgctcccgtaccaaaggcaggcccgtcgccaccacattcctcggaggcctccccgcggcctgagccccttcctgagcgccctggcgcctgccctgagctcttcacctttaccccggcactgtgaacccccagactgttcaccctccggggcgtgggttgcgcccttgcatgtgaaggggcctgcgcggtgacgcagctggccatgtgctgcgcgatggtgctgtgaggacggcgcgggcacgttgaacaagtgcatttacttttgtatttctcggctgtccatggctcgcagcatgccctgcgatgcggggcaggcctgtcgtgggtcccttggtgtttctgtacaggagagagtcacactaatgagtggcagtattttatagagatgtgatgagaatttataaatttcatagatttgacagcttttatttttagatggtataatgcacagtgaagaggaaagaaaagcgaggggaaaaaaccttatttattcaaacagtgcacaaaatggccccagcgtcagccccgaccctagacccctcagttgcagctcccagcagcccagacagagctgccggcgcccctgcctgccccacatcccttcctgtcagggccacgcctggcacccatcccttggagcctgtgctggttctcccagctgctgtgggtgtgctggggccagggtgcactgctgaaacctggcctctctggccctaggccccagggtgacgtcggccccccactctgcagccttggcgggtgcctgggactgggtgtggaaggagaggagctgaggccggggtgtagcaggcaggcagggccactccagtgcttctggagccctgagcagtcagggcctgggttgtctgagcagtggtggctctgtgccctccctggaggatgggatctgggagtctgagctccccgcatctggccctgggctgtgtggcacttgctgagcccaccttctcaagtgcttgctcctgtgagatggcatcggggagccccttccccaaggtgccacagatccaccctccagggagctgccagccctgtgttctggttcccaagggcaggatggacacacgtcacatccctaccacgtggcctccaaagggagccacggaggaaaggcttctgtggttgctaggtgggggagtcctgtgtgggagggcctgaagacccctgcttgtgcctggtgaggggggtgctgcctcccccagcccccaacaacctctcagacccccaccctccaacatagctgagttctgaagatggtgctccggacctgtcctcttaagtggtgcccagtgccctccccaccccacgttggtgctctcagctagaaggtgctgtgcctctgcctgagccccaagccccgagcctggccttcaggacaggcagcctgctctgtgtcgccacgggccggatacgccacagggttgatggcagagacggccgagtccctggtctagaacaagacacattctttaaacactgtattacttctgcctccctctaggtgacagtggcagtccgggtgccatcacgggtcctgcagatggccatgcagggctcctgcccacgcaggcca

SEQ ID NO: 20298 - DNA, 2300 bp, Homo sapien
gggccgggtacggtggctcaagaccgtaatcccagcactttgggaggccgaggtgggaggatcacctgaggtcaggagttcgagagcagcctggccaatatggcgaaaccccgtctctactaaaaatacaaaaattagctgggcatggtggcgcgtgcctgtagtaccagctactcgggaggctgaggcaggagaatcacttgaacccgagagggggaagttacagggagccgagattgcaccactgcactccagcctgggcgacataccaagaccctgtctcaaaaaataagcaaataaaataataaagtgaagtaaaaaggggttgtcagggtgggccctaaattctgcttggcgtctgtgtagaaggggaaatgtgggcacagacgtgatgcaaggaggacaaggtgacgcttccacaagccaaggaacctggaggatactggccaccactaggaactgggagattcccctcggcctcagaaggattcggccccacccacaccttcatctaggatttctggcctccagaactgtagagaatgtttctgatatttaagccacctggcctgtggaattttgacagccactctgggcaaactagcagggactccatctttccccgcagaagggaatctcttaagacccaggagaacacccccctctcactcctcctacccccacctgggatttccagcccggggccatataacaatgctagacccatgctactcttggcagctggggaaacgctttgggtggggctggcccacctgccctgtaagtacagcctgggcccacagggaacaaagagcagagtctgggagggacccaagcttaagtggactcggcaggtgggaagggtggtgcccgccaggagaacttgaccttgagctgcccgtggacaatgcactcttgtgtttgaggagggtggcgccaggctggggacacagaggagaccttgggcgcccggggaggggaaagtgcggcgctgcgggtgccccgggctgcgggaagcgccgctggcttccctagccccactcactgatggagaaggtgccgggctcttcccggacgactctgcagcgctccagcagcagggctccgacgggctggaggagacacgggcgccgggacggggcagtgagcacccggcctccgaggggcccagcctgggacccgcccgcgcgcccgggacgcccctacctcggcctcgtctgtccgaaagtagaagaggaaattcaccaccagcttcaccagccgccgcttcagcactgcgggcacagcgcgcactcaggggcgcaggcagcccccgcccggaccccggcctcccgtccccggcgccccgacccggactccggcctccggcacccccgcccagaccccggccccggcctcccgcccctggcactgtctcggtctcccgggtcccgctcaccgctgcccttcttggggcccctcatgcccagctcggccgccatctcggccggctgccgggacagagcctgcagctccttctcgttgtaccgcatggctccgcggggaacgggaacccgggccgcgccctcccggccgccgtccccgctcaggctggggccggcgccaaaaatgtctcagggcgcagacacggaagcacccccagggctagtgcgcctgcgcaccttgggccagccatgccgcccgcctccgctgcgtggcgctggcgacccgtggctgctggcgtgggcggggtaccggttggtaggagagacggaccgttgttacataaccattaaactgaaataaaccggaccaaggtggaacagaatcaaggcaccccagcgatggctggcacccctttctagagcggccaggcgcaggcggagggagcgataacgtcgcccggagagtgtcagccgctccctcgcgaaagttggccccgtgcggccgcagcggaccgagggttcgttgagagcgttgtgcgcacgcgcagtttgccttccaggccgcgctttcagcctctccccctccagccttttccttcgcgcctcgggaccctctgactcacgccgctgggcgggccaggcatgcgcacaccagagggcccgtctcatttgccccggaagtgctttctttgcccgccgttcgccaaacgaagtcgtggaggtggcgaaacgaggaggagataacgcggccttgggctctggtgaggagtagaggcggttgagggcggcggccgacgcggaccgggggttccctgggggacagcggacgtaggagagaggcgcttgcgacaggccgcgggccgagggtggggcggc

SEQ ID NO: 20299 - DNA, 2300 bp, Homo sapien
aatttatttaaacctatgcaaaatacaactgataggtgtgtgagaggtgggagctttgtggggaaaaaacaaacagcaggtaaaagaaaatcaggctcatggtaaaaacaaagttaattagctttaagggaagatagaatggtacaagaaaagcctagctgaacatattacttgttttagcagccaacaatattttgcatcttatttagaaaacacaaccaatgaccaactatgctcatgacataaactcattcaggatatggaaggtgaaggtgcagtgggtggatgggagggagaagatctcaacagccgtgacaagaaatcagcagatgatgtctacaaattgataaatccatgaagaaatctgttacttactaaggtaaagatcaggggacagcctggccaacctggtaaaaccccatctctacaaaaaatacaaaaattagccgggtgcagtggctcatgcctgtaatcctaccactttgggaggccgtggcaggtggatcacctggtcaggagttcgagaccagcctgggcaacatggcgaaacctcgtctctacaaaaaatacaaaaattcgccggacatggtggtgagcacctgtgatcccagctactcgagaggttgaggcaggaggatggcttgagcatgggagtttgaggctggagtaagctgtgattgcaccactgcactcactccagcctgggtgacagagcaagaccctgtctcaaaacaaacaaaaaaccgatgacgaccaggggaaatgagcttaagaattgaggaaaagtggcctctgggacctgggactagaccattgagaaggaattagtttttcgtggcaacaccgttctctccttaacctagccaacaacctattttccagagctccgcctggctgtttggtgtcgtccaaggatacacaagaacaacggtcacagcggggtgcacctgcaaaatggggccagctaacgtgttctggtcgcctttggcatgatgttgaagccgtcactcccattttaagggaactgaggctcacaggaattacatcacagagccccagtcaactaacaggtatagatgagcatacagaagcgttctcggctacaaggaaggcggccgaaaccatttcagccgcgatcccgattcgaccccaacgaatcttggttgtttcttttttattttgtcaaacagggtcttgctctgttgtccaggctggagtgcaacggcacaatcacaactcactgcagcctcgacctcctggactcaagcgatcttcccgcttcagcctccagagtagctgggactacaggcgcgcgtcaccaaccacgcccggctaattttttttttttttttttttgcagtgatggggtctcgctatgttgcccaggctggagtgcagtggtgggatcatggctcactgcagcctcgacattccgagctcaagcgatcctctcgagtagctgggcctacaggtacaaccaccactcctggctaattttttaaaattttttgtagagatgggggtctcggtgtgttgtccaggctggtctcgaactcctggcctcaagcgatcctcccgccaaggcctccctgagcagtgagattacaggcgtgaggccccgcgcgcggcctcccaacaggagtttggaaatagagttcctggcgggcccgaccctccaggcccgcccagcgcggggcctcaggatgcacaaggccggacgctcacgggaggagggaggggagcgacgccgccgccccaccctcggcccgcggcctgtcgcaagcgcctctctcctacgtccgctgtcccccagggaacccccggtccgcgtcggccgccgccctcaaccgcctctactcctcaccagagcccaaggccgcgttatctcctcctcgtttcgccacctccacgacttcgtttggcgaacggcgggcaaagaaagcacttccggggcaaatgagacgggccctctggtgtgcgcatgcctggcccgcccagcggcgtgagtcagagggtcccgaggcgcgaaggaaaaggctggagggggagaggctgaaagcgcggcctggaaggcaaactgcgcgtgcgcacaacgctctcaacgaaccctcggtccgctgcggccgcacggggccaactttcgcgagggagcggctgacactctccgggcgacgttatcgctccctccgcctgcgcctggccgctctagaaaggggtgccagccatcgctggggtgccttgattctgttccaccttggtccggtttatttcagtttaatggttatgtaacaacggtccgt

SEQ ID NO: 20300 - DNA, 2300 bp, Homo sapien
gctgagccaaacaaatctttcataaaggaaagtcaaaagttaaaaaaacaggaggaaaagcaagaacctagaggacattccagagtgagaactgaaaaaacacccaacaaaataaaacaggaaaaatattatcacagaaataacataagaacattagcaagaaaattaaaaacaaaaacaaaacccaggactaaaggaaccaaactgtccagataccaagcacccaccaggatcagcaaataaaaagatccccggtaaatgaggaaatcaggaaattttacgacaccaaggaagatgttaagcttctactagacagaaagacaactgagcagaaaacatcagaaaccagcataggaactgatcttttgagaacagcactgaaaacaatgctttcacagttctgagcaaatacagatttttttctctctctttttttttttttttttttgagacggattctcgctctgtcgcccaggcagtagctcgatcttggctcactgcaacctccacctcccaggttcaagccattctcctgccttagcctcccgagtagctgagattacaggcacatgccaaaacgcctggcaaatttttatatttttagtggagatgggatttcgccaggttggcgaggctggtctcaaactcccaaactcaggtcatccgcccgcctcagcctcccaaagtgctgggattacaggcgtgagccaccacgcccggcctacaaatacagattttcaatctagatttttataccccaccaaacttctaactatgagggtaaataaactcgttttcagacaatcaaggacttcccccaccccccgaaaaaaatcatctgtttcttcaaaagctcccagaagttttgctcggacagcatgaagggaaagagatgaccacactggaaacagaggtcagcacaggggagcaaggacaggaaggtttgggacaacagctccacttccaggtcagagcacaaccagtcccatttggaggaggaggataagggggtcttggagggaagtggtgaggggagatcaatttatttaaacctatgcaaaatacaactgataggtgtgtgagaggtgggagctttgtggggaaaaaacaaacagcaggtaaaagaaaatcaggctcatggtaaaaacaaagttaattagctttaagggaagatagaatggtacaagaaaagcctagctgaacatattacttgttttagcagccaacaatattttgcatcttatttagaaaacacaaccaatgaccaactatgctcatgacataaactcattcaggatatggaaggtgaaggtgcagtgggtggatgggagggagaagatctcaacagccgtgacaagaaatcagcagatgatgtctacaaattgataaatccatgaagaaatctgttacttactaaggtaaagatcaggggacagcctggccaacctggtaaaaccccatctctacaaaaaatacaaaaattagccgggtgcagtggctcatgcctgtaatcctaccactttgggaggccgtggcaggtggatcacctggtcaggagttcgagaccagcctgggcaacatggcgaaacctcgtctctacaaaaaatacaaaaattcgccggacatggtggtgagcacctgtgatcccagctactcgagaggttgaggcaggaggatggcttgagcatgggagtttgaggctggagtaagctgtgattgcaccactgcactcactccagcctgggtgacagagcaagaccctgtctcaaaacaaacaaaaaaccgatgacgaccaggggaaatgagcttaagaattgaggaaaagtggcctctgggacctgggactagaccattgagaaggaattagtttttcgtggcaacaccgttctctccttaacctagccaacaacctattttccagagctccgcctggctgtttggtgtcgtccaaggatacacaagaacaacggtcacagcggggtgcacctgcaaaatggggccagctaacgtgttctggtcgcctttggcatgatgttgaagccgtcactcccattttaagggaactgaggctcacaggaattacatcacagagccccagtcaactaacaggtatagatgagcatacagaagcgttctcggctacaaggaaggcggccgaaaccatttcagccgcgatcccgattcgaccccaacgaatcttggttgtttcttttttattttgtcaaacagggtcttgctctgttgtccaggctggagtgcaacggcacaatcacaactcactgcagcctcgacctcctgga

SEQ ID NO: 20301 - DNA, 2300 bp, Homo sapien
gtagcgtggctgcggggttccctgggcccccttgagatgtgcaagccagaaggatctgcataggctgggcaggatgcccctcccatcgggcttggggtcccctgggccccccccaagtcggagccagaagggtctgcacaggccgggcagggcacctctcccattgggctctgcaggagggcctgcttgggctccactgggccaatgagaagggaggccggcagggctgagcgccaggcctgtgaggcctttgccaagtgacctcacttcctgggccaggctgctggagggcttcctacagcctgtccccatgcctggacagggcggccatcaggaaacaaataatacaaacggtgactgcccagggagggggccaacagcgtgctagcattgaggccaggtctgtttcactccagaactgaaccctgtgccccacgaaagtcttaccagccttctcctgggctcccagggtagagtccgggctggggaggctagtgcctcgggctccctgcctgatggtcgccctgaggtcacagggaccaggagccctctctgtcccccgccctcccaggtgccgagcagagagatcgacaaggcggagggcaagttctggacacactggaaccgggagaccaagcaggtgagtggctcgccccgagcctggctccttcccacccagccctggcggccctagccctgccctagccccacccgtgcctgctgaacctttctccgtctctctagttcttcctccagttccactttaagatggagaagcccccggctccacccagcctccctgctggcccccctggggtgaagcggcctccacccccgctgatgaacggtctgccccctcggccaccgctgcctgagtctttgccaccgcccccgccaggaggcctgcctctgccacccatgccccccacagggcctgcgccctcagggcccccgggaccaccccagctacccccgccagctccaggggtccaccccccggccccagtggtgcatccccctgcatctggggtccatcccccagctcctggcgtccaccccccagctcctggcgtccatcccccagcccctggggtccacccaccaacctctggggtccaccccccagctcctggagtccaccctccagcccccggggttcacccaccagcccccggagtccacccaccagcccctggggttcacccaccagccccaggggtccatcctcccccatcagcgggggttcacccccaggccccgggggtgcacccagcagcccccgccgttcaccctcaggccccaggggtgcacccaccagccccagggatgcaccctcaggccccgggggtccacccccaacctcccggggtccatccgtcggctcctggggtccaccctcagcctccgggagttcacccctcaaatcctggggtgcaccccccaactcccatgcccccaatgctgaggcccccacttccctccgaaggcccagggaacatacctccccctcccccaaccaactgagaagctgctccctcccccagcaagcccagcgccaggtgctcttgccttttcccactgagagaaggctgctcttttgtactgccccccgctcattaaacagcctcccccagccctgagtgcactgatgtccgcagcgccgccctactgtgtcagtgtgtgtgggagtgccaggcacagcaccatcccccagtttgggccgactggggagggcctggggcccgccaggagacacctgtgggaggcctgagagatggctgtaccttggagatggcctggtggaggacagaccccaccagccagctaggaggggatctggggtcctgttctggggagggaagagcagactccacgatatccttggggtctccagatagcccaccaggggtggggagggtgagcagggacagggcgcccccactgacttgggaccctcctcctccaggcccacacctcagcacccaggacatctgggccccccgcccccagcgctgtctagtttggttgcctggccgtcactcccagcctggttcccactcctgtgtcttctggggatggccctcaaggacggcatgttgacacatcaggcccagctctatcactggggagggagataggctgccagggacagaaagggctctttgagaaggccactctgcctggagtgggggcgccgggcactgtcccccaaggtcgcggcagaggagataggggtctgtcctgcacaaacaccccaccttccactcggctcacttaaggcaggcagcccagcccctggc

SEQ ID NO: 20302 - DNA, 2300 bp, Homo sapien
cccaggtgccgagcagagagatcgacaaggcggagggcaagttctggacacactggaaccgggagaccaagcaggtgagtggctcgccccgagcctggctccttcccacccagccctggcggccctagccctgccctagccccacccgtgcctgctgaacctttctccgtctctctagttcttcctccagttccactttaagatggagaagcccccggctccacccagcctccctgctggcccccctggggtgaagcggcctccacccccgctgatgaacggtctgccccctcggccaccgctgcctgagtctttgccaccgcccccgccaggaggcctgcctctgccacccatgccccccacagggcctgcgccctcagggcccccgggaccaccccagctacccccgccagctccaggggtccaccccccggccccagtggtgcatccccctgcatctggggtccatcccccagctcctggcgtccaccccccagctcctggcgtccatcccccagcccctggggtccacccaccaacctctggggtccaccccccagctcctggagtccaccctccagcccccggggttcacccaccagcccccggagtccacccaccagcccctggggttcacccaccagccccaggggtccatcctcccccatcagcgggggttcacccccaggccccgggggtgcacccagcagcccccgccgttcaccctcaggccccaggggtgcacccaccagccccagggatgcaccctcaggccccgggggtccacccccaacctcccggggtccatccgtcggctcctggggtccaccctcagcctccgggagttcacccctcaaatcctggggtgcaccccccaactcccatgcccccaatgctgaggcccccacttccctccgaaggcccagggaacatacctccccctcccccaaccaactgagaagctgctccctcccccagcaagcccagcgccaggtgctcttgccttttcccactgagagaaggctgctcttttgtactgccccccgctcattaaacagcctcccccagccctgagtgcactgatgtccgcagcgccgccctactgtgtcagtgtgtgtgggagtgccaggcacagcaccatcccccagtttgggccgactggggagggcctggggcccgccaggagacacctgtgggaggcctgagagatggctgtaccttggagatggcctggtggaggacagaccccaccagccagctaggaggggatctggggtcctgttctggggagggaagagcagactccacgatatccttggggtctccagatagcccaccaggggtggggagggtgagcagggacagggcgcccccactgacttgggaccctcctcctccaggcccacacctcagcacccaggacatctgggccccccgcccccagcgctgtctagtttggttgcctggccgtcactcccagcctggttcccactcctgtgtcttctggggatggccctcaaggacggcatgttgacacatcaggcccagctctatcactggggagggagataggctgccagggacagaaagggctctttgagaaggccactctgcctggagtgggggcgccgggcactgtcccccaaggtcgcggcagaggagataggggtctgtcctgcacaaacaccccaccttccactcggctcacttaaggcaggcagcccagcccctggcagcacccacgatgcgggacctgcctctcaccagcctggccctagtgctgtctgccctgggggctctgctggggactgaggccctcagagcagaggagccagctgtgggcaccagtggcctcatcttccgagaagacttggactggcctccaggcagcccacaagagcctctgtgcctggtggcactgggcggggacagcaatggcagcagctcccccctgcgggtggtgggggctctaagcgcctatgagcaggccttcctgggggccgtgcagagggcccgctggggcccccgagacctggccaccttcggggtctgcaacaccggtgacaggcaggctgccttgccctctctacggcggctgggggcctggctgcgggaccctggggggcagcgcctggtggtcctacacctggaggaaggtatgtggggcccagccccaagcttggcaccgccgtcttccttcaggtgggccgggtcctcctagggaagatcaggggctggcagagcccccaccctgggcagggaggctgtggtcttgttcctaggactgggttgcgggtccg

SEQ ID NO: 20303 - DNA, 2300 bp, Homo sapien
tcaggcgatccgcccgcctcagcctcccacagtgctgggattacaggcgtgagccaccgcgcccggccattcactcaggatttttaacacacaggcctcaccaccaaaatccacttcccctcttccctcaggactcccagagtcaccatgctttgcaggtagggctcaaacatctgcctgcaggccttagaatgtgcctttgggggctgagagaccccgggtcctctccagagcagaggcgtcaggtttctctgcatgacggtgtgggagcaggcagttccgagtgtatgagcctgccagagccacagaaacaaatgaccccaaatacagtggctttaaacagcaggaatgaatgcattgcaggggctcccgcctgggatcccagcactttgggtggccaaggcgagcggatcacatggattacttgcggtcaggagttcgagagcagcctggccaacatagggaaaccctgtctctactgaaaaaaaaatacaaaaattagtccgggtgcagtggctcacgcctgtaattccagcaatttgggaggccaaggtgggcggattccgaggtcaggagaccgagaccatcctggctaacacggtgaaaccccatctctactaaaaatacaaaaaaaattagccgggcgcggtggcgggcgcctgtagtcccagctactcgggaggctgaggcacgggaatggcgtgaacccgggaggcggagcttgcagtgagtggagatcgcgccaccgcactccagcctgggagacagagcgagactccgtctcaaaaaaaattgaaaacttaccgggtgtgatggtgcgcgcctgtagtcccagctgcaggcgctacgtctccctgggtggcagtggcgagtgctgagtaggagcaatgccctgccctgctgcaatggcagggaagggtgggggactccccggctgtgacctcactccagcgggcatgctgattggcccacccgcggtctctggccacctgttgccgtccatcacggggccaccctccccatcctccgtcctgtccacaaggctcagcaaagcggctggcgggtaagcgaggctcgggggtaaggaagtgaggctgggggaatcccgggcagaggtgtgggctcccggggtgtgaaggggtgttgcagaggactgtaagggtccccaattcctggagctgcccccatgcacacccaggggccacacaccagcctcccatgcttcttgggcccctcccccactgccacgcaataggccccttccaggtcttggagccccagggctgggtggtttttcagcctagatacagggacaccctaatcccagcagccagaggccatggggaccctgaagagtacagctttgggtctgacttgaagctccttgcgacctccagccaatggcactgtctctagcctcggtttcctcatctgtcctatgggaacagagttagtgggacaaggcagggtactctgtgtcaggatcagaagacccccaaccacaaccgggaccctcctcccctgccccggcctgtcacgaccagagccaggatggttctgctgctggggcctgagcctgtagactcacagggtcacgcagcaggatgtgggtgcccagaatggcaagtcagggtggcccagagggagaccccatgagagcagaggcctgggaggggctggggcacctgttagcctgtcccgctggcctcaggcaccagataaaaatagtccctggtctcagagaacatgagctgactctggggccaagagtttcggtttggggtgcgtctgggactcattgctgtgttgtcctgcaggggctcccgccctctctgggccagagcagcctgggctactgtactgatggatactggaccccagtgaggctgggcggtagggaggggtcccagggcaggcatgcggggtcagagagatgcctggagtgggcgccgggccatgcctggcatgagtatgaatttgccgagtgaggaggggtgggaggacggggcctgttagttggtgtccgcagaacctccaggtcaggcccaggcctgtggcagagactcagtaaatgcaagaccttgttccccacccctcccagcctggcctgggacctgctgctgctccagccatgtccatgacaaccagagcctgggaggagctggatggcggcctgggcagctgccaggccctggaggaccactctgcgctggccgagacccaggaggacagggcttcaggtacccttgtggcgctggcgggaggaagcccttccctgatggtccccttgagccaggagg

SEQ ID NO: 20304 - DNA, 2300 bp, Homo sapien
ttagccaggcgcagtggtgcatgcctgtaatcctaggtcctcgggaggctgaggcaggagaatcgcttgaacccaggaggcagaggttgcagtgagccgagatcgcgccattgcactccagcctgggtgacagagagagactccatctcaacaacaacaaaaaaacttttaggaagaaaaaataaatctaggttacaaacaagatgttcagcccttcgctaattatgccagctttataaaaataaatatggaactaataataaaatcacaagttacaaacagcggaaagaacatgtcaaactattaaacagtgtctgtttgggggcgggaagatgacaggtgctttacagtttttgctttcagcttctctttgtttcctgtttgtctctgccttgtgtcatacagaaaaaaatgagagccatttctttttttttttctttttgagacagagtctcgctctgtcgcccaggctggagtgcagtggtgccatctcggctcactgcaaactctgcctcccgggttcacgccattctcctgcctcagcctcccgagtagctgggactacaggcgcccgccacgacactcagctaattttttgtatttttagtagagacggggtttcaccgtgttagccaggagggtctcaatctcctgaccttgtgatccacctgccttggcctcccaaagtgctgggattacaggcgtgagccaccgcgcccggccgagagccgtttctaaagcggagggagtggggaccagggaaccccagcccttgctttgctgaaggcgggctggccttctgggtctcttggtagttcctggggaggccctattcactcagaattattattattatttgagacagagtctcactctgtcgcccaggctggagtgcaatgatgtgatctcggctcactgcaacctccacctcccgggttcaagcaattctcctgcctcagcctccccagtagctgggattacaggcatccactatcacgcctcactaatttttgtatttttaatagagacaagatttcaccatgttggccaggctggtgtcaaactcccgacctcaggcgatccgcccgcctcagcctcccacagtgctgggattacaggcgtgagccaccgcgcccggccattcactcaggatttttaacacacaggcctcaccaccaaaatccacttcccctcttccctcaggactcccagagtcaccatgctttgcaggtagggctcaaacatctgcctgcaggccttagaatgtgcctttgggggctgagagaccccgggtcctctccagagcagaggcgtcaggtttctctgcatgacggtgtgggagcaggcagttccgagtgtatgagcctgccagagccacagaaacaaatgaccccaaatacagtggctttaaacagcaggaatgaatgcattgcaggggctcccgcctgggatcccagcactttgggtggccaaggcgagcggatcacatggattacttgcggtcaggagttcgagagcagcctggccaacatagggaaaccctgtctctactgaaaaaaaaatacaaaaattagtccgggtgcagtggctcacgcctgtaattccagcaatttgggaggccaaggtgggcggattccgaggtcaggagaccgagaccatcctggctaacacggtgaaaccccatctctactaaaaatacaaaaaaaattagccgggcgcggtggcgggcgcctgtagtcccagctactcgggaggctgaggcacgggaatggcgtgaacccgggaggcggagcttgcagtgagtggagatcgcgccaccgcactccagcctgggagacagagcgagactccgtctcaaaaaaaattgaaaacttaccgggtgtgatggtgcgcgcctgtagtcccagctgcaggcgctacgtctccctgggtggcagtggcgagtgctgagtaggagcaatgccctgccctgctgcaatggcagggaagggtgggggactccccggctgtgacctcactccagcgggcatgctgattggcccacccgcggtctctggccacctgttgccgtccatcacggggccaccctccccatcctccgtcctgtccacaaggctcagcaaagcggctggcgggtaagcgaggctcgggggtaaggaagtgaggctgggggaatcccgggcagaggtgtgggctcccggggtgtgaaggggtgttgcagaggactgtaagggtccccaattcctggagctgcccccatgcacacccaggggccacacaccagcctcccatgcttcttg

SEQ ID NO: 20305 - DNA, 2300 bp, Homo sapien
ggcccatagtttgccggttaggttttgtgaaacattcagtaaaatgatgtttatcttgattactgaggtgcatgtttgtctgtttttgcattgttttattatttattattgatttatttttgtgatagggtctcactctgttgcccaggctggagttcagtgttatgatcatagctccctgcagcctcgacctcctggactcaagcaatgcccccacctcagccttctgagtagctgggaccacaggcacacgccactgtgccaggctcatgttttattttttgtagagatggggtctcactgtgttgcccaggatggtaccaaactcctgggctcaagtgatccacccacctcagcctctcaaagtgctgggattacaggcatgtgcccagcctttgcatcattttaaactctgtggcgggcgcagtggctcacgcctgtaatcccagcattttgggaggctgaggcgggcaggtcacctgaggtcaggagttcgagaccaggctggccaacacggtgaaaccccaactctactaaaaataataataataatacaaaaattagccaggtgtggtggtgcacgcctgtagtaccagctacttgggagcctgaggcaggagaattgcttgaacccgggaggcggaggttgcagtcagccaagattgcgccactgcactgcagcctggacaacagagtgagactccatctcaaaaataaataaataaaataaaaattaaccaggcatggtggtgcacaccagtggtcccagctactcaggaggctgaggtgggagaatcacttgagcccaggaggcggaggctgcagtgagctatgatcacaccacggcactccagcctaggggacggagctagaccctgcctcaaagaaaaaaaagtgtggcatgggacccactcaagggaagttcataagaaaaatgtagtctccttcccctcctgccccttctcaggggattgggggaggccagggggactcagcagtggctctgtggacctctgctcccagcctcgagctgctgcgtgaccctggatggagcccctactctttctgggcccattttccctaagggaaacgggatcggggatcccacataaaatacactcaatccttgcagcaaaaacatctttggggccgggcagggtggctcacacctgtgatcctagcactttgggaggccgaggagggaggatcgccccaggagctcgttccaggctgcagtgagctgggattgcaccactgcgctccagcctgggcaacagtgtgagaccctgtctccaaagaaaaagacagttttgacaggcacgcagttcagctggaatttcaccccgcgtctgcttttccttgggttttttccattcttgatttttccatttatggtgattttatctaaaacgtcttttctaaataaatgcatcgaggcagtgaggaagggggaagggggaaaacgagccgattccatcttttcaaagaaaaatccagcaggcgtggctgttagcaggcgggatgtgggagccactcttctttcttcgccggagcacggagagggtggggatttgcccgcagtcacacagcgaggcgcggcagagccgggagggtcctcgcccacgctccacattcgggggccctgggatggggcagggggccgctgggggctcctcagatgctgccgcaggaggggaggtggttcccggggaagtgaaacccacagaccccacttgcaccttctccagggacagccgccaccgtgttctgtgcgctcccctacggtgggccagctctgcccctctctccccatctcacagggctccccactgccccgcaccccagcctggcctctgaggctgtggggggccttccactgcccccacccggctgtcagccctggggctattgactttcagatcccacctcctggtctctgtccaggctgttccctcccggttacatcctgtcctctgcgggcgggcaggggaggcggcggcctcggctgctggggaagtgttgcagaaatgtcccctccccaccccgggctgcggtctgacagtgggccggacgttttcctgtcagctgccggcgccaggtcagacccctcctgcgaggccaggggctgtggccattgggagtttgtccccacggacccctcctcccccagagggcacgccagtcttgaaggtagggggctcctggagcggggagctggacagaagcggccactttttgaggttgggatctgggcgggggtgggtcgaggcctggctgccggcagcaaccgcacggctgag

SEQ ID NO: 20306 - DNA, 2300 bp, Homo sapien
ccaagcccctttctggctgaggttttggcccaacagtggttcctgtccctgcccccagcaatgtcctaactgtcctctggaggatgtggaggggaggggcaagaactggctgtgaggaggccaggtcacagatggtccctgtggtcccggtctggtgcctgaatccttctgcaaaacctcagctcctgcttgtttgccccccgtgacaggatgcccaccatctgcagagcaaccgggcggtgacctcagggaagctcttccttgaccagagctgcagtcggcctgtgaccccagctttggtcctggatctgccccacctctgcaggtgcagagacccagcttcctccatcaccttctcccgaggacccgggtccaggcctccctgcagggtgaagcccttgttccggccttgttcttgtcactacactgcaccgcacgtagccgggatccccgggaaccccctgtgctctttggtctcgttccccacctgagccacgggtcagcagggccggccatgatggggccacgctcagggcttgtctgaggccggctcagaggtcatgtgtacctaggggcaaaagtccctccagtagacccatttggaaggacactcagcaccccagaagccatggttctgggccggggcagggtggccacctctcccttgtggggtggccctctcttgcctgctgttctgggaagcacgtggcagcggagggaggcggagggctggggtgatggctccttcttgtggacagccctgctgggctgtggggaggacggaggacagggcgtgtggacccctgactgtgaccaccgtgtgtgctgggtcctcagcaagacctgagcccaggccccgaggtcggctgggagatgctcagctgagcaggcgctggggtgggctctgtgtcccaggtgtgagctgtgtctcagttatgcgttgtgcctgtcccaggtgtgaactgagcatgtccctggtgtgagctgtgctctcacgagagccctgcctgcctctgtggtcagctctggtgcccagggcttggttttagtgtcagctgggtgtgagggtgtgtgtctcgggtgtgagctgtgtgtgtcccagatgtgagttctgtgttctgggtgtgagctgtgtgttccagtgtgagctgagtgtgtcctgggtgtgagctgtatcccgggtgtgagctgtgtgttccactgtgagctgtccttgtatcaggtgtgagctgagtgtgtcctgcgtatgagctgtgtgtcccgggtgtgagctctgtgttccgggtgtgagctgtgtgtcccgggtgtgagctgtgtttcccgggtgtaagctgtgtgtcccgggtgtgagctgtgtgttctgggtgtgagctgtgtgtgtcctgggtgtgagctgtgtgtcccgggtgtgagttgcgcctgtcccgggtgtgagctttgctctcacgagagccctgcctgccccctgcggtcagctctggtgccccgggtctggttttagtgtcggctgggtgtgaggtgtgttgcacctgtgtgattgggttccaggtgtgagtgtgtctctgggtgtgaggtgtaggacggccaggtgtgagcaatgcagactttctgcgcaccctccccttggggctgtggggccctttgtgggacccgggtgtccaccgtctccccgatgcgatctgtgtacaaagggctgggggagcggaagcccagggcttgggggcagcagtcttgtgcctcctgggtgtgaattgcgggccctgaggatcctggggtctctgagcgcccccagccaccccgggttggtagacgggagcccatccccccatccttgcagcccgcacccccaccccccagctcagccaccatagcagggacaggaagacgggttgaaatctttagaaaacgcttgagaaactgcaaaaaagacgcatgctgatgaaaaacagtcctgcggttgggcgtctacaaaaaaaggggaagttctgcctggggagcgccgtgcagccgtccccttcccctccgggaaatgcataggtggacacgcgagcggccggcccgcgggggaggggaggggagggtccgccctggggacccctcagatcatcttcatgttgaacttgcgcgcgcctccctggcccgccgcggcggccggcccatccaccttgcggaaggagtactccaccgagaagttgtttttgtgctgcccgcggccgcggctccacacgaacagcagcacgaagcagaagaggaccacgcccaggaaggtgatgcagcccatggcggtggacaccaggatg

SEQ ID NO: 20307 - DNA, 2300 bp, Homo sapien
tcaggcatctgctccctctgtccgaagaaatcccccttgaggctggaagcgtctcctcctcctccctccagcccttggcctggtatacagtaggtgctcaatgaacaccttcctccaagagccctgagagccagctatcaggagcatcactttacagagaaagaaacacgttcagagagagaaggagacctcccctactggggtcacacagcacagcagcccagggccatttggtggggagagcatggggtgtcatgaagtccttctggacctctctggggccaggaattgaaccatacccgccccccacagcatcctgtggggggcctggcctgcagcctcccagggatgcggtttctgggcctccagccaacgcgacagtctgggaacagagcctgcttgagtcacaggtggctgcgtgagtgccaggccaccgccaaagccactgggaatacacagctggtggggaggactgcagagtgggtgaagggggcagacagggcaaggttacacacacaggttcccgaggcctccttctcacccctcacttgggacaaatggcatctcccagccttggtttgctcatctgtgagacagggaggctaaatgtggcttttagaagatgcagtgaggggccgggcatagtagctcacgtctgtcatcccagcactttgggaggccgaggcgggtggatcacctgaggtcaggagttcgagaccagcctggccaacatggtgaaactctatctcccctaaaaatacaaaaattagccaggcatggtcatgggcgcctgtaatcccagctacttgggagactgagacaggagaatcgcctgaacccgggaggtggaagttgcagtgagccaagattgcaccactgcactccagaatgggtgacgagagcaaaactccatttcaaaaaaaaaaaaaaaaaaaaaagacaaaaaaaaaggtaaaaaactttccatgagcactcgcagtgcacttggtgtgtgcgctgctgtgtgctaggcggaaggcacattggggaacaagcccattagacaaactgagaggctccaagctgctcgatggagggacagagagaaaggctgtccaagctgggcacagcgaagatcaaaggcctgggactggagggacttggcctgtttgaggaaggctgagggggtggagcccgggaaagagtgagtgaggacaggccagggggaaggaggtggtgcggcagaccaaacagtgcaggcagccgggcggtggctcacacctgtcatcccagcactttgggaggccgaggtgggtggatcacccgaggtcaggggtttgagaccagcctggccaacatgctgaaaatccgtctctaataaaaatacaaaaattagccgggcgtggtggcgggtgcctgtaatcccagctacttgggaggctgaggcaggagaatcgcttgaacccaggaggcggaggttgcagtgagccaagatggcaccgctgtactccagcctgggcaacagagcaagactccatctcaaaaaaaaaaagaaagaaagaaagaaagaaagaacgaaagaaagagaaattccagggtaggtggggtgcagacgggaccctcacggcaatagggaatcacggcaggttctggagcccagtggctaagcttcctctgaggggcttcctctgagggccacataaggaatgggcctgggctgggctgtggcagatgtccaggtgcagatggtggcggcctggactaggggtgggggacggggggcagaggaggcgatggtagcttccagaaggttccacacggaacaacctgctgcacttggggtgcccctgcgtttattgcacggcacggccgtctccgcaggctcacccaggccgtggggacaggaggtcctcggacacgaagcgcccgggatgcgcacggaggggttctgcacccgcgctcccagtgtccccgcacctgcgcccacgtggcctctcacacctgcggccccagccgccgcgcacgcggcccagcgcagcccccgcgcgcccccgccaggcgcgccgaggagaccggcgggcggttgcgcgcggcggcggcgcgcacggcggagcccgggaggcggcggcggcggcggcggcggcggcggcggctgctcgtgtcggctccgggcggcccccgcgccgcagcccgcgccgtgtccgcggcggagccgcccaggtgagtggccgtgccggggcccggcgtggggcgcgcccgcagacctggggacccctcacctgcaccctgcgaccctgccgcccaaagcccccaacccgcga

SEQ ID NO: 20308 - DNA, 2300 bp, Homo sapien
tcaggagatcgagaccatcctggctaacttggtgaaaccccgtctctactaaaaaatacaaaaaaattagccgggcgtggtggcaggcacttggagtcccagctactcgggaggctgaggcaggagaatggtgtgaacccaggaggcggagcttgcagtgagccgagatcgcgccactgcactccagcctgggtgacagagcgagattccatctcaaaaaataaaaaaataaagaggctgttcatgtggggtggggaccatgtgggctggcaccccagggaagtgccagcaagcccaagacaagctctcaagaggctgaaggcgattaaaactcctcactactgtggtcctgcagtggtgggggcatgggagaaccatggggcccaggtttttaaactttttttcagacaccaggtcttgctctgttgctcaggttggagtgcagcagtgcaatcacagctcacagcctcaacctcctgggctcaaacaatcctcctgccttagcctcctgagtagctggggccacaggcacatgtaccgccatgcctggctaattacattttttttttttttgtagagacagggtctcactatgttgcccaggctggtctcaaattcctgggctcgagtgatcctcctgtcttggcctcccaaagtgctgggattacaggcatgagccaccatggccagctacaagaataaatcttgtctcagtatcaatggatccaaggggcaagaccctctctctcctaagtcctgacattcccccagtgcccgggccgggatggggacttgccagctggggacttgccgcaggagcttctgggggagagtctgaggacttggcggcctcactggggaggggagcgagcgggggcagggaaatgagggagggtcctctggggaggagacagggaccctgcgttcatagcgggaattaacaagggcagaagaggaaaggcgcccgagaggagccccacggcacgctcactaccccacagcaaggctgctctccgctgggcgccacagctcacgcctggaaccccagcactgtgggaggctgaagcaggaggatggcttgagcccaggagttcgagaccagcccgggcaacacagtgagacctcagcttatctcttttttttgagacggagtctcactctgttactcaggctggagtgcagttgcaccatctcggctcactgcaacctccgcctcccaggttcaagcgattctcctgcgtcagcctcccgagcagctgggattacaggcatgcgccaccacacccagcaatttttttgcatttttagcggagacggggtttcaccatgttggtcaggctggtctcaaactcctgacctcaagagatcctcctgccttggcctcccaaagcgctgggattataggtgtgagccattgtgcctggcctctcacgtcaccaatttaacaaaaattaaaataataaaacatttaaaaaggttgtcctctaactgtgccgggcgccccgtcagtgtgtagagaccagtgggtgagctggcagctcccgtctctccaggccccacaacaatggggtttcctgctttgtgaggacgtctaggaccagtgagcgctcaagcccgtccatcggccgccacgaggcttcacgttggtaactcagaggttttgtgggtttgagagaagaagagccagcagggagccccacggctgcccccctcgtcccactgcccccctcgtcccgctgcccccctcaccccactatccccctcgtcccgctgcctgcctcggccgccaccccactcacctcgcatgtactcaatggtgccgtccagcacaaggttgaggagtgggtcgaagcccttcaggattccactggcttggagaaatcaccgggggagagaaaagagaaggcatgagatccgtcctgggcgcagggcccgccccagcatggcccaggtatggggctaactgctccagggatggaggactgagggtaggagagggctcccgggagtggccgatgacagccgcctccagagtgatctccaccacaggcagcagaccacgtctgcggggggccagatggcaaacacttctggccgtgtgggccacagggtgccggtcacagctgctggctcgggctgcctgggtggaggcagcttcggtaatgagtccatgtgtggctgaactgcggccggtcagctctactcacaggcactgaactgtgaatttcatgtaatttccacatcgtgagacagtcttgttttgatccctttctagctatttaaaagtcataaaaacaatt

SEQ ID NO: 20309 - DNA, 2300 bp, Homo sapien
cttgccatgtaggccaggctggtctcaaactcctgaactcaagtgatctgcccgcctcagcctcccaaagtgctgggattacaggcgtgagccacagcgcccagttaattgttgtacttttagtagagatggggtttcgccatgttggccaggctggtctcgaactcctgacctcaggtgatccacctgccttagcctcccagactgctgggattaaggcgtgagcccccgcacccggccccaaaccctttctgaaagatgattctcccactggcccgaataactgaatatggacaaatgtcagctcagcctgcagcactgtaggggcagaccaccacggtggaacagagtcccgagctggcagcgtccgggagctgcaagtgtccctagccaacactggccagaacggggaccctggccctgcaaaggtaaggcactgagctctgtcaataaccagtgggctcagaagaagaccccaagatgatggaccccaaaaaacaaccctcagttacaacctcctgagagcccttgaggctgtggtaccctggctcctgactcacagatcctgtgagataataaaatggtgctgtttcagctgctaaatgggtgatttgctatgaagggcagaaaacaaagggaagcagtgtgaccagcaagagcggccgctcactcatgtccttccatgtccggagtcagcatggtgtagactgagaaaacattttattcatattcctttttctttttgttttgagacggagtcttgccctatcgccaggctggagtgcggtggcacaatctcgcctctggggttcaagcaattctcctgcctcagccccccgagtagctgggactacaagcgtgcgccaccatgcccagctaactttttgtattttagtagagacagggtttcaccacgtaggccaggatggtcttgatctcctgacctcctgatctgcctgcctcggcctcccaaagtgtcaagattaaaggcatgagccactgtgcctggcctcctttttctcttttgagactgggccttgctctgtggcccaggctggagtgcagtggtgcggtcatagctcactgcagcctcaaaccctagggtgaagccaccctcctgcttcagactcccaaattgctgggattacacacgtgagccgccccgtccggctggggcactgtgatttttaataactctcatgccacccagttgtctacaatccagggacaaagaggtttgggtccccgtcttacaaaaaaaagaaaccaaagatccaagaggctattgaataagtgacgtgttgtctgactgcttacttcctgctgagagctgcctcaattacattacatgcctgtaaccattcattctcaccaccccctgtgaagtgggtggagttaccagccccatttgacaaatgaggaaacggaggctaggagaaggcagctcacttgcccagtcaaaaatgctaggctgggcatggtggctcatgcctgaaatcccagcaatttagggggctgaggcaggcagatcgcttgaggccaggagtttgagaccatcctggccaacatggcctctctactaaaaatacaaatattagccgggcgtggtggtacacattaattccagctactcgggaggctgaggcacaagaatcacttgaacctgggaggcggaggttgcagtgagctgagatcgcaccactgcactccagcccgggtgacagagcgagactgcgtctcaaaaaaaataatgaaaataaataaaagaggtgcttccgcatgcgtcctcatcatctctgttgctgggtttatttgaaatttttaaagagggggtaccgacagcgggagcctcctcaccttcgcggcctccctggaactttacccggatcgtcttgtcgatgtacttggacaagtccaagatgctctcctttttcttcttctccttatcctgcggggaaagcagagcgcatgagacctggagcgcggcccgagctccacgccccccggctccagattccgccgcgcgctcaccgccatcttgtcgcgccgtgtggctcttcgcaggcaccgccccgcgccctttgacctcccccacgcgcatgcgcggcgcatgcgtggcccggggtctcggggcgttgctgggaaacatctgccgttggttgcggcgggcaccggccgacatggcggcagcggtggcggctgcgctggcgcggcttttggcggcctttctgctcctcgcggcccaggtgagcgcggcaccggtcccgacggcaccgcgggctgcggcccttcggcctctc

SEQ ID NO: 20310 - DNA, 2300 bp, Homo sapien
ccccctcctctgtgcccctgctccagcaaccctccacggcccaccccccgggcctccttggtggtgacatctttcagggtgtaaacccttccttccagcattattccaccctacactccagccacagcccaccccttgccaaccccaaataacctgccagctctcacacctcccagcccccgcttatgctgcttctggtgcttccaacacccttcccctcctgccgacccggcaaactcctactcatcattcagaacacctgcctcggggccgggcacggtggctcacgcctgtcatcccagcactttgggtggccgaagcaggtggatcacctgaggtctgaagttcgagaccagcctgaccaacatggtgaaacctcgtctctactaaaaaaaaaaaaaaaaaaatttagccaggagtggtggcatgcacctgtaatcccagctattcgggaggctgaggtgggagaattgcttgaaccgggaggcagaggttgcagtgagcctagatcatgccactgcactccagcctgggcgacagagcgagactccgtctcaaaaaaaaaaaatagatctgcttcggaaaagccttcccaggcaaactgagtccctctctccacagagttctgtgatctttcttccacctctggctttccccctccttccaaatgtctggggagctctaggtgcctggctgcagaatggggggagtccaaagggggctgacagagcagctgggggtaggactggggttctcagaaagcttccgagggggcccgacagccttgcagagaccaggggcatctcagggtaagagaaaagactagagagtgaagcgactgcaatgagctgcaggcttccccagcagccaggtcacaactggacggcgcactcatctggatgcgacacggtctgacatactttgaaagggtcacccctgctgtgtcgaggatggactggggatgtggtggacaaaggcagccacagcagagggatagcggtggggctggaggagtggagactgaggagccaggtggcggcgacgccttaagagtgagaactctgagggggtagtgaaggttaagggctgcatttgtggggctgctccaggttccattgcctgagccaccgaactcaggagagagggaagatttggaattaagaaaataaaagatgcagttatgacagtgcgatctcgtagactgtccccactagaacctgacactctttacatcaaatgacacacaatgaacataatgaaggcctgttggccctgggcgctggtcaccctggacagaacctccagaatccacaccatagtcggtcctccttctgcacacgaattccatcgtccaaggtcacggagtaaaagatggagcggggatccgaccccagtgcagggctggactcctggccgctccaggatgctgccagttactgggggacgcgcgggacgcctctgggttcccccaccgcaccccctagggtgaggttagcttagcaccgtgcccgttccgcctaaggggaaactgaggctcggagaggggtgggcagccgcctgctcaaggccacagagccggagagaggcgtccccggcggcaactggagaccccgaaacggagaagcagaaccggaggatggagggggcacaaatttcagacccggtgggaagtgagtggcgctgcagcggcggagggcctccgaggcggggaaaggagaggagccggggacagacccgcaaggtcacggccgagccccggcaccgccggccgacaacgcggggacggcggatccccgaggctggacccccaagacgggccgagcggggtcgttcctgcgcgtagcccggggacagagaggccgaagggccgcagcccgcggtgccgtcgggaccggtgccgcgctcacctgggccgcgaggagcagaaaggccgccaaaagccgcgccagcgcagccgccaccgctgccgccatgtcggccggtgcccgccgcaaccaacggcagatgtttcccagcaacgccccgagaccccgggccacgcatgcgccgcgcatgcgcgtgggggaggtcaaagggcgcggggcggtgcctgcgaagagccacacggcgcgacaagatggcggtgagcgcgcggcggaatctggagccggggggcgtggagctcgggccgcgctccaggtctcatgcgctctgctttccccgcaggataaggagaagaagaaaaaggagagcatcttggacttgtccaagtacatcgacaagacgatccgggtaaagttccagggaggccgcgaaggtga

SEQ ID NO: 20311 - DNA, 2300 bp, Homo sapien
agtgagccgagatcgcaccacagcactccagtatgggcaacagagagactctctctctctttaaaaaagaaaaaataaaaatcaggggtggggtgtgaaggtcaggagcactttgggttttaggctgctggagggattttagtgtgtgtgtcgcagggatgatgtaatctgatggacacttcaaaggcacccttaacggctgtgaccagctcacagaggggcaggggagggaggaaagaggccagtccctccagacgggatgctggtgggctgtccagagccgtagctgcacagatggtgaggaatgactggattaggaatctcttttgaacactagccaacaggagttgttgatgagtgtgacagaaaaagagtctgtggtcacaaattctttgatgcacctcccttcgaaagctggcactcaggctgggcgcggtggctcacgccggtaatcccagcactttgggaggcccaggtgggaggatcgcgtgaggtcaggagtttgagaccagcttgggcagcataggaagactccctctctacaaaaaacttaattagctgggcatagtggcacacacgtggccctagctactaggaggcggaggtgggaggatcgcttgagcccaggaggtggaggctgcagtgagctgtgatcacaccattgcactccagcctgggcaacagagaaagaccctgtctcaaaaacaaacaaaaaaggaggcgggagggtgagaaagagagactggaagaggctgcactgtggctgtgaagggagaagaaggggccctgaggcttaagacgctggtaaagatgggaaacgtattctcccctggagcccccagaagggcccaggcctgcccacagctcgatggtgagccctgcaagatggatctcagacttctgactttcagaactgtgagataatcaatcagtattccatttttaaattctttgagacagggtctggctctgtcacccaggctggagtacagtggcacaatcacagctcactgcagcttccacctcctgggctcaagtgatcctcctgcctcagcctcctgagtggctaggattacaggcatgagccaccacatctggctaatttttgttcattttttgtggagatgggggtctcactatattgcccaggctggtctcaaactcctgggctcgagcaatcctctcacctcagcctcccacaatgctgggattacaggtgtgagccaccacgcctggccgaaaactcggtgtccctctaagcccccaagcgtggggtcctttgttacagcagctgtgggaacttcagacttactctttctagcaatggaccgcagcgacccacgggagtcctcatcctcacacagccgcccagccagcagtcacgttccaccttttttttttttttttgagatggcgtcttgctctgtcgccaggctggagtgcagtggcgtgatctcagctccctgcaacctccgcctcccgggttcaagcgattctcctgcctcagcctcccgagtagctgggattacaggcgcccaccaccacgcctgactaattttttgtatttttagtagagatggggtttcaccatgttggccaggctggtctcaaactcttgacctcaagtgattcacccaccttggcctcccaaagtgctgggattacaggcataagccaccgcatctggtcttttttttttttttttttggagtctcgctctgtcacccgggctggagtgcagtagcgtgatctcggttcactgcagcctccgcctcccgggttcaagcgattctcctgcctcagcctcctgggtagctggattacaggtgtgcaccaacatgcctggctaattttggatttttagtagagatggggtttctccatgttggccgggctgatctggaattcccgacctcaaatcgtcctcctgcctcagcctcccaaagtgctgggatgacaggcgtgagccaccgcgccccgccgtttttaagggtatagttgcaacccttgcttatgggaagagaagcaccttcagcctctgaccccgtgtttctgtcttgctgtgtggcatccagctcgctgtctgcgtgtctctgagccatggagcccactgtggctgacgtacacctcgtgcccaggacaaccaaggaagtccccgctctggatgccgcgtgctgtcgagcggccagcattggcgtggtggccaccagccttgtcgtcctcaccctgggagtccttttgggtaagtggctatgggattggctgggttcgcaatacaagggacatgtgcaaagtcaccg

SEQ ID NO: 20312 - DNA, 2300 bp, Homo sapien
ataatttttgttttcaaggtgtctcattctttcttctttcagccacctggtcttgtttgcagtgtcctgttcttgtttcgtggataccatttctttctttttctctgaggatcgtaatttaatccgttatgtttcttctatattctatatttgtggttaactgtatttcaggcaaacgtaagttattctgttgtaactgagtgtctttatttcatggagattggaatccctcaactggtgcttaagaatgaaaagctgggtgcagtggctcacacctgtaatcccagtactttgggaggctgaggcagccaggtcgcttgaggccaggagtttgagaccagttagggcaacatagcaaaacttttgtctctacaaaaacaaaaacaaaaacaaaaattagctgggtttggtggtgcatgcctgtagtcccagctacttgagaggctgaggtgggaggattatttgagcccaggaggtggaggttgcagtaagccaagatcacgccactgtactctagcctgagtgacagagtgagacgccgtctcaaacaaaattgaaaatttaaaaatgtcgctcaattcttgccgtgatcttatatttgctattcactttctcttggcgagggacattaacagtttgtgttcttggattctatgtaccctttcaagggaccaaagacctcctggtctcatttatcctttgtggttgcccaaatcccttttctaccccaaccaacccaggtcctcttgagaaagctttctcttgtgtcttgagcttctgcacatgggctgggctgccacttcctctgtcagcctctcgtgagtcttcatggtttctggtccacaaccagggatctctcctgcctaatttttttagcatggctgtggattcctgtctttcttgtgcatacctttgctcttgtttctaaggcctggtgggtgaggaaaagatgggagagactgctacatgtgcttagattgccatattgaaaccagaatctggagaaaatgctaggaactaatgagagggctcatgtttaagaatgtaagagtcggccaggcacggtggctcacgcctgtcatcccagcactttgggaggctgaggtgggcagatcacttaaggtcaggagttcaagaccagcctggccaacatggtgaaaccccgtctctactaaaaatacaagaaattagccgggcgtggtgatgcgtgcctataatcacagctacttgggaggctgaggcaggagaattgcttgaacctgggaggaggaggttgcagtgagccgagatcacgccattgcactccagcctgggcaacagagcaaaactctatctcaaaaacaaaaacaaacaaaaaaacgatacacagaacgtaagggtcagggtgaactggatatgggaaggtaaaaaatggtgaggccggacgagtgacagcagatgagcactttgggagcaatgctgcagctaccagtgagatatatggaggcacccgcgtggcagccatactgccagcctaagcaagtggtgacattatcaaagatctactgagttaagaagaggaggggatgttatttatttgggtcacgttttggcctgccagaggtaggactgaaagacatcttagagatcctatagtccaactgtcttgggttttgttttttttcctccacagaagaggaaacaggttctgagatgtcaatgatcagccccaggtgctctgtgagcttgtgtggagagaggtcctggctgtcccagctcagagctccttcttgggcctcgtagcactggtgtctggactggctgctgccgacccatcctgagggtgtgtgttggtttcctagggtgactcaggaggacccctggtctgcgaggagccctctggccggttctttctggctggcatcgtgagctggggaatcgggtgtgcggaagcccggcgtccaggggtctatgcccgagtcaccaggctacgtgactggatcctggaggccaccaccaaagccagcatgcctctggcccccaccatggctcctgcccctgccgcccccagcacagcctggcccaccagtcctgagagccctgtggtcagcacccccaccaaatcgatgcaggccctcagtaccgtgcctcttgactgggtcaccgttcctaagctacaaggtattttcggggcagaaaggtagaagatgatgtacgtgcctatcttgatttagggagaacggatatcgtcatagtatcttcataattttggatcttcctgttcaaggaaaggtcacatgtgtatccgtttattcccatct

SEQ ID NO: 20313 - DNA, 2300 bp, Homo sapien
tatccatactgtgcttttatctgtgattttctcgctgaaaccatgtttctcagacaggccaaggccacctgactcctatcacgacgcacccaagcccctcagtccagcttcccaatgcctggcaccccccttcggcaatagctcaccgtttacaccctccctcatagatacacagaagttatttttttaatggatatttatttttttacattggtcagtacacaggtcaggagctcacgccagggccttgaggacaggctgaccctcctccccggggtggcgtggggctggggcaccctccgacggcagagcctccttcagaaagtgcagctcaagtcttaaagacaccaaaactgagccatgggcacgcgccgtctccgggccatggcgttcactgcagggcgggggcggcaccgctcccctgtgactgcatcccgcctccctggggacctgcctgtggcaggaaggaatggggggccccagccccaggccgggaaggagccagcggccgacaaagcagaaacacccgctgctccacgtagcccctgctcgctgtccttgctctcagaagtcccggtcccatgtagatagaggggggcgcatcttaccaaagcatttcctcctggaggctacgccgctgtgctcccagtcaggcggctggtagggagctttgcctgccccggggataccctctgccagccgctggaagtgggaatgctggcgacagactgtgtcctctttcccaccttcatagcaggaatcacccggacccgactggctgggcttcgtgctagcgagggttctgggggtgggtcttggtgatcttgtcctatggggagtctgcagtggtctcagccacatcctatgtattttggctctggaggagcaaagctgtatcctggagttggtctgtgatttgccgacagccttgcaggctgggctcagggacaaagtcccccccaaaacccgcaggtcctcatgtccagacgctgcccagtcctgtcctgaaaacagcacgccccaggcccacagaaccccccaccctacatttgccttgggtggagctgggggtggtcctaggactgcgggtgcccttagctgaagggggtggggagaagcgtggactgggcagcctgtgggtaattggaggttcattgagaattgagtctttggaaacactaagaaaatcaaatttttaaaagttatttatggcctgggaaacaatttgcatttgtccccaaatacgcttagctgtgtgccgcttagaacgatgcgaaaccatccctctgtgtaagcccgtgccgtgtgactcgaagcctagcgccctccctgcgaagcatcagacgccacccagccctggggggaggcccacgcctgctggaccaacgcgggttctggggtgcacagcgccaggttaacgctgaagcctgccccgctgagcccaggagccgggaggcctgcgggctgacccagaatccgatcatgcacctgtcctcatgccagcggctttggctggggttggtctgaagcctgcacgcggcagttctttgttaaagatctgagggactcctcagtcctggggcgtcgccgcctgcagcctcttccaagccctgcgtccagcgagcgtcacagcacaacctgcaaaaacggagctgggctgcagctggggctggcatggactttcatttcagagattcggtttttaagaagatgcatgcctaatgtgttcttttttttttccaatgatttgtaatatacattttatgactggaaacttttttgtacaacactccaataaacattttgattttaggttctgcctctgagtttattcctgaggggaagctcgagccggggcctctgccctaatgaagcggatgtctaagaaagatccctccacccccaaggaaaaaggtcactggctagtgtagctagtgtaaacaggacccaggcgatgcatgggaccctgcccttttttttctagtgagcctccgacgctgttgcacaagctgactcttcgtcacgtgatgcgaccgggctccgccccggcggcaacacgctgtatagacgcgccgggtgcctcgtgcgcatgcgcggcaggcccttcgggacgagctggaggcagagcgtgagtacaaagtgatcggcctcggccgcacgtagtagcccccctactccccggccaagtcagggcctccctcttcccgcggagtcgcaaccacgggtagctcgtgtaggtaacggcaggtccaggcctccgcatgagcggagggccccccgcgcgaccttgaatggcccgg

SEQ ID NO: 20314 - DNA, 2300 bp, Homo sapien
atcctggggaccatcaccctggataagcctgcgtcgggctggaaggactgaacgcccagggcattgaagggggctttgtggtaggggccactggctggcccacgtccctggaaccagaggtgaccctgatggggccattgttattgggtcctcaggtgtgggcagctggtgcgggggtggcccacagccccccctcgacgctggtgtggaagggccagagcagctggggcacgggcgagagcttccgcaccgtcctggttaacgcggatggcgaggtgggtgtgtgtggcttggggggtgctcggctggagtcctgggcagggtctgggcaccctcggggccgccacagcagctctgggcccgatcccgggacatgccgccgtgtcctgtcccgcacaggaagtggccatgaggactgtgaagaagtcctcggtgatgcgtgagaatgagaatggggaggaagaggaggaggaagccgagtttggcgaggaggatcttttccaccaacaggtaggacccctgtgcccacttgcggctggggggcagcctctggggcagagtgagctcgtgcacacacatacacatgcgtgctggccgcatccccgacgggagctccatctggctgccgtggctcagggtgaagccagccttggctgttaccagcacggcagagacctgttcttgcctcctgggtcgtgcccatcgtgtgaatttgcgacatcacagacctcagggtagctggccagggggtcccctgagaggtgggtgttgaacagctccccaaatgctctctggtcaaccggcttcctcagtcgaagacacaggtcccttcaatactggcttctggggagaagatgagtgcagaaaccacagctgcattaaacgcgtgcgtcgcaagttcctgtgactgttttggaacccagaacagaatgtgtagctcacaggcgggctcatggggacatggaagtggaatggaaggctctagaaatagacactgttgttgctcagcccctccctggtggggaggtgggggcagccatctacctgccggctgcctccaggctggccctgatcatggccgaccttccttccttccttcctgcagggggacccgaggaccacctcaagaggctgctacgtgatgtgaacccacactcctcatccacacacctttctttacccagagccactgaaaactatttttatatcattggctttctttagttcttgatacatttctagagaatttctaagcgaactgccagaacgtgtgggtgggtctcccccagccctccctcctggcgggtctcctccagcctcacttcgctgccacttcgccgctgccccggagacttttcaatcccaccccactcctcatctcaccatttggtcaaattggaagcccagggccaggacccggaggtttagaagatgcttgggcttggagggaggagggccggcgaggctagcgaggggacaggagacggccctgctgcggacggagcgcggaaactgcgtaggaattcagtggtggtgggtttttttaaggctttctacaaaaccaaattcagaatccaggcgtcgacctggtggggcccggggccaagcctgcattctggctgcccagcttcggacagcgggaactcctcaggcagccacgcagcgggtgtgggccagcatggggatggcgtggcccccagggcgggttttcactccgctgcctgggcttccagattcccgttctggcagcgcaccggccgggtttctcggaccgttgactttatttgggggagttttcccgcagttcagttcctgactgtgcaaggccaacagggcaggggaggggaagacctggggaaggaagaatgaggacagtcccgtcgtaagacctgtcacaacaataagcagggaggggagatgtggaggggacacatctggttgccttggaggcagaagctgtgagtttcagaacagctgtctgcagggaacgccaccatgttgaccctctggaggagagcgctgtggagcccctcccgtgttccagctccgtctgccctgtgcctatatatacacatgcgtctatccatactgtgcttttatctgtgattttctcgctgaaaccatgtttctcagacaggccaaggccacctgactcctatcacgacgcacccaagcccctcagtccagcttcccaatgcctggcaccccccttcggcaatagctcaccgtttacaccctccctcatagatacacagaagttatttttttaatggatatttatttttttacattggtcagta

SEQ ID NO: 20315 - DNA, 2300 bp, Homo sapien
tcatggctgactgcagacttgaactcctggatgcaagccattctcctgcctcagcctcccgaggagctgggactacaggtgtgtgccagcacatgtggctaattattaaaaatttttttggctgggtgccgtggctcacgcctgtaactgcagcactttgggaggtcgaggtgggtggatcacgaggtcaggagttcaggaccagcctggccaagatggtgaaaccaggtctctactaaaaatacaaacattagctgggcatggtggcgggtgcctgtaatcccagctactcgggaggcagagaattgcttgaacccaggaggtggaggttgcagtgagccgagatcatgccattgcactccagcctgggtgacaagagcaagactctgtctccaaaaaaaaaaaatttttttttttggagacagagtctcactatgttgcccaggatgttctcaaactcctaggcttaagcgatctccccatctcagcctcccaaagtgctgagattacaggtgagagccacccgtacctggcctcaaactgaactttaaagggtgcaggttttcaaaaaaaaacattcacagccaccaagccaaaggggaccggttaacctgatagggaagtaccctcaaaatagagggggttaaaacagaccctatgaaaaaagtaactttgaaacaaccaattggtttttatttcgtatttttatttttactttttttgagacaaactctcactctgtcacccaggctggaatgcagtgatgtgatcagggctcactgcaaccttgacctctcttgctcaaacaatcctgccaccttagcctcccaaatacctaggactataggcgcccagctaatttttttttttttttttttttgaggtggagtcttactctgttgcctaggctggagtgcagtggttcaatcttggctccctgcaacctccgcctcccgggttaaagcaattctcctgcctcagcttcccgagtagctgagactacaggcatgtgccaccatgcctggctaatttttgtatttttagtagagacgggatttcaccatattggtcaggctggtctcgaactcctgacctcatgatctgcccggcttggcctcctaaagtgctgggaatacaggtgtgagccactgcacctggctaatttttttatttttatttttagaaatggggtcttgctatgttgcccaggccagtctcaaactcctgggctcaggctatcctcccacctccgcctcccaaagtgctggcattacaggcgtgagcaaaccactgtacctggcctggcttttattttaattcttatttctcctttcttcagccttttctgcctgtaatgcagaatgcccatcctctctgctcagctcattggagtgcctatttaatagattgaatgctatccaattcatgaattgctaataagagccaatgagatcattaaactcaatttgttgaaattcatactccttgacagcctcttctggacattttatatcagtggcattgtacactatatggcttttttttttttttttttttttttttgagacaaagtttctcattgttgcccaggctggagtgcagtgccgcgatcttggcttactgcaacctccacgtcccaagttcaagagattctcctgcctcagcctcccaagtagctgggattaccggcgcgcgcctccgtagtagagatggtgtgggggggtctccctatgtggtccaggctgatctcgaaattcttttctcaagtgatccaccggccttggcctcccaaagtgctgggattacaggcgtgagccaccacgcccggccctatatggccttttgtgtctggttctttgaacacgttttgaggttctctaagtggggaaacaggtactagaaagcaacccaacgctgtttcctcgtggcggagctgggagtttgcagccaggaagtctgtctctggagtcagcgcctctgcgaagcgagagctggacggagacttcaacttccggcgtgccccgcgcgcgcccggcggtcggactaccagtcccaggctgccccgccgcggcgggcggcgggcgcggcgcggcgcggcgccatcttgcagccggcggcgcggattgaatgagcccgccgagcccgggccgccgtcgggagcagcgcaggccgcgagccgccgccaccatggccacgccgctgcccggccgcgcgggcgggcccgccacgccgctgtcgcccacgcgcctgtcgcggctgcaggagaaggaggagctgcgcgagctcaacgaccgcctggc

SEQ ID NO: 20316 - DNA, 2300 bp, Homo sapien
cttatttatttatttatttatttatttttgagacagagtctcactccatcacccaggctggagtgcagtggcataatctcggctcactgcaacctccgcctcccgagttcaagcaattctcgtgcctcagcctcctaagtagctgaaattacaagcgtgctccctcatgcccggctaatttttgtatttttaatagagatagggtttcactgtgttggctgggctggtctcaaactcttggcttcaggtgatctgcccgcctcggcctcccaaagtgttgggattacaggtgtgagccaccaagcccagccctatttatttatttttgagacagggtcttactcttgtcacccaggctggagggcagtgactcaatctctgctcactgcagcctctaccttctgggctcaagtgatcctcccacctgagcctcccaagtagctgggactgcaggcatgagtcaccacgcctagctaatttttgtatattttgtagagatgggctttcactatgttgtccaggctggtctcgaactcctggcctcaagcaatccttctgcctcggcctctctaaatgctgggatagcaggtgtgaaccactgcgccctacctaattcacttatttataatgtgtactcgcttcccctctgtccccccagtgcctgccacaaagtagaagccacgcaaatatgtgttgatttcactgttccattcactcatttaacaggcagctgccagccacggccccagagctctgcttgcctcccggatttctgttggggtcacaaggttccaactccagggtcctgaattctgatcttagataccaggtttggccttcaagttctggaatctatgttccagaattcggcttcccaagacccacagcccagaatccaggctccagaattcaggctccccgagatccaggcttcagaatccgagctccctcagacccaagctccgaatccgggctccctgagatccaggttccggaatccgggctcctggagatccaggctccggaatccgagctccctcagatccaggttccggaatccgggctccccgagatccaggctccggaatccgagctccctcagaaccaggctctggaatccgggctcctccagatccaggttccggaatccgggctccaggctcgcattccgggctgggagccagccacagccgttaggctgagatttttaaaatctggcgccaaaatccactccccgggtgggagtggcggtgccgggtggaggtcagtggaatggacgggtcgggactggggccctcacgggctgcatagtcccagggtccgggatttctctcccgcggccccgtaccctctccccaaaagcagacagcagttggtcactaactttcttttcttttcttttctttttttttttttcagacgaaggttcgcttttgtagcccgggctggagtgcaatggcgcgatcttggctcactgcaacctccgcctcctgggttcaagcgattctcctgcctcagccttccgagtagctggggtcacaggcgcctgccaccacgcccggctaatttttttttttttttttttaagtggagacggggtttcgccatggtggtcattctggtctcgcactcctgacctcaggtgatccgcccgcctcggactcccaaagttgggattacaggcgtgagccaccgcgcccagccaattggtcactaatttctagctcccgggggaaagagggtcccgcgttcgaatcccgcctccgctacgcccctggtgcggattccccgaccggtccctaaccttcctgtgcctcagttttccataatggaaatgggcccggagccccctggcgcgtgtggtgccttgggaggcccctcggaatggacggggcagctttgcgggatgccccagacctcgggctctgggcgcagctgccagcagcagcctgggcgtgggtgcccccggggggaccacggtctcagctgtcaccgcccctcccgttcggcgccaaaatttgaaaattgcccagcgcctcccaaactgcgcgctgggagggggaaagccccgggccccacccacgggaagcgcggggctttctgggacttggagtccagtccctgggggtcccgcggggatggctctgggcacccgaagcccctccccagcgccgagacaggagggctggggtagattcgagaccccggtttgcagagcgcaagactgaggcccagggccgcgcagtcaggcaggaaacggcgctcctggcggatggaacagcacgggcaaaggctgggta

SEQ ID NO: 20317 - DNA, 2300 bp, Homo sapien
atggagtctctctctgtcaccatgccatgtgcagtggcatgatctcggctcactgcaacctccacctcctgggttcaagtgatactcctgcctcagcctcctgagtaagctgggattacaggcgcgtgccaccacgcccagctaatttttgtgtttttagtagagacagggtttcaccatgttggtcaggctggtctcgaactgacctcacgatctgcccgcctcagcctcctaatgtgctgggattacccagcctgcaatactttttaaaaatcaaaatcaatgcccaagtatccatgaggaacaaaatatcaaaattgtaaataaagacagaatctgactttgcacttatcccacccacctccctgatcttccttatcttcagctcatgttggccatgttggtcaggttggtctcgaactcctgacctcagttgatccgcccgcctcggactcccaaagtgctgggattacaggcgtaagccaccgcgcccggccgatttaacttttaaattgaaattataaaatataaatatgtatgttgcatgcgtaaaacattgcataaagttacataaaacgttgcaaccgccacggtccccttatcccccgcctccagcccagtgccccgcccgtccgtccctctcttccggcgctgagggcgcagaaactcggcgcggccaccagatggcgccaccgcgcctcgcagccccgggacatttcgtgccccagcggtgggcggcgcggaggaggtgggatgcgtcagccggacccgcgggccggggagccgggcaactggggaaagtgagccgccgggcggaggccagaccccaggctggcgggggaggggactcagatgtgagtcacccgggagcccccagtcgaccgtgggagacgttgtcatgcggggcctgccagcctcgctcctgaacagccttcccggggcggcggagtcctgcaggcggccgtgcctggcgcacacgcgtggctccaacacgaactagcctatggcctcaccaagcctcagtttccccttttgcataatgcacataagcatcccccctgcttcccaggtcttggattaaatcatccatgaatccggaggggtggggggtaccaggtccgcaccacgcactcaatgcaggtcagcgcccaccccggagtgagaaataaaagtagccgtcatccttgcacgtgggccctgggtggcggcgtgcagccggagcctgcaccattcccctcaacaatggctttctccagggcctggaggcctccgcacgggcaaaggctggaacgccaggcagccggcgggggcggggccgcgccacctgcacctcccacgcgcaccccaccctgatactcgcggggtcggcgaggaggcgcccactttcttctccagagcgccccgggctttgcaacctcccactttcggggccctcgaggaggcctcccgcgaccaccaggtgacagctgatgtgtattgggctcttactgtcagccgtattttatgccatgctctgcaaaccagcgaggccggcgctgcagacccattactcagacgggaacagagaggccgggagaagcgaaatcacccaggggctggggtcgtcgcagccaggagagactccggccctcaccaccacctgggcgagatcacgctgcaaacggggccccttcccggtgcagcccctccacccccagcagaacttgggaaaggcgcggtccgggactctccgcggatcgggaggggattccaggcccccccgaaagtccgggccgcctcgcgcgctggaaatcccgcgcgcgccccgaaccgcggctcggctgccgggaaatcaggagaaaaaaacttctgcttttttttcttttctggcattcgcggtcacctacccggcccccgcgcgccctcctcccggttctcgcccccacgtggggcgcccccgcacgccgctcctccccctcccctccgtcggccaaccgcagagctagctgcactcgcccttgtctttccaccaataggaggggcgaatgactccactgaggccacgcccaatgttcaagtctataaaagtcggtgccggaggctcccagctcagatcgccgaagcgtcggactaccgttggtttccgcaacttcctggattatcctcgccaaggactttgcaatatatttttccgccttttctggaaggatttcgctgcttcccgaaggtcttggacgagcgctctagctctgtgggaaggttttgggctctctggctcggattttgcaatttctccctggggactgccgtggagccgcatc

SEQ ID NO: 20318 - DNA, 2300 bp, Homo sapien
tcaaaaaaaaaaaaaaaaaaaaaagaaacaagaaaaaaacaaccttcacagcaacatctaaaaaaacatttaactggccaggcacggtgactcacgcctggaatcgcagcactttgggaggctgaggtgggcggatcacaaggtcaggagttcgagaccagcctggccaatatggtgaaaccccatctctactaaaattacaaaaaaattagccaggcgtggtggcaggctcctatagtcccagctacttgggagactgagtcaggagaatagcttgaacccgagaggcagaggttgcagtgagctgagattgcgccactgccctccaaccccaagcgacagggtgagactccatctcagaaaaaaaacaaaaacaaaaaaacatttaaccaaaccctggggcaccatggcccgccctagtgcacccataaaatcagccatcaccccacgtatccactcagaactcagctctccagcacctgtcaccagcttgtcattattggccacgggaatttattaggaaggggtgaccggcccttgctttgctcccagcggggaggcggacagagtcgtccctgctggccaggtggcacaggtggttctgatcggccggtgagtctccctccagcgcagctctgagccctcccagaccccatcacgctgctgctggccgggatccaaccagtaggggaggggtctgcctcccacgaggtgtctgaatgttccagcaatctgactgctgaggacagacctgagcattcaaagcattccttcgggctgaaaagagagaaagccctggttgaagtggttttccttttacgagtgggtgccagcccccagcccgggcggagggcggtgactcatcctgccctgtttgatgttgaggaggggcccccaccgcccctttgaatgtcgggcctcggggggagccaggatttgacccgtccccactcccagtcccgcctgaggttttacatccccagctccaacgcggcgaccagaaccacagaacctcaacggcgacgatcttggggctcaccagcccagcgcagtgggcatggggggtggtgccaaggtgccacgtgctggagccacaatgccagctattttcggggtctggaggctatttctgtcgtccaggagggccgcttcccaaatagaagtctagaaagcaggccaggtccgagtcatcacaggccgcagccggcgggctcactctgtgggcatgagcgtcccccggctgcccagctgggcaagaccccaaagctgtcccacaggctcctggccgtttgaagggcccaggtcccaggtatccttggggtccaaaggaggacagaggatctgggatgcagaggtactggccaggcgaggcggctcatgcctgtaaccccagcactttcagaggtctaggcgggagggtcgcctgagcctaggagttcgagaccagcctgagcaacatagtgagacctcatctgtaccagaaaattattctaaaaattatggccaggccaggcacggtggctcatgcctgtaatcccagcactttggcaggctgaggtgggcgggccacctgaggtcaggagattgagaccagcctggccaacatggtgaaaccccgtctctactaaaaatacaaaaattaccctggcgtggtggcgtgcgcctggagtcccagccacttgggaggctgaggtgggagaattgcttggacccagggggcggaggttgcagtgagccgagatcacgccactgcactccagcctggctgacagagtgagactctgtctcaaaaaaataaataaataataaaaatgaaaattatggccaggtgtagtggctcactcccgtagtcccagctactcaggtactcccagctgaggcgggagaatcacttgagcccaggaggtggaggctgcattgagctatgatagcaccactgcattccagcctgggggacagagcgagaccctgtctcaaaaacagataacaaaggcacctccgtgaagcgacactgcgatccttctcggatcatcccctcacctctgccacatctaatcctccccctgtgatcgccctctcgccttccaggaaagaaagcaaggagagaaaggtcgctgagtcccacagagacacagttaccggttacgggatgagatccagggccagatggacgtgtccccgtgtagcctgacccaggacaccggacaccccagccccagccctgctggggtgagctaagcggggagtggcagcggcacccccaaaggcatggccaggagagacgggcgtgtagcctgggg

SEQ ID NO: 20319 - DNA, 2300 bp, Homo sapien
gttggaaggcgccacatggatggcaattggttacgcaacacagagactgagctcactgccccacagccccagcttgcgaggtggaccttgtcctgaccctgccaacaggaatacaaagacttactggaactttgcacacgggacagccctggtgactcacgtagcgtgaatgacttaagagcaaattcaggccgggcacagaggcccacgcctgtaatcccggcactttgggaggctgaggtgggaggatcacttgagcccaggagtttgagaccagcctgggccacatagcgagaccctgtctttagaacaaattttaaaaattagccagggtgatgctgcactcctgtaatcttagctactcaggaggctgaggcagcaggatcgcttgcgttcaggagtttgagaccagcctgggcaacccagggagaccccatctgtaaaaaaaagttttaaaaattacccagatgggctggtacgcacctgtagtcccagctactcaggaggctgaggtgggaggatcgcttgagcccaggaggtggaggctgcattgagctgtgattgcacccctgcactcagcctgggcagtgaagcaagacccctgtttcttaaataaataaataaataaatacataataaaataaaaaagaccaagtttagttcccaagggttcctggtttcccagacgtgtgagggtggccaccagctgctgcagtgcccgtcccccgcctgccgcggcccgccctgtcctccctggggtcagcaagcatccagggaccacggtgaactctaggagggagtgggtcagccccacccagggcggattcccagcacaccgtgtgcaggcctgggtcgaagggttctgctggaatcaacccggcatgtttgtttttgctgcagtcccctggggccgtccgggctgcacgcctgcacgtcatccgaggccgccccactgcggtgggttgggaaactcagtcttggagcctgccagcctcacaactcctgctctgggagcacgtgcccgtgccgcatgtgtctgtgtgtgtctgcatgcatctgtgtgtctggttctgtgtgtgtctgtgtgtgtgtctgcatgtctgcgtgtacctgagtgtgagcatgtgtctgtgtgtgtctgtgtgtgtgtctgcatgtctgcgtgtacctgagtgtgagcatgtgtgtgtctgcctgcatgtgcctgtgtctgcatgtgtctgcctttgtgtgtctgtatgtgcctgtgtgtctgtgtatgcctgcgtgtgcctgcgtgtctgcgtgtgcctgcgtgtgcctgtgtctgcgtgtgcctgcgtgtctgcgtgtgcctgcctgtctgcgtgtgcctgcgtgtgtctgcatgtctgtgtgtgcctgcgtgtctgcatgtgcctgcgtgtgcctgcgtgtctgcgtgtgcctgcgtgtgcgtgtgcctgcgtgtctgcgtgtgcctgcctgtctgcgtgtgtctgcgtgtgcctgcgtgtctgcatgtgcctgcgtgtgcctgcgtgtctgcgtgtgcctgtgtgtgcctgcatgtctgtgtgtgcctgcgtgtgcctgcgtgtctgcgtgtgcctgcgtgtctgcgtgtgcctgcgtgtgtctgcgtgtgcctgcctgtctgcgtgtgcctgcgtgtgtctgcatgtctgtgtgtgcctgcgtgtctgcatgtgcctgcgtgtgcctgcgtgtccacacgccctgaggaggcgcccgttctgctttgtacacttccctggagctttccagatcaatcccaaaggatgcccaaaaagactcgagcagggcactgtggctcacacccgtaatcacagcactttgagaggccgaggcaggaggattgcttgaacccagtagttcctggcaacagcaagtccctgtctctacaaaaaaattttaaaaattagctggataggctggtgcaaacctgtggtcctagctactctggaggctgaggtgggaggatagcttgagcccaggaggtccaggctgcagtaagctatgacggtgccactgcactccagcctgggcaatagagcaagaccccatctaaaaaaaaaaaaaagaaagaaagaaaaaaaggaaagaaaaagaaaaaagaaagagagattccaaccagcctttcttccctggttccctgacagctcagagttaaccattgtgcccctaagcctaacagcagctggagctgatagcctttcacagggcctgccagcagccttggagaaaccacgagcccatttaacaggcaggacgctgaggctctgataacaagtgcggtt

SEQ ID NO: 20320 - DNA, 2300 bp, Homo sapien
agcccacagcggtgctgcatgcctttccggtgtcttcgtgccatggtagggagttttaaggagccttcacccgtatctcctgtgcacctggagagtgacccgtcgctggccctttagctctcctctgttgatttactcctcgtttttctccctagagaatcatgagtggcttttaaaatgtaggaagaggaaaccatttaaaaataagtagaaaggaaggcagaaatgtccagaaaaggcaaagccatagggacagaaagggactcgtggtgattggaggctggggacatgaatgtgcaccagagacttgccagggacgtggaaatggacccgatggtcgggtcggggtgaccgcaacctggtgaacttacttaaaaatcttaaaacaaaatttttttttaagagttagggttttggccaggcatggtggctcatgcctgtaatcccagcactttgggaggccgagatgggtggatcacctgaggtcaggagttccagaccagcctgaccaacatggtgaaaccccatctctactaaaaataggaaaatcagccaggcgtggtggcaggtgcctagagtccaagctactcgggaggctgaggtgcgagaatcacttgagcctgggagatggtggttgcagtgagccaagatcatgccactgcgctccagcctgggtgacagagcgaaactccttctaaaaaaaaaaaaaagagagagagagagagaaaagaaagaaagaaagaaaaacagaaaagagttagggtttgctttgttgcccaggctggtcttgaactccgtggctcaagtgatcttcctgctttgacttcccaaagtgccaggattacaggtgcgtaccattgcacccggccctgaagtatctttgagcagtacacttcacttgaattttatggcatgtaatgtgtaccttaaaaatgcatattttagctaagcccagtataaatcattttggtctcatccttagtagtcaatggtcatgagaggtaattcagaaacagatgtactcaaaagtcaagaatatgttcaaatttagcaataaggcaaagactccaaatgtccatcaatgggtgaatggatcagcagaacatcctccatccacaccatggagtgttactcagccatgaaaaggaatgaagctttgacacaggccacagtgtggatgtaccttgaggacgtcacgctcagtaagagatgccagacacaaaaggccacacagcatgtgatcccctttctacaaaaggttcaggacgggccgatccacagaggcagggaggggatgcgtgggtgccgagactgggaggggcatgggaagtgatggttgatgggtttcttcttcttggcataattagaatgttctggaattagtggtgatggttgcaggactctgaatgtactaaatgccattgaattgtgcgttttctttttattttatgatttttttcttctttttggtgccgcagataatactcagaaagaattatgcattttaaatgggtgcactgtatgtcatatgaattacatctcaataacatgatgcatgtatagatagagcattatatatatatatatatatatatatatatatatatatatatatatatatatataaagtgtaggccgggtgcagtggctcacacctgtaatcccagcactttgggaggccaaggcaggtggatcacctgaggtcaggagtttgagactagcctggccaacatggcgaaaccccgtttctactaaaaatacaaaaattagccaggtgtggtgttaggcacctgtaatcccagctacttggggggctgaggtgggaggattgcttgaacgcgggagacggaggttgcagtgagctgagattgcgccactgcactccagcctgggcgacagagcgagactccatctcagaaataataaaataaaataaagtgtagatgcaaaaagtgtagatataaaatatatgtataatatttatttatgaagccaaacataaaaatgtaaaggacttcatattgtacaattccacttacaggaaaattctagaaaaggtgacagatcagaggtcgcctggaggctggggggttgggatcggggcagctctgggagtcgatgacagcgtcccattgagattatgctgatggttgcatagctgtagaaatgaatggcaacccttagaaccatgtgcgcttgaagattagcgtgcccagtgtgcatcgcagggtgtgtaactgcaccccagtgaagctgtgacaccaacagaaaagctcagcccgaaaaaggaggcgcagggc

SEQ ID NO: 20321 - DNA, 2300 bp, Homo sapien
tgctaactacagtcaccctattctgctatcaaacattagaatttattctaatactatatttgatagcagaatacatcctattctgctatcaaacattagaatgtattccttctgtctaactgaatgtttgtactcataactcacctcttttcatttcccccccactcaacctacacaactttccagcctctggtattgatcattctactctctacctccatgagatcaactctctggttcccacgtatcagtgacaacatgccctatttgtcttcctgtgtctggcttatttcactttttcacttaatataatgacctccagtcccatccattttgctgcaaatgacagggttttattctttgttatggccgaatcatattgcattgtgtatttaacactttttttttttttttttgagacagagtctcactctatcgcccaggctggagtgcagtggtgtgatcaaagctcactgcagcctcaacctcctaagctcaagcgatcctcctgctttcgcctccgaagtagctgggactactggtgtgcgccgccaggcctggctaatattttaatttttttgtagagttgcggtctcagtatgttgccaggctggtcttgaactcctgggctcaagcgatcctcccgcttcagcctcccaaagtgctgggaatacagtcgtgagccaccgtgcccttcccaagctctatctagacagtcattcctcttgggggatgccagctggggagagcctggaggagggcaagcagggagatggaggtttctctgtgccctgcagggcaggccactggagtccagaggatgagcagggaggttcttgcagggatgacaggaaccctggggaagtttatcttggattttggccagcagctccaatcccagggctcaggtggggcggcaaggacacacagtgtcagcgcctgatgaaatccctgaggtcacagaatatggtggctccatcttccttccagggctgtgtactgcttttggagacatacaaagtgttttccaatattcccaagggagcttgtggaaaatgaagattccaggcctgtaatccaagcattttgggaggcagaggcaggagaatcacttgagcccaggagttcaagaccagtttgggcaacatagcaagaccccatctctaacaaaaaaaaattagccagggccaggcacggtggctcacgcctgtaatcccagcactatgggaggccaagaaaggtggatcacctgaggtcaggagttggagaccagcctggccaaaacggtgaaaccctgtctctactaataatacaaaaattagctggatgtggtggtgcgtgcctgtggccccagctacccggaaggctgaggtggaaggactgcttgagcctgggacttcaaagctgcagtgagctatgactgcaccactgcagtccagccacggcaattgagtgataccctgtctcaaaaacaaaacgaaaactaaacaaaacacagatttcagggtccagttccctataggattctggttcattccatctgtgttggggctcaggaatttgtggatccagggccatgagttaggaaactgagaaatcttggaaatgatgagacaggcttgggcaaatgaccttaggtttcacctttctgagacccagtttccacctctgtaaaatgtggatagtaatctcgccttctggccttatgcggagggtcccacgagagggagcctataaagtcttcaagaaagcggtgcagcagttatgatcactgacattcttccccagcaaatgagcccccggagctggcatgcaggattcgaaccagctcacctagcgcgggattcgaactcgcgaaactactcgcgccttcctgacgtcacgaagtcaccctggaaagccgctcttcgccccgcccccggccccgcccgcgcccggagccccgccccactctcctgggcgcagcctaccccgctgcctgccccgcgccccgcccccgctccggcctcccgcagccggggctcgcgattggccttgccgggacgccagggcccgccccccgagtgtcggccccgcccccgcagaggggagcgagcgctcgcgggccggggcggagggttcggctgcgcggcggggctgaggcggccgcggggcccgagcgcaggtaagggcgcccgcgaaccgggccaggggaagtgagggcgcggccggcgtcccggagaggggactgggacagctcggattcggctgcggaccgagttgggggtcggagtcggctgaggaggggggctgggtctggg

SEQ ID NO: 20322 - DNA, 2300 bp, Homo sapien
ttggacagagtttcattctcgtcacccaggctggagtgtagtggcacgatctcagctcactgcaagctccgcctcccgggttcaagtgatcctcctgcctcagcctccctagtagttgggattacagactcccgccaccacgcccagctaattttttgtatttttagtagagacagggttttgccatgtgagccaggctggtctcaaacttctggtctcaggtaatatgcccttctcggcctcccaaagtgctgggactacaggcatgagccaccgtgcccggcctgggtatttctttatagcattccaagaatggactaatacagtctcctctgccccaacgccactgggcctgcaaggaaattgtccacgttcacagaaagtccagctgggaggatgtccccagctaatgtgcacagagtgaatctggaaaccaacaccctagaaaaaagccacataaagacatctccaagcagagtcccagacgggtcctgccttgcctcccctgctgcatgtcctcaacccactccctccacctccccaccaccatcccatccttcgcttcctacacaggtcccctcctccactcttcaccccatccctcactttctacacccaccacctcctccacccttcctcccatccctcacttcctccacccatcacctcctccatccttcatcccatccctcacttcctacacccatcgcctcctccacccttcaccccatacctcacttcctacacccatcacctcctccacccttcaccccatacctcacttcctacacccaccacctcctccacccttcatcccattcctcacttcctacacccaccacctcctccacccttcatcccatccctcacttcctacacccatcacctcctccacccttcatcccatccgtcactgtctacaccgatcacctcctccacccttcatcccatccctcacttcctacacccaccacctcctccacccttaatgccatctctcacttcctacacccatcacctcctccacccttcatcccatccatcactgtctacacccatcacctcctccacccttcatcccatccctcacttcctccacgcaccacctcctccacccttcatcccatccctcacttcctacacccgtcacctcctccacccttcatcccattcctcacttcctacacccaccacctcctccacccttcatcccatccctcacttcctacacccgtcacctcctccacccttcatcccatccctcacttcctacacccaccacctcctccacccttcatcccatccctcacttcctacacccgtcacctcctccacccttcatcccatccctcacttcctacacccaccacctcctccacccttcatcccatccctcacttcctacacccgtcacctcctccacccttcatcccattcctcacttcctacacccaccacctcctccacccttcatcccattcctcacttcctacacccaccacctcctccacccttcatcccatccctcacttcctacacccatcacctcctccacccttcatcccatccctcacttcctccacccaccacctcctccacccttcaccccatccctcacttcctacacccatcacctcctccacccttcacaccatccctcacttcctacacccaccacttcctccacccttcatcccatccctcacttcctacacccaccacctcctccacccttcaccccatccctcacttcctacacccgtcacctcctccacccttcatcccatccctcacttcctacacccaccaccttctcaacccttcaccccatccctcacttcctccacccaccacctcctccacccttcatcccatccctcacttcctacacccatcacctcctccacccttcatcccatccctcacttcctacacccatcacctcctccacccttcatcccatccctcacttcctacacccatcacctccttcacccttcaccccatcctgcacctccccacccttcttgatcctttacaggcggtgagctgacaccccacgcccaccacagagacagggcgccatgctggtggggaatgcaggatccacttttttattgcaggaagactatgtctagagcgaaggctacacagaccccacgatgggggagtgggggcacccacatgcggggggagagggggcaggggcggagtcacagcaagcatggcctggcacagtccccagcaccagggatgcccaggcaggatgggccagcagccaggacaggctcgggtcccct

SEQ ID NO: 20323 - DNA, 2300 bp, Homo sapien
ggcccaccatgggggagaagctcctgctgtcctagtttgggtgctcggaagagctcactgccatctgtggcctgggcaccgcgggccatgtgtggagaccccgttcctcagggacagcgaggaggggaacagggcctggcctcgccggctcacgcggcccacagcctggcctgggagctataaatagcagccgcagcgtggagttaccgccctgcccactctcctacgcatgagtcagcctgccccggcctgagctggtgcccggaggagacagggagccggcccgacgccctgccccacgctggtgggtcactcaggagacgaaggcaggcaggcggactgggaaggggcagggctgccgtctgagtgcttgggtgcccagcagccccgtgtaggtgggcgccctgcccatgtgttcccagcaaccctacaggcgggcaacagtgacgtcactcacagatgggggaaccgatgcttgagaaggcacttccctgcaggcagccatgtagagcagaagctgggatttgtctgccctcagggctgtctccatctcctgctgagggcacccccagatgagggtcaggggccgggccatgctctgaggtgctcccgcagggctggggtcagggtgggagggaggtgcacgccaggagcactcaggccgggccatggatgccaggctgagaagctggaccttggcctgggagaagggagccatgggtggcgttagagcaggggaggcccatgttgcagttggagcattgagtggcagagtggaaggagggctggaggaaggggtctggaggccaggagggggagtggggtcaaatcagggagaaatagagctccttgagccccaaagccgcttgaacctcagtgccccagcctcagtggcaacaggagaggggactgagtggtcttggaggcagtgccaagtctccgcagaggcagatgggcccacctcatccagggccatggaaatggtgggtcatggagaaccccaggagctgagggcccaaggggttcacctgctcacaggcctggtgatggggagctcaccaccttccagaccagcctctcacccactgatggctctgactctggagagacccctgtgggtcccagagttggcctctccaccaaggggcgccttcctctgacagccttgcggcctgggactgtcccgcacccacccctgagagcaccttctggcctggtcactagaccccaaagtccagtctcctctgggatctgcccgatgaggccaaaaggaacctcggcctcccggtctccaaaatggaggcggaaccatggtctcttgtggacacacagacgcatcagaaaagccagtgctcccctaagacacctcctgttgggggaacacaaacattttcctaaccgaaaacggcaaacccatccgctgcagagcagcgccagccccctttgctcaccccccacctccctaggcctgactgccatgggctgcctccgcctccacaaaaccagccctacagagcgctgagtccgcttctgcccccatcccgcccctgcccaggcccctgggatgggtgggcctccaggtgcaccccattgacctgaaccctcccgcctctgcccgcttctaaacctgttcattgattgttgattatcgacttactcatttcacaacgcacccctctgattccccgccctgcgtgtgaccgggccccagccggcctcaggggtcccgttctgcaccccctttatccgcatttctgccaaagccctccacccccggctggactctgctcctcccaagccgggctcctggcccccactcggggttccccgggaagcggccccagctcccaccccgagggagggcgcgcgcaggtggctacgtggcagggcgggggtcccggatcctggcgacctctcccaccccgggcgcgggcaggggtcccgcgtggggcggcggtgaccttggccgggcggcgcgccggccccgtgggcgcgggtccccggggcggggcggggcggggcggggcggggcggagcgcggggcccggcgggcggggacggcgcgggcgcgactgcggcggctcgggcgggcggggggcggcggcgccagcggacaccggagcgggcaggagcagcggccgcggcgccgcagggaccagcgggcccaggtaggcggcccggggcggggagggggtccctgcgcagcccccagccggccgtcctccccgccgcgcgtccctcctttgtcccggccccagcctcccgggccttggggccgggcccttccccgcgtggctccg

SEQ ID NO: 20324 - DNA, 2300 bp, Homo sapien
aaaatacttctttctcttaaaagtctttaccaaagctgtgtggccatgtcaacctcgggccgtggggtgtggcaacccacgggcgggagggccaggacctgggtcccggtgagatcggtcaggaccctcctctccctgccgcacacccccagcctgtgaataaggacgggagcatttggctgctgtggccagagtgagggccgcgccgcctgtgcctcaggagccagctgggggccctgaggccccaacgtctaccctactctgttgccaggatctcgccgcccgagccccgagtgtcttgaggcttattagaggttggagtcactgcgatgggacagccgggctccgtccctcctgccacacaaggctgtaccccctgtgagtgggccatgtaccctcaggagtgccctctccttttccctttgctgggtggctcctggagcggggacccctgggccaggacccccgggccaggtgagtgtcacagtttcctgagactcacgagcagggccaggaggcagcttaaagatcagtcctcagctctgcttacacacaccggggtctccagaggaagatggaccccactagcggtggggcaggggccccgcggtgcgatccctcccgtggacacagggacgctgctcccgagagggcaggagcacgggggacgagcagccgggcgtgggctggggcagccctgggctcctggctctgtggcaacctccggaaggcctgagccgtcgtcccggcaaccctgccgggtctggggaggtgagagctggggagggacgcctttcctcggggattttgctctgcctggctcgaagccgctgtggcgccgcggaagggagccgggcatgcccgcctgggctgggtttttccttgatctgacctggagccccggaccccatctctgggccttggcgtcttccagccccatcagggctgtgagggcctctggctgtccccacctcccacctcgtcactcatctttgagtgccaggccccaggtacccttctcccatcccgtgccctgcctcgccaccacgcctccctacacctacccacaaggctgactggggggggctgcacggagaggtgcccatctggcctgtgggcttgggcctggcggggcctcctatccatcagtccatcaatctagtcagatggggagctccagggccagccagtgactgctctgtggggtgtcccggccggtggccctgctgcagccagctcagctcccaggtgccagtcacaggaagggacgacctcgagagggcggtggctgcctggagcattgccatgggggtcccaggaggccggagtagtcacacagcccctgtaagtaacttccactccagggggtcggtacgtaacccggggttccacctctgctcctgagacccccccccaacttccactccagggggttggtacgtaacccggggttcagcctctgctcctgagaccccccaacttccactccagggggtctgtaagtaccctggggttcagcctctgctcctgagaccccccgccaacttccacttcagggggtctgtaagtaacctggggttcagcctctgctcctgagaccccccccaacttccactccaggaggtcggtacgtaacccagggttccacctctgctcctgagaccccccaacttccactccagggggtctgtaagtaacctggggttcagcccctgctcctgagaccccccaacttccactttagggggtctataagtaacccggggttcagcctctgctcctgagaccccccaacttccactccaggaggtccttaccccactgctgttggaagcttggggcctgttctgggaacctgtgtctgaacctcttaccggggatccatctctgaaccctgtgcagcctggccctggccccaggggtataggagcttcgcagtgtcctgaacctgacgtggttctgcccgtccctcccctggcttcaccccacctgggccatttgtcctttatcccaggtgggtgggttgtgaagccactgggtccctgcactggtgggggatgtggcttgagttttcgtgactgccaggggatagagacatccaggccccccacatgggaaggctcagagtccctgtcccccgaatcccgcaggagcccacatggggcggagcaccggctgctccagggatccccatccaccttcgcccatcacagcaggaagcacaaagtggggccctaccctccaccagccatcagctccccagggtggcccgagggacccaagctgtcgacccctgcagg

SEQ ID NO: 20325 - DNA, 2300 bp, Homo sapien
tctcattctttcttcacagaacttagtacaacctatagtttttctagtatgtatgtgtattagttacctactgccatatgacaaattttcccccaaacttagtgccagcaggcattgtggctcatgcctgtaatctcagcactttgggaggctgaggtgggagggtttcctgaatccaggagttcaagactggcctgtgtgacattaggtaaaaaattagctgggcatggtggcacatgctcccagctactcgggaggctgaggtgggaggactgcttgagcccaggaggtcatggctgcagtgagctgtgattgcaccactgcactccagcctgggtgatggggcaggaccctgtctcaaaatacaagcaaacaaacacaaaactaagtggctagaacagcatgtgttatctcagtttctgtgggtgaggaattcagatgcagttcatatgggtcttctgttttcagggtctttgtttttctttctttcttcttcttcttcttctttttttttcttttgagacagggtctcactctgttgcccaggctggagtgtaatggtaatgatttcagctcgctgtcacctctgcctcctgggtccaagtgattctgatgcctcagcctccttagtagctgggactacaggtgcccgccaccatgcctggctaattttggtatttttagtagagatggggttttgccgtgttggccaggctagtctcaaactcctgactttaagtgacctgcctacctcggccttccaaagtgctgggattataggcatgagctaccacatgcagccctgttttagggtgtttcaaaggctgcaattgaagtgaagcagtcatccaaaggctcaactggggcaggaccctcttccatgatcacgttcatggctgttggtagcatttggttccttatggacgcttgtgctgagggtctcattgccttgctgactgttggctggaggacaccctcagttcctttccctctggatctctccagcatcttagcttgctttgtcaagacacgtaggctgagaaggcgagagacaggctctgctggcaaaacagaagtcacaatctctcatagcctaatcgcagaatgacatcccattcatttgccattttctatttgttagaatcaagtcatcaggccaagcgcagtggctcatgcctgtaatcccagcactttgggaggccaaggtaagaggatcacctgaggtcaggagttcaagaccagcctggccaacatggtgaaaccccgtctctactaaaaacacaaaaattagccggcatagtggcacacgcctataatcccagctactcgggaggctgaggcaggagaatcgcttgaacacgggagtcggaagttgcagtgagccaagatcgcgccattgcactccagcctgagtgacaagagcgagactctgtctcaaaaaaaaccttttttttttttttagagatggggtctcactatgctgcccaggctggccttgaactcctggactcaagcgatcctcccgcctcggtctcttaaagtgctgagattacaagtgtgagccactgcgccctgccaagatttggtttttaacttacgcgttacctcctatacttattttttcatggtttgaacatgtaacatctactttcttagcaattttgcagtatgcaatgcattgttacgagctgtagccaccatgatgtacagtcgatctcttggacttactcctcctgcctatcaacagagatttgttgaagggatgaatctgcttcttcagccgtcggtaaggggatcagcagcgaggacgctgagagaggagccgcctccgttggaaatcccttcccatccacctccaagcctctttccaagcgggattcagcaccaggcgcccctggacagctctggaaacccaaccctgccggaaccgttcctcgccaatccgggtttcccgccggggccgcttggtggctgcgcccgccgctcagcgggaggaaacccctttcctgtgccggtaggagaggtggagtcgcatatgagtggcaggtttcgcagccaatagtatggaaagttctgccagcgggtctcggggaggccaatgggcaggggcgtgggcggggcgtggaccagccgcgccgagcggggcctctccgggccgcgtctgtggggtcgagactgcgcggccgttgggcgtgcagcggcgccagtcggcggacgaggggcccccgggaggtaggtgcgggcagagagaggacctggggcggcggggcggggcggcgctgagcggccgggggtctgtt

SEQ ID NO: 20326 - DNA, 2300 bp, Homo sapien
cccgcccacagctaaaggaggagggccgggagtgcgctggagccctctgcgcactcgccgtaaccctcccggtccgttattggtctcggcggtgcgtgggcggagcctcttgctctaccattccagagccgctggggtggctaggacggacggtttccttggaaaccgcgcacgccgctgacgcctctgagcctctgcgcggctcattgcgctgagacttcgcttgggcttcaggctaccgcgttaatgtgtacttgcctcgcttcttatagctgtgtgttgggccagtgttattattgatcgcttactgtatatcccaggcccactttccagcatctgaatccgacgaatcaattaaattaaccagaagttttggtgctttggttgtttttgagacggagtctcgctctgtcgcccaggctggagtgcagtagcagcaatctcggctcactgcaacctccgcctccctggttcaagtaattttcctgcctcagcctttccaggagctgggactacaggcgccagcccccaccccggctaatttttgtatttttagtaaagagggggtttcaccatgttggccaggatggtcttgatctcttgacctcgtgatccgcccgcctcggcctcccaaagtgctgggattacaggtgtgagccaccgcgccgggccaagtttttttttttttttttttttttgtcagaaacaaaagcaagtaaacggattcatgtcaaataacaggtgttgtggaacagtgcagtagcctgacctacatgcagtgttgtgggttaaaacaaaaaacatcttgaaccatctgtcttgaactgttagggcacccagaaaaaacaatgtactacaattaaactggcaaaaaccaaaacaaccgacctcctttcttccctttttttgtttttgttttgttttcttttgctttggaggggctggagggagtctcgctcagtcgcccaggctggagtgcaatggcgcgatctcggctcgctgcaacctctgcctctcgggttcaagcgattctcctgtctcagcgtcccgagtagctgggactacaaatgcccgcaccacgcccggctaatttttgcatttttagtagatacagggtttcaccgtgttggccaggctggtctcgaactcctgacatcaagtgatctgccccctggcctcccaaagtgctgggattacaggcgtgagccaccacggccggcctcacctcctttatttctgcaaaagaaattaaaataatccacgccattaatcgtgcatgtattttgagtaggacgaaaatgaattgggagaacatttctggcaactgtaacttagatggtgatcagttttctgtcgtccttggaaatgtctcatcacatgtcttgagcaacaccaagattaattttacatcggcgttcattttcgctgttccctgtgcctggggtccgtttggactttcctatccttgaaatccaaatgtaaaggatgatctttcctacccatcccatgcgacttagctcccagtgacaatcacactaccttcattttttttttcttagtgtttgctgtgaaatttgtttctctatttatgtactagtttattagtttatagtccgtctaccccaatgcaaaataatgagagtagacactttgctggtttttatggctgctttgcaataaatattgaatgaatattaggcacctgctgtctacaaatggctctatactcacaaacgtctcacactgcatgaaagaatgcatttgtgggtgagtagatgggtgggtgaataaatgaacaaagatagtaagcgggtaacactgactcccattcattgcgcagctgtgacgctctggagtccaggtgtccaaacgcggctgcaccacgtggccggcccagcaccacgtggtcagctcggcgaccggctggagtcagccactgttccaccgtgcaccgcttcattcccgctctagagggcaaaccagacccgatttccggcctccattaggtcgcagaggtcagttgccctaacaaccagctggttcccgcctctacgttgcgtcacttccttccacgcccgcctccatcattaacgcgcctgtgcagaagggaagcaactccgggcgcctttcttttgcgcaggcgtcgcgccctggggccggggccgggcggcaccgcggtgcgcaagcgcaaccgtcggtgggtcggggatcggtcgcctgagaggtgagtgaggggcactgcgctgagcctggtgggtctggggtctgcggctcggggcccacggggccccaaagctcgt

SEQ ID NO: 20327 - DNA, 2300 bp, Homo sapien
aggcgggaaccagctggttgttagggcaactgacctctgcgacctaatggaggccggaaatcgggtctggtttgccctctagagcgggaatgaagcggtgcacggtggaacagtggctgactccagccggtcgccgagctgaccacgtggtgctgggccggccacgtggtgcagccgcgtttggacacctggactccagagcgtcacagctgcgcaatgaatgggagtcagtgttacccgcttactatctttgttcatttattcacccacccatctactcacccacaaatgcattctttcatgcagtgtgagacgtttgtgagtatagagccatttgtagacagcaggtgcctaatattcattcaatatttattgcaaagcagccataaaaaccagcaaagtgtctactctcattattttgcattggggtagacggactataaactaataaactagtacataaatagagaaacaaatttcacagcaaacactaagaaaaaaaaaatgaaggtagtgtgattgtcactgggagctaagtcgcatgggatgggtaggaaagatcatcctttacatttggatttcaaggataggaaagtccaaacggaccccaggcacagggaacagcgaaaatgaacgccgatgtaaaattaatcttggtgttgctcaagacatgtgatgagacatttccaaggacgacagaaaactgatcaccatctaagttacagttgccagaaatgttctcccaattcattttcgtcctactcaaaatacatgcacgattaatggcgtggattattttaatttcttttgcagaaataaaggaggtgaggccggccgtggtggctcacgcctgtaatcccagcactttgggaggccagggggcagatcacttgatgtcaggagttcgagaccagcctggccaacacggtgaaaccctgtatctactaaaaatgcaaaaattagccgggcgtggtgcgggcatttgtagtcccagctactcgggacgctgagacaggagaatcgcttgaacccgagaggcagaggttgcagcgagccgagatcgcgccattgcactccagcctgggcgactgagcgagactccctccagcccctccaaagcaaaagaaaacaaaacaaaaacaaaaaaagggaagaaaggaggtcggttgttttggtttttgccagtttaattgtagtacattgttttttctgggtgccctaacagttcaagacagatggttcaagatgttttttgttttaacccacaacactgcatgtaggtcaggctactgcactgttccacaacacctgttatttgacatgaatccgtttacttgcttttgtttctgacaaaaaaaaaaaaaaaaaaaaaaacttggcccggcgcggtggctcacacctgtaatcccagcactttgggaggccgaggcgggcggatcacgaggtcaagagatcaagaccatcctggccaacatggtgaaaccccctctttactaaaaatacaaaaattagccggggtgggggctggcgcctgtagtcccagctcctggaaaggctgaggcaggaaaattacttgaaccagggaggcggaggttgcagtgagccgagattgctgctactgcactccagcctgggcgacagagcgagactccgtctcaaaaacaaccaaagcaccaaaacttctggttaatttaattgattcgtcggattcagatgctggaaagtgggcctgggatatacagtaagcgatcaataataacactggcccaacacacagctataagaagcgaggcaagtacacattaacgcggtagcctgaagcccaagcgaagtctcagcgcaatgagccgcgcagaggctcagaggcgtcagcggcgtgcgcggtttccaaggaaaccgtccgtcctagccaccccagcggctctggaatggtagagcaagaggctccgcccacgcaccgccgagaccaataacggaccgggagggttacggcgagtgcgcagagggctccagcgcactcccggccctcctcctttagctgtgggcggggctcaggggcgcgtgcgtcctgccctccctgtgcgcgcgccgccccagcatgccccgggagcgcgggcggcgggccccttggtcctcaggcggccgtggcggcggtggcggcggttgggccgaggcaggcggcctcagtggccgaggtggctggacgcgtagcaggtggaaggagggagggagccgcaggcgcagacccacccgccatgaagccccccgcaggtaccgactaccccgctcgccggacccgg

SEQ ID NO: 20328 - DNA, 2300 bp, Homo sapien
cactgcagcctcaacctcccaggctcaagcgatcctcctgcctcagccttctaagtagctgagagcacaagtgtgtgccaccgtgcctggctaatttgtttttttaaactgctccattgagatatgatttgcataacatacagttcacccatttaaaccacacacttcaggctgggtggcggctcacacctgtcatcccagcactttgggaggccgaggtgggcggatgacttgaggtcaggagttcgagaccagcctgaccaacatccagaaaccctgtctctactaaaaatacaaaattatccgggcgtggtggcgcatgcctgtaatttcaactactcgggagactgaggcaggagaatcacttgaacccgggaggcggaggtggcggtgagccgagatcacaccattgcactccagcctgggcaacagcagcgaaactctgtctcaaacaaacaaacaaaaaaaaacccacacacttcagtggtttttaataaatttgcagcattgctcagctgttaccattctttcattttagagcattttcataaccccagagagaaattttatacccttaagtggtcacgctccatctcccctgtccccagccctggcacccacgcgtcccctcctgtctctgtggatgggcctgtcctggatatttcgtagaaatggcaccacatggccgggtgcagtggctcatgcctgtaatccctgcacattgggaggccgaggcagatggatcatgaggtcaggagttcaagaccagcctggccaacatagtgaaaccccatctctactaaaaatacaaaaattacctgggcgtggtggtgggtacctgtaatcccagctactcgggaggccgaggcaggagaatcgcttgaacccaggagttgaaggttgcagtgagccgagactgcaccactgcactccagcttgggcaacagagtgacacttcgtctcaaaaaaaaacaaatggcatcacacactgtgtgacttttgtgtctggcttctttctctgcatgtgacatcatcgggctgcatccacaccgcagcctgttccagagcctcattccttttcatggctgagtcgtgttccactgggcagaggccacatcttgtcagtccattcactcgtggatggaccttttgtcaattgtgaatcgcgctgctgtgagtgcacgtgtgcagattcctgtgtggatgtgtgttcatgtctcctggctggatcctggcactggagtcttgggggtcatgggatgactccattttaaagcttttttttttttctttttttttcttttttgagatggagcctcactctgtcgcccaggctggagtgcagtggtaccatttcaactcgctgcaacctccacctcccgggttcaagctattcccctacctcagcctcccaagtagttggaattacaggcacgcgccaccacgcctggctaatttttgtatttttagtagagatggggtttcaccttgttggccaggctggtctcggactcctgacctcaagtgatctgcctgcctcggcctcccaaagggctgggattacaggcttggccaccacacctggcctaaagcttatgcttttctagccactgacacttcctctactcaacctaaagcacagatgtgctcaggaaattgtaagtagtttatgcatttaaatgtgaccatcggcagctgcagctctctctggaatggaattccgtcagcctctgtttcgtcgtacccagctctgttgggtcctccttggcttggagggctttgagttgaatccttatttttcttcggtctgtaagatctccaaggacacaggcaacagcacctcctttctccatcccagggcccagcctggaggggacggtggcgtgtgcctctagtcccagctacttgggaggctgaggcaggagagagttcacggggggattcagcagacaggcctgggagaggggtccgggcaacacctgccagttgtactggggcctgttctcacacctgtctccctggtctcccctgttttagttcagaggaatatccttgacttcccccagcatgtttccccctccaaggacatccggacagccagcacagaggccgacaagaagctctctgagttcgacgtggagatgagcatgagggaggacgtgtaccagaggatcgtgtggctccaggtgagggggccctgcggggagtgcaaatagcctcccaagtaactaggattacaggcgcccgccaccacacccggctaatttttgtatttttagtagagacggggtttcaacgtg

SEQ ID NO: 20329 - DNA, 2300 bp, Homo sapien
tccacccctactgccctggggtcggggtgagctcccaatcattctttccaccctgaccgccctggggtcggcgtgagctcccgatcgttctttctacccctactgctctggggtccgtgtgagctccggatcattctttccaccctgactcccctggggtcggagtgagctcccgatcattctttccactctgaccgccctggggttgaggtgaaccagtctttgcattgaagctgcaagcctgaggcacggtggccctggcgtctcccgagccatgaggtaggaaccccagagggtttcagtccgggatgctgccgcccccacttctcttgaggctgtcgggcaggggccaggtgggagggtgtggctgccgggcagcggggtgaactgtgtcctgccaggggttttgtgggtggagaagggacagcagggctccagtgagaagctctgggagtaggaattgggtctctctggagggacacacttgaaagtggttgagccgtggggctgcgtgctgagatctcagctctgagcgggaggctctgcctgggggtggttcttcaggaaaagcaaagcaggacctccctctccacgtggggcctccctctccgcccagggcccagcgtgctcagctctcctgctgtttttgtctttgatgggaggcactgcctctaacgctggtttccttgtgcagtggccgggccacccttcccgccaccctcctcccttcacacatgaggttggtgacggcgccctggaagcccacgatgtccgggggttgggctggatttagctttaacctctctggggcaggagatcctgctctgaggatgctggggggtttcctggtggggttagaggcgggacgtgagaaacgtggcaggtggtggccaggctgtgggggagccagggtatttcttgatggggttagatgggggatgtaagaattgcagcgggtggtggccaggctgcagctgctcgctgagggcccccttgtagctttccaggcagaggggaagcccaccccttccctcacacgctgtgtgcaggctgtgggcccatcagtcctgtcaaagccaccctggttctgtccccataggagggctccccgaggactttctgaactccctggagaagatggaggacggcaagttgaaggtcaccctcaagtacccccattacttccccctcctgaagaaatgccacgtgcctgagaccaggaggaaagtggaggaggccttcaactgccggtgcaaggaggtgagaaggcacggccagggggccccagaacagtgggtctggagcttgtggggcccgtctgctccatgtgtgtgaggcacctccaggctttgcacttggatggcctcccaatctccctggccaggcccagtggccagcagaggcctccctgtggggctctgccgtgccctggaggtgtctgtgctgggctccacccagaccctggggccacagctcagggcccagttcatccttcccaagctgagcctcctgctgctgctctgagcatctggccgcgcacacgtctcgtccctcccttatctggagccgcccctcaggtgtgtcagcccagatcattccttttgtcttaaatgatggtgcccggacctgagcctgggtccacaggtgggttgtgactgggctatctcgctgtgactggcgtcagacggccgttcccacagggacacatgtaactgtccacggcgccatggtgtggtcggtcaggtggtctctgcacgtctcccattcgccatctggaacaggcagaggctctaggagtgggcctcttggtcccctgacgacaccaagttggtgcttgtgcggctggcaaaagggggatacacgctgatcactgcaaagggatgggcgggcactgatcactgcaaggggacgggcgggtgcccatcactgcggggggacgggcgggtgcccatcactgcggggggacgggcgggtgcccatcactgcggggggacgggcgggtgcccatcactgcggggggacgggcgggtgcccatcactgcggggggatgggcgggtgcccatcactgcggggggtgggggacgggtgggtaccaatgggggtacaggtgggcaccgatcactgcaaggcaggggggtgctcctcgctgttcagggaccgggaactcagtctgctcagatggggcgtggcctgccctctacatgttggctatgaattcatgttgctgttaagcctaagtaggtggacccgtggactgggcacacctcgacttccccactgcgccttagaaggtcaactg

SEQ ID NO: 20330 - DNA, 2300 bp, Homo sapien
tgccctccccgcagatgagctggcgcagaagctgaagcccctgggggagcaggagcgtgcggtgattctggagctgaagcgtgcggagtgcgagcgccggggcctgcccttcgacggccgcatccgtgcctgggacatgcgctactacatgaaccaggtggaggagacgcgctactgcgtggaccagaacctgctcaaggagtacttccccgtgcaggtggtcacgcacgggctgctgggcatctaccaggagctcctggggctggccttccaccacgaggagggcgccagtgcctggcatgaggacgtgcggctctacaccgcgagggacgcggcctcgggggaggtggtcggcaagttctacctggacctgtacccgcggtgggtgagggcagcgggggcggggggcgcaccccggccctgggtctcctcggagcccggtgtgcccgtctgagatgggaaggaagtcgttgcctgctccatggggcctcggggatgaaccccgagacgtagcacccgtgggcacaccacaggggccgaaaatgcagctgtccccgtttccagtctcactcagccaccccgacagggcgcagctctgcccaggccggagtcctttaggggagggatggcagccggggcctggccgtggttttcatgctgccctgcgccaagccacctctgctgagagggaggtttagaacctcagaggtgcccggcggtctgggttagcagtcaggtgggctgagggatgcggagtcagggactcttgcggtgtctctagtccctgcggggcctgacgctgcctccctccccagggaaggaaagtacgggcacgcggcctgctttggcctgcagcccggctgcctgcggcaggatgggagccgccagatcgccatcgcggccatggtggccaacttcaccaagcccacagccgacgcgccctcgctgctgcagcatgacgaggtggagacctacttccatgagtttggccacgtgatgcaccagctctgctcccaggtgggtgcgggcccgggcaggggcaggggcaggggcaggggcaggggctgcctgtggtcagcgaggcccaagcctggggcttcggcttccggctctctctgcacccgtccggtggctccttcatccaatgccacccaaagatggtgactccctgtcatgcccgtgtcctggggctgccccagcaaaacaccacagaccagggcttacacaaggtgcgtgtatttcctcatggtcctagaggctggagtcggaggtcacagtgtcagcagggttggctccctcgaggtccctccttggcttgtggccgccaccacctccccgcatcctcatgtggtcgtccttctgtgtgggtccccatctcgtcttcttacagggaccccagtcatgccggatcagggcccgcccaacaacctcacttgaccgtagtgacctccttagacatcctgtctctaagtagtcacatcctggccaggcgtggtggtccacgcctgtaatcccagcactttgggaggccgaggtgggtagatcacctgaggtcaggagctcaagaccagcctggccaacatggtgccatcttgttgcaagcatctgtcctagcacacagtcagcaatcgctcctcagaaaggctctgtcctatgaagtcactgagaaccctgagaagtgcatgcagacctgtccctccaaggggaccctggtcacgtgttcgccaactgatcattccagaaccttactgtgtgtgttttgggttcaagacaccttactgctgtacagcgctgacgggttcacgttgaacacatggctggtggctctgtcacccacacctgagcacagcttgcacacacagggtgtccccatgaggcacatcatggcctcctggtgctgaaggagacgagacagtgctctgcacaacgcttggggccttttaaacacaaaatcaccaagagcagaaagatgcaaacaccgtgcccccactagactgagaaaaggacgcttgctcataaaatgagccgaagtgagaagacagagtgcggcccttctgaggaccgtctgctcaggggcgccgcagtgctggcctctggggtttttgtggatcttagtaggcgagtttgaaaacacggagtccaggaatgaggatcgaccgtgtgtccacctttcctggcttccctgccacactgtttgcacagcactcgtagccagcacacgcgtgtgcacatccacacaggtgctcacacaggtgcccacgcacgtgcctgcaggcctgctttgcatgctgctttctgcg

SEQ ID NO: 20331 - DNA, 2300 bp, Homo sapien
ccaaggataactaaggtcagagcaggtgaccaaggataactaaggtcagagcaggtgaccaaggatgactaaggtcagagcaggtgacaagggtgactaagaacagagcaggtgaccaaggataactaaggtcagagcaggtgaccaaggataactaaggtcagagcaggtgaccaaggatgactaaggtcagagcaggtgacaagggtgactaaggtcagagcaggtgaccaaggatgactaaggtcagagcaggtgacaagggtgactaagaacagagcaggtgaccaaggataactaaggtcagagcaggtgacaagggtgactaaggtcagagcaggtgaccaaggataactaaggtcagagcaggtgaccaaggatgactaaggtcagagcaggtgacaagggtgactaagaacagagcaggtgaccaaggataactaaggtcagagcaggtgacaagggtgactaagaacagagcaggtgaccaaggatgactaaggtcagagcaggtgaccaaggataactaaggtcagagcaggtgacaagggtgactaagaacagagcaggtgaccaaggataactaaggtcagagcaggtgacaagggtgactaagaacagagcaggtgaccaaggataactaaggtcagagcaggtgacaaggatgactaaggtcagagcaggtgaccaaggatgactaaggtcagagcaggtgaccaaggatgactaaggtcagagcaggtgacaaggatgactaaggtcagagcaggtgaccaaggatgactaaggtcagagcaggtgaccaagggtgactaaggtcagagcaggtgataggggctaggaggggttgtttactgaaactaggggcaaggaaacgaaaagaacgaggaagttaaagtttaaaatgaagaacaaagaataggtggccgggcgcggtggctcacgcctgtaatcccagcactttgggaggctgaggcaggcggatcacgaggtcaggagatcgagaccatcctggctaacacggtgaaactccgtctctactaaaaatacaaaaaaattagccgggcgtggtggcgggcgcctgtggtcccagctgcttgggaggctgaggcaggagaatggcgtgaacctgggaggcggagcttgcagtgagccgagatcgcgccgctgcactccagcctgggcgacagagcgagactccatctcaaaaaaaaaaaaaaaaagaacaggggagctgaatatacggaaacattggttctttggagaggagctcataactgattgtacttaacaatttacaggctaaaacctttgaagaggaatttgttgtatcctacaacagtatattaattatagtagttttactattttaatttctcataaataacaatcagtagaatattaaataaatatttaaacaataatttaatttggctgggcgtggtggctcacgcctgtaatcccagcactttgggaggccaaggcgggcagatcactggaagtcaggagttcgagaccagcctggccaacatggtgaaaccgcgtcgctaccaaaaatataaaaaattagccgagtgtggttgtgcacgcccgtaatcccagctacttgggagactgaggcaggataatcgcttgaacccgagggggcggaggtttcagtgacctgagatcatgccattgcactccagcctgggcgacaagagcgaaactcagtctcaaaaacaaacaacaattacttaagcaatcattttaataagtatgtaatacattatacgtttatataacttgcttaataaataatagtagttattaatatccaatggcaagccgccgggaaacgacggagctgggatttgaggattggctccgcgaaccccacaacacccggggactccagcgaaccacacggggtggatccaacagccgcaggggcatcgtggtcctgcggagacgccgcccgcccggaggcggcgctgtgacccaggttggagagtcaggagcccagcgccgcgctgcggggcctgctgggacttgtagttcgcaggttcggggtgcgcaggcgcagtgccgagtttacctctgcgcgcgtcggggttggtggcggcggctgcggcgagttcctgaggggcgcctgcggggggcgtccgctccgagcgccgaggagccgagcggaggaggcgtcccagggacacgcaggggaggccggccggcctgcacggggcgctcccgcctcgggggccctgtctggcgcctcagcgcgcgccccgatggtcacctgcgcccacctgggccggcgcgcg

SEQ ID NO: 20332 - DNA, 2300 bp, Homo sapien
caagggtgatcacctgaggtcaggagttcaagaccagcctggccactgtggtgaaaccctgtctctactaaaaatggcgggcacctgtaatcccagctactcaggaggctgaggcaggagacttgcttgaacacgggaggcagaggttgcagggttgcagtgagccaagattgcaccactgcactccagcctgggtgacagagcaagactccgtctcaagaaaaaaaaaaaaaaagcaagaaaagaggtttaatggagtcacagttccacatggctcgggaggcctcaggacacttacaatcacggcagaaggggaagcaggcaccttcttcaaaaggcagcaagagagggaagagagcaggggaaaccttataaaaccatcagatctcatgagaactcactatcacgagaacagcatgggggaactgcccccatgatctcatcacctcccatcaggtacctcccttgacacgtggggattacgattggagattacaattcgaggtgagatttgggtcgggagacagctcaaccatatcacagagcatttgtactctttctgccaaggtaaagagccatcattaaaaaaaaaaatgtttttactgtgataaaaaatgtaggctgggcgtggtggttcatgtctgtaatcccagcacttcaggaggccaaggtgggtggatcacttgaggccaggagtttgagaccagcctgaccaatgtggcaaaaccccatctctactaaaaatacaaaaattagctgggcatggtgatagacgtctgtaatcccagctacttgggaggtcgaggcatgagaatcgcttgaacctgagaggcagaggttgcagtgagccaagatcgtaccactggactccagcctgggcgacagagcgagactctgtctcaaaaaatatatatacagcagtggctcacgcctgtaatcccagcactctgggaggccaaggcggggtagatcacctgagagaccagcttgaccaacatggagaaaccttgtctctactaaaaatacaaaattagccaggcgtggtggcgcatgcctgtaatcccagctactcaggaggctgaggcaggagaatcgcttgaacccaggaggtggaggttgcggtaagctgagatcgtgccactggactccagcctgggcaacaagagcaaaactccctgtcaaaaaaataaaaaaagtatatatacatatatatatgcacacacgtatctatctatatatctctatataaacataaaatgtgcctttttcaccccttttaagtgtgcagttcagtggcactaaatgcattcagcatgtactacagccaccacaactgtccatttccagaacttttatcctcaaccaaaactctgtacccgttaaattctccctccccagcccctccttcagccccttgtaaccatgagtcactctccatctctatggatttgcctaccctggacatttcttttcttttctttttttgagacggagtctcgctctgtcgcccaggctggagtgcagtggcgtgatcttggctcactgcaagctccgcctcctgggttcacgccattctcctgcctcagcctccggagtagctgggactacaggcgcccgccaccatgcccggctaattttttaataattttttgtatttttagtagagatgggatttcactgtgttagccaggatggtctcaatctcctgaccttgtgatctgcccacctcggcctcccagagtgctgggattacaggcaggagtcaccgtgcccggcagacatttcatataaatggaatcatataatatgtggccttttgtgtctggctgatttcactgggtgtgatgttttcagtgttcatttacattgtagcctgtgtcagtgctttgttcatagatgaagaagattccatcgtgtgtatacaacacgctgtgtccatccattcaccagttgatggacgcctgggtttccacctttccgctgttgtgaatcctgttgctgtcagcattggcaaacaagtatctgtttcagtcactgttttcagtgctttgggtcaatactaggagtagaattgctggatcatgcggtaattctatgtttagaatttagctttttcaggaactgccatactggcttttcttttgtttttttgttttgagacagagtctcactttgttgcccaggctggagtgcagtggcactctctcaggtcactgcaacctctgcctccgcagttcaagtgattctcatgcctcagcctcccaagtagctggaattacaagtgtgcaccaccacacctg

SEQ ID NO: 20333 - DNA, 2300 bp, Homo sapien
aacaaaaaaattagctgggtgtggcggggcaggtctgtagtctcacctactcggaaggctgaggtacgataatcacttgaacccgggaggtggagtttacagtgagtcgggatcctgccattgcactccagcctgggtgacagagcaagactgaaaaaaccaaaaatttaaaaaaaaaacacttccctcctaaggttcaatccaattcatttaaacttttgcgtgtttttcttatatcagttaaaatagggattcaatatccttagaaatatagccttttctgttttaaatataacatctaaaaattgtagtaaaatacaaataacaaatatttaccatgttcatcatttttaagtctaaagttcagtggcgttagatacgttcctgttgtgcaatattatagacttccttttttttttttttttttttttgagacggagtcttgctgtgtcccccaggctggagtgcagtggaatgatcttgactcactgcaacctctgcctccctgggttcaagcgattctttttgtttttgttgttgttgtttgtttgtttgtttgtttttgagacggagtctcgctttgtcacccaggctggagtggtggagtgcagtggcgcgatctcggctcactgcaacctctgcctcccgggttcacgccattctcccgcctcagcctcccgagtagctgggactacaggcacccgccaccaggcctggctaatttttttgtattttttagtagagacggggtttcaccgtgttagccaggatggtctcgatctcctgacctcgtgatccgcccgcctcggcctcccaaagtgctgggattacaggcgtgagccaccgtgcccggcctcaagcgattctcttgcctcagcctccctagctgggattacaggtgcgcgccaccacgcccggctaattttgtatttttagtagagacagggttttgccatgttgggcaggctggtcttgaactcctgacctcaggtgatccgcccgcctcggcctcccaaagtgctgggattacaggcgtgagccacagcgcccggccagcttttcaatcttccaaattttggggggatgtacttaaaaaaatgatctgaaaacattttccttagagtttaaaatatgaacttgagagtttttttgttttttaatatggagtctcactctgtcgcccaggctagactgcagtggggcgatctcgggtcactacaacctccacctctcgggttcaagcaattctcctgccccagcatccccagtagctgagattacaggcgcccggcaccacgccgggctgatttctgtatttttagtagagaaagggtttcaccatattggccacgatggtctcaaactcctgaactcagatgatccgtccacctcggtctcccaaagtgctgggattacaggcgtgagccactgcgcccagccaaatgtgagggttttaatgaacatctcatatcttctggttgatttgagcaaagctcctgccccctgccaggctttgggttcggcctcccccagaccgggtctccggattcgcagccccctgggcggggtctccatgtcgcccgcagcgcgatgacgtcacgtctgcgggtcccgcccccacgtaggtctcggcccttcggacccggcgcccagcccccgttcgccctgccaggcccgggccgcccgcttgcatccacctcctgtccggacaaggggtcgcctcgtgaggaaactagtctggagttcccacgcccgtcccggaggaggacgcgggcggggcgcccgaactgcggggagagggcgattccgccccgggctgaaaccagttcgcccagaagccagtgtccccgcagggcgggacagccacgcgtgttcgcaacgctcccgtcactcaccggcagggggtgggccctagggaactacccagtcaggacgggcgggggcggggccgagacaagtatccaatgagggacgcccaatcggaatccggggaactgcccaatttacagcgccaggggacggactggggaattctccaatcagagtcgccgacgttggcagcactgtccaatcagaagcgcggcttcccgagctctgtctaatcaggcccctgggacgggacgcctctgtcctagccgtgagtgccccgcctgcccctagcggtccctggcgtcccggttcctgtcgcgctcacctgcgccggtagcgaagaaatcgccccgggacatggtgagtgtggcgcaggagaggatcccggtgcggggcagcaggaaccggcgaccgcccgagaccgcggcttg

SEQ ID NO: 20334 - DNA, 2300 bp, Homo sapien
attgcaccactacactccagcctggtgactaagcgagactccatctcaaaaaattaaaataaaataaataaataaataaataaataaaagagcccagtgttgtgttggaacaggaattaaaacagattaaagaatgtgtaagcagaaactcagttgtatgtaagaaaacccaattccccctgagaacaagaaagagctggagtcttttaaaaattaactgcctgtttttctgtggctagtgagccttatctctcctcccttcccaggcattgtgaaggccctgtttccctagttgtgcagctgcaagttcactagacagataaactcaagttgcaaaacatgttttgccttgaaaagtaagaaatgatgtaatgcacgtctcaattaattgaataactctctttgtctctcgcttctgtaatatgcttccccctgcacagatctcccccggccccacaaaatgcttcaaaggtaacttaactctttgttcagggctcagtcctttgggtgttaatcggactgggctggtgcagctaaataataaatatcctcctgaaccccatcggtctctctgattccttatcaatctcgctacagtgtcgtttgagaaaagaactgagcaccttgatcactgtcagtagcatctgtaaccccaagggaagggcgggtcttggtgaaaccctgtattgtggctcagcaggagaacgtctggtgggattggtaaggaatatttgcatttaagtggcttccgtgatcacagtatacggaatagcctctgcaaaggtgggcggggaccctataaaatctatttgctctcagccctaccaacaggcttccagggattatgcctccttgattatatgtcatttgcctgtagactattcatctgcctgcacattgagcgctcagctgtggtgtttgagttttcataggtacacagatattcgtgaccttgatttttacttgagaaactgtgaggcaaaatatccccagagtgctttaacctcaaaatattgacctaggatacagttgttgccacagttttttttaagtgtgttttcggtttttttgttttgttttgttttctatgtttttgttgttgttgttgtttttgagacggagtttccctcttgttgcctaggctgagtgcagtggggcaatctcagctcactgcaacctccgccttccaggttcaagcgattcttcccccttagcctccgagtagctgggattacaggcacccaccaccacacccggctaattttttgtatttttagtaaagacagggtttcatcatgttggccacactggtctcaaactcctgacctcaggtgatccacccaccttggcctcccaaagtgctgtgattacaggcatgagccaccgcgcccggctggctagaccattgctaatggctcaagagttcagttctagcaattgtgctgaccctagttagggaatggtaaagctttcgttggtcactcacttgaccccatgggcctccccaggtgtctactggtcaggagagagaggggacctcctccagtgtcatggaatctgacaacagactgaggacagaagaagctgcttttttctacggtggataccccaagggcccaggtttccctctaagtcagtaccactttcatttcaggaaggagaccaccgtggatgggggctgctgcctgcaggacccgagacctgaaaactgaccaatcaggcagctggggtggggcctagagaactgaccaatcaggggagttgaggtggagcatccggatgagaactgtcaatcaggggggttggggcagagcctggagacctgtcaaatcaaaggagctgaggcagggcgtggaaacatgaccaattaggaaagctggggtggggcctgaagaactgcccaatcaggggagctcaggggatagcaagctgaccaaccagaagaggaggggcagagtctaaagaactgtccaatcaggggagttgggatgtgactggtgaactctccaatcagagatgagcagagaagagaaccatccaatcacagccccaggggcggggcgttgctgtcctccctgcagagcacacccggcctgccctgagtgaccacaggtgtccccgtcgtgctcacctgcaccggctgcgaggagcagggagctcctcaaagagctcaggaacggacaggacatggtgagtgcagggcaggagccgagccggagccggagccctgggaggggagggttggaagcggccagaacacgctgaaactcccgggggagccgcccggaacccccatgcag

SEQ ID NO: 20335 - DNA, 2300 bp, Homo sapien
ttttaaattaaatttaattttttttttcagacagtatctcattcttttgcccaggctggagtgcagtggcaggatctcagctcactgcaacctccgcctcccaggttcaagcgattctcctgcctcagcctcctgagtagctgggattacaggcacgcgccaccaggcccagctaatttttgtattttagtagagacagggtttcgccatgttggccaggctggtcttgaactcctgacctcaggtgatccacccacctcagcttcccaaagtgctgggattataggtgtgagccaccacgcctggcctggattttgttttttttttttttttttgagacggagtctccgtctgttgcccaggctggagtgcagtggcgccatctcggctcactgcaagctccgtctcccgggttcagccattcccctgcctcagcctcccgagtagctgggactacaggtgcccgccaccacgcctggctaatttttttgtatttttagtagagatggtttcaccgtgttagccaggatggtctcgatctcctgacctcgtgatccacccgcctcggcctcccaaagtgctgagattacaggcttgggccaccatgcccggccccggatttcttgatctaaagaatgtccgccgggcgcggtagctcacgcctctaattccagcactttgggaggccgaggcaggcggatcacgaggtcaggagttcaagaccagcttggccaacatagtgaaacccccgtctctactaaaaatacaaaaattagccggacgtggtggcaggcgcctgtaatctcagctactcgggaggctgaggcaggagaatcgctttaaccctgaaggcggaggttgcagtgagccgagatcacgccactgcactccagccggggcgacagtgtgagactccgtctcaaaataaaaaaataaataaaacaaaaaacaatgtccaacaaaaaaacaaatccagcgaggccagacaggataggggctccctggggtccgcccattttcgggatcaggtgactcgaggtttggtccttattttagtgcaggctcagatgtcgggggcgagccaaagtgcaggggcctgtgggaaggacaggaggctgggaaacgtttgggtaaaaaaatcaggacactggccgtgcgcggtggctcacgcctgtaatcccagcactttgggaggccgaggcgggccgatcacgaggtcaggagatcgagaccatcctggctaacacggtgaaacctcgtctctactaaaaatacaaaaaaattagccggcgtggtggcgggtgcctgtgtcccagctactcgggaggctgaggtaggagaatggcctgaacccgggaggcggagcttgcagtgagccgagatggcgccactgcactccagcctgggcgacagagcgagactccacctcaaaaaaaaaaaaaaaaaaaaaaaaaaaaatcaggacactgacagcacgtgctccagcacggggcagggcctccatggggtccgcgcccacgcggggcagcgcggtgacgtcacggctgaggaccccgccccacgaagggctcaccccacgcgacccacgccgctcgctcgcccctcccctccacgcagcactccggctgctccgtggggaaactgagtctggacttctcgtgcccgttcgggagaaggacgcgggaggcgcggccgagctgcggggagaggttgggctcaccccgggccagagcgagttcgcgcaaacgggagtgtccaccgctggcgggtcagccactagcgttggctacgcgccggtcactcgggcgacaggaggcggggcggcgcggaagttatcttccaatcaggtgctccgggggcgggtccggaaaactgtccaatcaaggcacggggcggacaccgggaagcggattgcaggtttgcagtagtgtccaatcgaaggccccaggggtgaagggggcgtgtccaaaacgctgtccgctcagagcgttgaaagggcgggggcttagagattgtccaatcagggcgccgcttcctgagctccgaggccccgagggcgggacgtttcgtcctccctgccgcgcgtgccctgcctaccacgagcggcccgggagtacctgtacctttcagctgcgccggccgcgaggccacggagagctcgccttggagagcccaggagcaggggagacatggtgagtgcgaggcaggagcagagccaggggacggtcggagcgacgggaaccggctggaaccagagtccgccgaagtctgcggccgggattggctgagggacgcgcggg

SEQ ID NO: 20336 - DNA, 2300 bp, Homo sapien
tactttttaaaaataataaagcggggggaaacaaaacgtgtcgttcaaatggcgtttttttgtttgtttttgttttgagatggagtctcgctctgtcacccaggcggagtgcagtggtgcgatcttgggtctgcaatccccgcctcccgggctctagtgattctcctgcctcagcctcccaagtagttgggattacaggcatgtgccaccacgcccggctaatttttatatttttagtagagacaagggttttgccatgttggccaggctggtctcgaactcttgacctcaggtgatccacctgcctcagcctcccaaagtgctgggattataggcgtgagccactgcgcccggccctagagaatttcttaaagtaaaaggctgtactgttcctatggtaattgaattcttattttaactcatttgagaaaataatcatagaagtttaaataaatttgaactcgacgtgaaaattctgaatacttttattcagttgagccgcaattcctaaagcctggaacgcgactgctcatctccgaaaagactttccagcttgagacagagtagaagtataaactctatatcgcttgccattttacatacaaacataattgtcgtaattcatgtttttactgtgtcgacctaaataacaggctgtctaaaaacggtggtaacagttcattgcagtgggaatatgcgcggcatagcaaactatgtgcttattcagggaggtaaaggaagacaaaggttgtttttggttttcatttttttgagacgggggtctctgttgcccaggctggagtacaatggtgagatcacagctcactgcagcctcaatccccacgggctcgagcgatcctcctgcttcagcctatcaagtcgttgggaccataggcgcacactcctttattcccagctaatttttgtattttttgtatatatggggttttgccatgttgcccagactgggacaaaggtttataaaggaaaaaaaaaattttaaatgaggattacatcatttttcagaaataattatccttgtctacaaagatcagtaacaagggtcacaccagtctgagtgtccctgtaaaagtattttttgtttaagcctgtggtttttgtagagtctttttcgttattaagcatataaatgtgagacctctctcttcatgaccttacgtggttctgtttgtgggagggctgctttttttttttttgagactcagtttcgctcttgttgcccaggctggagtgcagtgtcctgatcttggctcactgcaatctccgcctcctgggttcaagcgattctcctgcctcagcctccggagtagctgggattacaggcgcccgccaccgtgcccagctaatttttgtatttttaggagagaagtggttttcgccattttggtcaggctggacttgaactcctgacctctgatgatccgccggtctccgcctctcacggtgctgggattaccggcgtgaaccaccgcgcccggccgagagttttaagaacacagggagcgcctggtggggtccggcctcctggggcctcgtcgtctggtctccagatctccaggtctctggaccccaggcgtccgcgcccacgcgggacagcacggtgacgtcacgcacgcgggtcccgcccccacgcaggactccgccccatgggactccgtgcccttcctctcctccccgcacgaggggccgctccgaggggaaactgagtctggagttgccgtgcagtcagggaggaggacgccgcgccctccctggactggagtgagttctcccagatccgcggctgcccggctagagggtcagccacgcgtgttctcgacgagcccgtcactgaggagagaattatccaatcaggacaggcaggggcggggcctagggaactgtccaatcagagacgttaatccgaagcggagccctgcccaatcaagggcgctagggggacggactggagaattctccaatcaggggtgcggagtcgacagcactgtccaatcagagtctccacttcccgagatctgtccaatcagaccccgaggacggtaagccgagttcccctctgccttgcgcgcttccccgcctaccccgagcggctcaggtgtcctgtcgtgctcacctgcgccggtcgctggaccgcggggcgctaaccctggagagcccaggagcgggcgggacatggtgagtgccgggcgggagccgagcccgggcccagggcgaggtggggcggcaggaaccggcttccgcccgagttcgcagccggagaaagctgagggacgcgcggg

SEQ ID NO: 20337 - DNA, 2300 bp, Homo sapien
ttttttttttctgagacagagtcttgctgtgtcaccctggctgaagtgcagtggcacaatctcgactcactgcaacctccgcctcccaggttcaagtgattcttctgcctaagcctccagagtagctgggactacaggtgcctatcaccatgcctggctaatttttgtattttagtagagctggggttttctttttttttttttttttttgagacagagtcttgttctgtcgcccagtctggagtgcagtggcgcaatcttggctcactgcaagctccgcctcccgggttcacgccattctcccgcctcagcctcctcagtagctgggattacaggcacccaccgccacgcccggctaatttttttgtattttttattagagatggggtttcaccgtgttagccaggatggtctcgatctcctgacctcgtgatccacccgcctcggcctcccaaagttctgggattacaggtgtgacccggccaagctggggtttcaccatgttggccaggctggtctcgaacccctgacctcagatgatccacccacctctgcctcccaaagtgctgggattacaggcgtgcaccacagcacctggcccaacgtggtgatttctaagtagggagctgagggagtaaggagccagccggtggctgtctgagagagactgtccctggcagagtgaactgctaatgccagtaccaggtcctgggccaaacagaaagaaacgggctctcactccagaactgcagcttgaccactatatatataatatatatactttatatatattatagctatatatttttttgagatggagtcttgctctgttgctcagactggagtgcagtggcacgatcatagctcactccagactcaacctcctgggcttacgccatcctcctgcctcagcctccccagtagctgagactacaggtgcatgaccaccacacttggctaatttttaaattttttgtagagacgcggtgtcactgtgttgcccaggctggtctccaactcctggcctcaagcaatcctcccacctcagccttccaaaatgctgggatcacaggtgtgagccatggtgacttggcttcatattttgaataggccaaaacaaaactccgaaatccccttactcctatccccacgaccccacacagcaggtttctctcgctctgcagcaacccacttacctctcggaaatcatcccaggcctgttcggagtgcacgcagccccgttagcctccctggctgctcctgtaaccagcccagctctgcctgagaggttccgctattccctccgtctggaatacccaccactctctcccaccccgcgcttgcatccggcaatactgtatcagcctcagggcctctgctgtcccgctttctgctctcagagcctttgtcactgggctggaagagcagttgggaaaattcggtgataaatgcatagcccggggctgggaccatcaaggggacccagtaagttggctccagaaagaggacttgaagcttcgtttgcattgcacgttatttaatattgaggaaaatgtaattagcccgtatctaagaattggggtgacagcgctaaagattgaacccacccacctcccactcctcacctccagccataagccacttccggacaaggctaaaaatgcgtaaaacaatgcaactactcgccacctatccctgcccaagttccagcctctgagcctcaagccccacgccctcctaaatatccccgcccccgctgggaccccaaattgcctatagctctgcaagtccgcccttcccggcagcgggaccgaaagggtaaagcagaggctcccggctcgctgagtgacagcatggccggcggccggggagagccgaccaatcagggagggcgtacgcgacccacgtgcgtaaacggcctcgctattggccggcgccgccagaggcctgccccccccggagcccgaacccacgtgcagctactgcgccttcattgatctgcttcgcggtccaggtggcggctgggtggggcctgggcgggacggggcggggacaaggcgggacgaggcggggcccgatgggtcaaatggcccccggtgggggaaggaggagtttcctcttggcctgaacttggctgacctccgcagcttccgcccggtgagggacgtgagttgccaggcgtgttctagggggctggggggactccaggattcccggccggggaaggggctgcaggggcgtggaggggcaggactgaggcaaggaagaagctgggtgctgcagcagggatggaggtggag

SEQ ID NO: 20338 - DNA, 2300 bp, Homo sapien
tactgagaaactacatttaacttcgggattgacagtggtcagatggcttgatttttgttgttgtttgttcgttttaaataaaacaccagactgggtgaggtggctcacgcctgtaatcccagcactttgggaggctgaggtgggcagatcacctgacgtcaggagttcgagaccagcctggccaacatggagaaaccccatttctactaaaaatacaaaattagctgggcatggtggcgggtgcctgtaatcccagctacttgggagcctgaggcaggagaattgctttaacccaggaggcagaggttacagtgagcagaggtggtgccattgcactccagcctgggcgacagagcaagactgtctcaaaagagaaaaaaaaattaccactgacttgtttctatcaattctccccagcaggtaaccctcagtttcttagtatctttccaaagtttaagcaaattaaaacgtcttcctcacctagggagacctaggtatgctgttttgctgcttgaagcctttttttttttttttttttttgagacaagtctcgctctgtcacccaggctggagtgcggtggcatcatctcgcatctgggctcactgcaagctccgcctcctgggttcaagccattctcctgcctcagcctcccgagtagctgggactacaggcacctgccaccatgcctggctaatttttttttttttttttgtatttttagtagagatggagtttcaccatgttagccaggatggtctcaatctcctgacctcatgatccgcccgcctcggcctcccagagtgctgggattacaggcgtgagccaccgcacccggcctgcttgaagtcatttgaagcaaagtgtggtggtggtcaggttttctttttaaaacatcccaaaaagagtagctggggccaggtgtggtggctcacacctgtaatcccagcactttgggaggccaaggcaggagaatcatcttaggtcaagagttcaagaccagcccggccaacatggtgaaaccctgtctccaccaaaaatacaaaaatcagtctgtgtagtggcacacgcctgtaatccagctacttgggaggctgaggcaggagaattgcttgaacccaggaggcggaggttgcagtgagccgagatcacatcactgcactcctgcctgggccacagcgtgagactgtctcaaaaaaaaaaaaaaaaaaaaaaaaaaaaaaaaaaaaaaagatatatgccaggtgcgataggccggatgcggtggcttaaacctgttatcccagcactttgggaggcacacgtgggaggatagtttgaggccaggaattcaagaccagcctggccaacataatgagactcccatttctacaaaaagtgtatttaaattagctgagcgtggtggtgcatacctgtaaccccagctactcaggaggctgagatgggaggatcacttgagcctgggaggttgagggtgcagtgagctgtaatcgcaccactgcactccagcctgggtgtcagagtgagatcttatctgcaaaaaagtagatgaaggctgggggtggtggcttatgcctataatcccagcactttgggaggctgaggtgggcagatcacctgaggtcaggagttggagaccagcctggccaacatggtgaaaccccatctttactaaaaatacaaaaattagctgggtgtggtggtgtgcacctgtaatcccagctactcaggaggctgaggcaggagaaccacttgaacctgggaggcggaggttgcagtgagccgagattgcaccactgcactccagcttgggtgacagagtgagactctgtctcaaaaaaacaagtagattgatataccttcttctacaggtggggataatcatgctgtaggattgcaaacccttaactgcaacaacatttaactgttttgctgccaacctccttctagataggaaacgtcttacagattgtggagagctgcagccaactccagggtttccagtctgaggaggtgagtttctgggtcttcaaggaggggaggggacaggcttgggtgaaggctcatcctcaaagctctcactgccttgttcctgccgggccaggtctcacctgctgaaccagccagccctgggacgccccagcaggtgaaggacaagaccctgcaggagtcgagctttgaggacatcatggccaccaggtcctccgactggctccggcggcctttgggggaggacaatcagccggagacccagctgttctgggacaaggagccttggttttggcacgacactctgaccgag

SEQ ID NO: 20339 - DNA, 2300 bp, Homo sapien
gtttcttagtatctttccaaagtttaagcaaattaaaacgtcttcctcacctagggagacctaggtatgctgttttgctgcttgaagcctttttttttttttttttttttgagacaagtctcgctctgtcacccaggctggagtgcggtggcatcatctcgcatctgggctcactgcaagctccgcctcctgggttcaagccattctcctgcctcagcctcccgagtagctgggactacaggcacctgccaccatgcctggctaatttttttttttttttttgtatttttagtagagatggagtttcaccatgttagccaggatggtctcaatctcctgacctcatgatccgcccgcctcggcctcccagagtgctgggattacaggcgtgagccaccgcacccggcctgcttgaagtcatttgaagcaaagtgtggtggtggtcaggttttctttttaaaacatcccaaaaagagtagctggggccaggtgtggtggctcacacctgtaatcccagcactttgggaggccaaggcaggagaatcatcttaggtcaagagttcaagaccagcccggccaacatggtgaaaccctgtctccaccaaaaatacaaaaatcagtctgtgtagtggcacacgcctgtaatccagctacttgggaggctgaggcaggagaattgcttgaacccaggaggcggaggttgcagtgagccgagatcacatcactgcactcctgcctgggccacagcgtgagactgtctcaaaaaaaaaaaaaaaaaaaaaaaaaaaaaaaaaaaaaaagatatatgccaggtgcgataggccggatgcggtggcttaaacctgttatcccagcactttgggaggcacacgtgggaggatagtttgaggccaggaattcaagaccagcctggccaacataatgagactcccatttctacaaaaagtgtatttaaattagctgagcgtggtggtgcatacctgtaaccccagctactcaggaggctgagatgggaggatcacttgagcctgggaggttgagggtgcagtgagctgtaatcgcaccactgcactccagcctgggtgtcagagtgagatcttatctgcaaaaaagtagatgaaggctgggggtggtggcttatgcctataatcccagcactttgggaggctgaggtgggcagatcacctgaggtcaggagttggagaccagcctggccaacatggtgaaaccccatctttactaaaaatacaaaaattagctgggtgtggtggtgtgcacctgtaatcccagctactcaggaggctgaggcaggagaaccacttgaacctgggaggcggaggttgcagtgagccgagattgcaccactgcactccagcttgggtgacagagtgagactctgtctcaaaaaaacaagtagattgatataccttcttctacaggtggggataatcatgctgtaggattgcaaacccttaactgcaacaacatttaactgttttgctgccaacctccttctagataggaaacgtcttacagattgtggagagctgcagccaactccagggtttccagtctgaggaggtgagtttctgggtcttcaaggaggggaggggacaggcttgggtgaaggctcatcctcaaagctctcactgccttgttcctgccgggccaggtctcacctgctgaaccagccagccctgggacgccccagcaggtgaaggacaagaccctgcaggagtcgagctttgaggacatcatggccaccaggtcctccgactggctccggcggcctttgggggaggacaatcagccggagacccagctgttctgggacaaggagccttggttttggcacgacactctgaccgagcaactctggcggatttttgccggcgtccacgatgagaaggcaaagcccagagacagacgtgagtgtccctgagggtgagggggaaggggcagccacaggctgcgtctcaggggctgtgcagtgaaccctgctgttctctctgtccccctcctcctctccgttgtcatggtgacagagcaggcaccaggcctggtgagtaaacaacctcagctctatccagaggggtgggcttccgggcaggcggttgggctcccccaggtcagggcactggggttcctgtgggatttgtcttccttccatcctgcccctcgggtcccccgggggggacttgggtgatccaggaggctatactggagtagcccaggacccacagcccagggcttccaggaccctataccctgactctctctctgcaactctgcctggaccc

SEQ ID NO: 20340 - DNA, 2300 bp, Homo sapien
gatgacatgaagccgagataacagagcctgcccctagatggaggtccagctgctgctttcctcagagctctccttggggagggacagctctgggtgacacctccctctctgtgggggctcaaggaggattgcagtgtgtgctaggcactcttccttcacctgggaatatgccgctgtggggtctgcctctccacgagcccatcccggagtttctaattccttgttgttcaagaatctcaacagtggctgggtgctgtggctcatccctgtcatcccagggctttgggaggccaaggcaggacgatcactcgagaacaggagttggagaccagcctgggcaacatagtgagaccttgtctctatgaaaaatttaaaaagttagccgggcatggagtcgtgtgcctgtagtgccagctacttgggaggctcagtcgggaggatcactcgagcatgggaggttgaggctgcagtgagctatgatcgtgccttttgtttgtttttcgttttggagatggagtctcgctctgtcacccagggaggagtgtggtggcgcaatcttggctcactgcaaccactgcctcccaggttcaagagattctcctgcctcagcctcccgggtagtgggtagctgggactacaggcacgtgccaccacgcctggctaattttttgtatttttagtagagacgaggtttcactgtgttagccaggatggtctagatctcctgatctcaggtgatccgcccaccttggcctcctaaagtgctgggattacaggcgtgagccacagcgcctgtctgatcatgttagttttgagagcaagaccctgtattaaaaaaaaaaagaattgcaaatcttgacagcctataactttgtaactttgttgccttttttttgttttgttttttgtttttgtagagttttgcttttgttgcccaggctagagtgcaatggcgtgatctcggctcactgcaacctctgcctcccgggttcaagcaattctcctgccttagcctcccaagtagctggaattacaggcatgcgccaccacgtccagctaattttgtatttttagtagagatggggttttcaccatgttcgccaggctggcctcaaactcctgacctcaagtgatccaccggcctcggcctcccaaagtggtgggattacaggcgtgagccactgcgcctggcctgttgttgttttgagacagagtctttttttttttttttgagatggagtcgctctgtctcccaggctggagtgcagtggcgtgatctcggctcactgcaagctccgtctcccgggttcatgccattctcctgcctcagcctcccaagtagctgggatcacaggcacatgccaccacgcccggctaatctttttttgtatttttagtagagatggggttttaccatgttggccaggctggtctcgaactcctgacctcaggtgatccgcccgactgggcctcccaaagtgctgggattacaggtgtgagacactgcgactggccgcccccaaccccagtttctgatcagatcgttgggccacaagacaccaggtgcctggtggccttcagtcctgccctttctctgcagaatgaccttcccgccagcactcctgcctccaaatcctgtgactcctccccgccccaggacgcttccacccccgggcccagctcggccagtcacctctgccagcttgctgccaagccagcaccttccacggacagcgtcggtgagcaccttgcctgttggtgcctgtctggagcaggcctcgtctctggggagatctaggaaaaggggctggagaggcagaatgctgggattccaggcttggtgttcattgccttggtcctttttgtgacttcaagttagacgctgcctccctctgggcagttcctcattgtgtcagctcggcgggtagggaaactgaggcctggagagtggaagcggcttagtcgggggtttcagcctagtgcactggaaagacaatctttggggccagacagacttgggtttcagaccaggcttgggcattcaccagctgggtgacctcgggcaagtgacccaacctctctgagcctcagtttccccatcagtaatctgaggaatgacagtgctcatcttttctgccttatggtcaggccctgggctggttctggggcccctgaaagaagctggccttggaatctgccctcaaggaactcccaggtggcaaaaagggacaggacccagaccccaaaactcacagccctgtatagtcagggctggtaccaaggcaggtacccaagatggg

SEQ ID NO: 20341 - DNA, 2300 bp, Homo sapien
agcctgtcactcacatcccacaaactcagagagggcagggatctgtctcccttatccacccttacaatccctgtgcctggaaggatgcctgacacgtcataggtgctctgtaaatatctgtgggctggaaaacgatggctttaaatttgataagggctttttttttttttttttgagacaaggtcctgctctgtcacccaggctggagtgcagtgatgtgatctcaactcagtgcagccttgaccttctggggctcaggtatctcccgcctcagccccccaagtagccgggaccacaggtgtgcatcaccatgcctggctaattatttttgtattttttgtagagatacaaaaaacacaaaaatgtttttttgtattgtcgcggtgttgtccacactggtcttgaactcctgggctcaagcgatcctccctcctcagcttcccaaagtgctggagctacaggcatgacccaccacccctggcccattgataagggctcttgtgcccttttgtaagggtacaaaatgggtttttgtaaccctaacccttaggtaccattaggtactcgatcacctaaggacacaagtccaagtgtcatcaaggggcatggatttttctctgttttgttcccagctgtgccccagtgtctacagcagtgtgtggtccacagtatgcatttagtacacgtttgttgattgacttcacaaacctctcctgaggtttctccaaagagaataagaacttcccactccccgggtgggcctgaaggatgctggctggatgtctgtggtctctggtcggggctggagcctttgccgtgggagagacttgagtctgatggcagagctgtggttcttccagttctgagtgggacacggctcctgccttcaagaaacccagtctgagaggggagacagcccagtccactggtgatggcagtaggaacacaattcccatctgtggaagtttgctctgtgtagggagaggctgacagcgttcatgcactatctcatttaagtgcagtgcccagtgcggtggctcccgcccgtaatcccagcactttggaaggccgaagagagaggcttgagtccaggagttcaagaccagcctgggcaacatagtgagacgcccccctactccatctctgcaaaaaattaaaaaattagctgggcgtggtggtgcacacctgtagtcccagctactggagaagctgagggggaaggatcgcttgagcccaggagttcgaggctgcagtgagccatgattgccccactgtactccagcctgggcaacacagggagaccctatctctgcaaaaaattaaaccctaaagatagcgcaccacccctgaccttttgcagagactactgaggcccccagagggcgagggcccggcatgatctgggaagcagtgtttgctgtgagattccctttctggcagggttccctgccagcgcttggcaaggctgcgtcctgctgacccttcaatctcaacccaatgtcacttgctcagaaaagccatttccgactccagactggtccccgctccccgcaagcccccccccccgctcccacggtgggtaacacggtgtgaatttcttcactggtttttcttctcccgcccctccgggagggggtggggaccctgttttaaggcactgggcgcctccccacccggcctcagtttccccaacggcccagggactgaaggaagggggcgggtgcccgggggccggggggggcgcgggcgcggggaggggcggtgcgcgggggtgggcgcggggcgggccgcgggcgcgtgggggcggcggcgccaccttaaggcggctcagcccgcggctcccggccgagccccgccggagggaggcggctccgcgcggggcccgccgcccgcgccgccgccaccgaaacccggccgcggcgcgcccgaccttctgcgccggctgccgcggccgccctcgccgcgctcccgccccggccgctgcccctgcccgccccgctcgccccgcgcaccccaacccggggaggggctcccacgaccccgggcgcgcgcgcttgggggcgcgccagggactccagggtcccttgccccgcgccgcttctccctcctccctctttcttcgggcagcctccccaccaccccacttcagcctcccccactcttgccgcctccatatcatcaagctctggtggcgcctggggggcttttcggatcggcaggatgtacccccagggaaggcacccggtgagtgcggactgcggggagggggcccccagtgtccgggaactcagaccctgacg

SEQ ID NO: 20342 - DNA, 2300 bp, Homo sapien
tggggatggcagaagcaggtaagccacagccaggtccgcagggcccctgtgctgggttggatttaagtaggttaaaggacacctcccccaccaccatcaccagttcttttcctggactgggaggccctcctgcctgctctcttccctccggccatgacgccctcatgggggctttgagaaacgccccacagctcatccttcccgggagggcctgtaggaagctctggtgtcagccacccggactggccaggtggagtgggagaaatggtgtgttttgtcccagctaaagaaaaaaggctgttaggaaggactaagagggagctgaggggtctgcctgggaagtccaggccccccatgaagctagggtccccttgggaagtccagccgggagccgccttgcagccccagaccctctcagcctctttgtacgttctatttgggtctggaaaattttcccctgtggttgagagcttgggctgctgcttggctgtgtgaccttgagccagttcctcaccctctctgggtgtccactgtgtcatctataaaaggagcgtgacaatgacgttgcgggcctcgtcgggaccgtgagaggtgaaggctcgtgagactctcagagctagcgttaccgtgccccctctaacttctgttgttcctataatgttactataatgttgcttatttccccccaaccagatctgcaagggtggtttcatcacccccttcttacagtcaggggccctgatgctctcccctccccgcagcatcacagagagctcaactcttaccaacttccctgcccctcaattcaatgtcctcagcccctatgaaagtttacggcttcattgaccaggcacggtgggtggctcatatctgtaaccccaagcactttgggaggccgaggaaggaggattgcttgagcccaggagtttttgagaccagcctgggcaacatagggagacccccgtctcaatttaaaaaaaaaattattgcttgaccctctgagaattggctgatcttgcccttacaggggacttggagcctcagtttcctcccctggataacggagggtggggggctcccgcccagccgccactaaccaccccatctcccccctgtgcctcctcagcctcaagctcgaatgtgacaagttggccagtgagaagtcagagatgcagcgtcactatgtgatggtaacgtcactccgcccccaggtccagtgttgggggcgggcgacagggccctccacatcccctccaccacgggcagctgctccctcaaccccggccacctcccctgggaagcgcgaggatcggggcctgttctccattcagccggcccctgctgggctgagcctgcctcgctagcctggcagatggccgaggcagtggccgaggtgccaaaccgccgggttgcagaccggccctgccaggtcccccggctgtccttggcagcggaggagggaggagagggaggctcaccggctgtgaaagccaacagccaggaactgacgtgggggagcagccgagtccctccccaccgccaaggtcccagcgtccacacgcttaacccctttgggcccgagctcaaagaagaagcctgtgggagggggtctgagccctacccatttcggggggctgatgtgtgacactgcattgctgctgccagaaccacttgctcggttttgtaactgccaggtgacgatttctgcatcaaaaatcccctcccttacccacccttggcctggccctcgagcagcgatgctggggtctcagcccagtacccaaatctcccagactgtgggggaggcagagccagaccctgaccctcccagccagaagaatagggctggggtcagagagagggacctaggacctgcctgaggaagactatatggagaaatggggcacacagctggggtcttgcaggatgagtaggagttcaccagacagagacagagaaactacgtgaaggcctgggaatgaacttggttttcccccaggggtgacagggagccatgggagggtttagagcaggggaggggcagggtgagatctggggcttggggtgggggtagctgctggccccagagccagcaggctttgtttacccctcactgtttatacctaggcaggcaaacttccctggcgtctgggcccacccgcagacaagacatagaaagatacaagattaggagccctggaatgcgtgttctcgcggtgcacatggagtgggggaggagccaggccagggctagggacctaaagtgcccccagtctccatccgcagccccagcggccccc

SEQ ID NO: 20343 - DNA, 2300 bp, Homo sapien
ccactgcactccagcctgggccacacagtgagactccacctcaaaaaaaaaatttttttttaataaaaatattaaaacactgctttaaagattattaatcttgatcactgaaggctatcacccttacctgccaaggtaaggagcctggggttccaagtctattttacagatgggaacacccaaggcccaaatcaattgcattcattcaagggagcaggctgcctagtggatgacgatgatgaagagactgtgtttcgcacctgccaaagggggaccttaatgtcatagccttatttcagtagcctctttgggacctgttctctgcgtggcagagagagggatcctttaataaccgccaccaggtcccatccctcctcttcccacggctctccaggattcccacctcactcagagcaaaagcccaagtccagggccaggcgcagtggctcacacctgtaatccctgcactctgggaggtggaggcgggaggatcacctgatgtcaggatttcaagaccagtctggccaatatggtgaaacctgtctctactaaatatacaaaaattagccaggcgtggtgatgcgcacctgtaatcccagctactcaggaggcagaggcaggagaatcacttgaatccgggtggcagaggctgcagtcagccaacatcacatcactgcactccagcctgggcaacagagtgagactccatctcaaaaacaaacaaacagctgatcacggtggctcacgcctgtaatcccagcactttgggaggccgaggcgggcagatcatctgaggtcgggagttcaagaccagcctgaccaacatggagaaaccccgtctctactaaaactccaaaattagcggggcgtggtggcacgtgcctgtaatccagctactcgggaggctgaggcaggaatcacttgaacccaggatgcggtgagctgagattgtgccattgtactccagcctgggcaacaagagcgaaactccatctcaaaaaacaaaccaaccaaccaccaggtcccgtccctcctcctcccacagccttccagggctcctacctcactcagagcaaaatcccaagtcctccccaagacccacaagtccttgctggactggcctgcttcaccagctacagagttagcagggcccagtgcaaaagaaaactcaaaggccccttgttcaaaaatgattagaaatctcaaaatgcagcagtaaatattaacccaagcacaagccctgctgtggggtgggggggccctggacaaaagcacgaagcccccggccctgcctccctccggccttcctgacctccccccgggcactctgctgccaggcacagtcctgccccagggcctttgcacctgttggtcctgcctctgactacctctgtaccccatccccctgttctccctccttcttcaggtcgctttaggggtggaggaagccgtctctgatcctccctcccacctctttaactttgcaccttcctaccctgccattctcccggctggtttttctgcagaactgtccccaccatctgacctgccaggaattcagcttgtgaatttgtctctgtctgtctccaggcaccaccaccagggcagggacccacccccgccccgccccaccccagggccctggagcagcggggcctggcacacagtaggcgttctataaatgtgtcacaagaatggcttccctcaggaaggcggcattaccgctgcctttctgcagaaaaggaaactaaggctcagcaagaaccaccgcccagccagagccaaggtcacagagcacgtccgtggcacgcgtccaggtcgtgccacagcagggccggcggcttcgacgcgggcagccgggtcccttttctttgacagatggggaaaccgaggcccggccggctgccgggtaggagagggtggcgggggccgctgcccggggcgggggcgggccgggcccaaggtcaccgcggcgggcgggccacggggaggcgggccggcgtggggatccgcaggcctccccgggcgcgcgcgtcccccccctcggcggcgcgcacggggcacgggcggcggcaggtggagccgaagcctccgcagcagccgagccgcggccactgccggcgtcgccgccattagacaatagcggtggggccggggagcggggaggcgggcggcggggaggggcggggaggggcgccgggcgcgcaggaagcggggcccggggcgcgccggggccgggcgcgcggggagggggcgcaggaagcgggcgaggccgggcgcgggaggcggcggcggccccg

SEQ ID NO: 20344 - DNA, 2300 bp, Homo sapien
ctcagcctccaagtagctggaattagaggcgcccgccaaaacaccccggtaatttttgtatttgtagtagtgacgaggtttcaccatgttggccaggctggtctcgaactcctgagcttgtgatccactggcctcggcttcccaaagtgctgggactacaggcatgagccactgctcccggcttacaaaaaatgttaaaattagctgggcatggtggtgcactcctgtagtcccagctactcaggatgctgaggtcggaggatcacttgagcccaggagtgggaggctgcagtgagctatgattgcaccactgcactctagcctatgcaacagaggactgtgtctgaaaaaatttttttaggccgggtgtggtggctcgcgcctgtaatcccaggactttgggaggccgaggcaggcagatcacgaggtcaggagatcgagaccatcctggctaacacagtgaaactccgtctctactaaaaatacaaaaaattagccgggcgtggtggtgggcgcctgtagccccagctactcgggaggctgaggcaggagaatggcataaacccgggaggtggagcttgcagtgagccgagatggcaccactgcactccagcctgggccacacagtgagactccacctcaaaaaaaaaatttttttttaataaaaatattaaaacactgctttaaagattattaatcttgatcactgaaggctatcacccttacctgccaaggtaaggagcctggggttccaagtctattttacagatgggaacacccaaggcccaaatcaattgcattcattcaagggagcaggctgcctagtggatgacgatgatgaagagactgtgtttcgcacctgccaaagggggaccttaatgtcatagccttatttcagtagcctctttgggacctgttctctgcgtggcagagagagggatcctttaataaccgccaccaggtcccatccctcctcttcccacggctctccaggattcccacctcactcagagcaaaagcccaagtccagggccaggcgcagtggctcacacctgtaatccctgcactctgggaggtggaggcgggaggatcacctgatgtcaggatttcaagaccagtctggccaatatggtgaaacctgtctctactaaatatacaaaaattagccaggcgtggtgatgcgcacctgtaatcccagctactcaggaggcagaggcaggagaatcacttgaatccgggtggcagaggctgcagtcagccaacatcacatcactgcactccagcctgggcaacagagtgagactccatctcaaaaacaaacaaacagctgatcacggtggctcacgcctgtaatcccagcactttgggaggccgaggcgggcagatcatctgaggtcgggagttcaagaccagcctgaccaacatggagaaaccccgtctctactaaaactccaaaattagcggggcgtggtggcacgtgcctgtaatccagctactcgggaggctgaggcaggaatcacttgaacccaggatgcggtgagctgagattgtgccattgtactccagcctgggcaacaagagcgaaactccatctcaaaaaacaaaccaaccaaccaccaggtcccgtccctcctcctcccacagccttccagggctcctacctcactcagagcaaaatcccaagtcctccccaagacccacaagtccttgctggactggcctgcttcaccagctacagagttagcagggcccagtgcaaaagaaaactcaaaggccccttgttcaaaaatgattagaaatctcaaaatgcagcagtaaatattaacccaagcacaagccctgctgtggggtgggggggccctggacaaaagcacgaagcccccggccctgcctccctccggccttcctgacctccccccgggcactctgctgccaggcacagtcctgccccagggcctttgcacctgttggtcctgcctctgactacctctgtaccccatccccctgttctccctccttcttcaggtcgctttaggggtggaggaagccgtctctgatcctccctcccacctctttaactttgcaccttcctaccctgccattctcccggctggtttttctgcagaactgtccccaccatctgacctgccaggaattcagcttgtgaatttgtctctgtctgtctccaggcaccaccaccagggcagggacccacccccgccccgccccaccccagggccctggagcagcggggcctggcacacagtaggcgttctataaatgtgtcacaagaatggctt

SEQ ID NO: 20345 - DNA, 2300 bp, Homo sapien
agtagccccatctccgctcactgcaacatctgcctcctgggctcaagtgatcctctcagcctcccgagtagctgggattacaggcatgtgccaccacacccatctaattttttgtatttttagtagagatggggtttcgccatgttatctaggctggtctcgaactcctgagctcaagcggtccacctgccttggcctcccaagtactgggattaccggcaggagctgccgcacctggccagaacatacaatttcaagttgtggctcaagagaaggtacctggcttggtctgaggagtcaggagaagtctccctgaggagctgacgtctgaattgaaacggagaggatgctcaggggttggccaaggaggccagagagggaaaagggttttcagtagtcagcaaggtggtgggaacacacgtttttataaattctggtggccacttccatttcatctgcaaagtaaggataaagatatggctgggtgaggtggctcacatctataatcccagcgctttgggaggccgaggagggcagatcactagaggccaggagtttgagaccagcctggccaacgtggcgaaacccgctctctactaaaaatacaaaattagccaggcatggtggcgcgcctgtaatcccagctacttgggagggtgaggcaggagaatcactagagcctgtgaggcagagggtgcaatgaacctagatcacgcccctgcactccagcctgggcgacagagcaagactccatctcaaaaaaagaagaagaaaaaaaagatatcccttgggtagggttagcttaacgggcttacagcagtgcctggtatcctgtaggcatttcatgaatgcgtatacctggcctggaatggtgcaggcactgcagtaaggcctgattgacacctgatggacagcaggcactccattaatctctggtccgtgcctggcatatagaatgtgtcccattaatgcctgatacacagtaggtgtcccattaacgctttttaatttttttttttgagacagagtctcgctctgtcgcccaggctggagtgcagtggcatgatctcagctcactgcaagttccgtctcccgggttcacgccattctcctgcctcagcctcccgagtagctgggactacaggcgcccgccaccacgcccggctaattttttgtatttttagtagagacggggtttcaccgtgtcagccaggatagtctcgatctcctgacctcgtgatccacccgcctcggcctcccaaagtgctgggattacaggcgtgagccaccgcgcccggccctctttttttttttttttctttggagacggagtttcgttcttgttgcccaggctggagtgcaatggcgtgatctcggctcactgcaacctccgcctcctgggttcaagtgattctcctgcctcagcctcccgagtagctgggattacgggcgtgcaccaccacgccgggctaattttgtagttttagtagagacggcgtttctccctgttggtcaggctggtctcgaactccagacctcaggtgatccgcccgcctcggccttccaaagtgctgggattacaggcgtgagccaccgcgcccgacctccattaacgctttttaatggatgagtgaaggttcctgtcaggcaatgtcagggcgcttcccgggggcagcgactgctgcccaggcacctggagacccagagagcgcagcggccgcgtgcgcgcctccgccaccgcgcctgggccgagccgagcgggaccgagcggggccgaacggagccgagcggagccgagcctggccgggccgagtccgccacattcccacaatcccgggcggccccgccccggctcccggctgcgcgtcccccttcccacgtcggcgcaaccaaacccgcgggccccccgccctcgccccgccccgcccctttcgcgcccgccgacgccccgcccaggccgctagtcccgcccccatggtgggcgcgcttggccgccggcccctcccattggccgcaccgtctgcccgtcgcgggctgcgctcccagcctgctaggttgtccggcgctgtcgctcggttgcggcggctgcggttggcggtggctgcggcggcggcgcgggctgagtgcggccgcgcgggagtccgcggctggcgcggcccgagcggggacccggcggctcgccaggcggcggccgaggcggggcgggccggcccggggccgagggccggtggccgaggccggagggccgcggcgggcggcggccgaggcggctccggccagggccgggccgggggccgggg

SEQ ID NO: 20346 - DNA, 2300 bp, Homo sapien
gacctggagaacatcatcttccggtaccgcccgggccacagcaggcggggagggggcactgagaggctcatttgcccggtgtgccggctcatgcctgcgcacccagtgctttgggaggccaaggcgggaggatcgcctgagtccaggagtttgagaccaccctgggcaacatagccagacctcatatctaaaaaaaattttaaaaattagctgggcgtggttgtgtgcacctgtggtcccagctactcaggaggctgaggcaggaggatcgctcaagcccaggaggttgaggctgaagtgagccatgatggcaccactggactccagcctgggcgacagagggagaccctgtttcgtcttattaaacaaaagaaagcccattggtcttcatcctcagtgtgtgtttgaccaggtcaggggataagatttatctctaagtatgtgtgagccagggccacacagggaaggagctgtgggggtgtggggggcgtggccacatccatccagaccggcagccgaagagacctggcagggaggacatttgacagggcctccaggacgggccgggggcctggttggagccagcatggggctggggtctggagtgctggccggagcagggggtgccgcatggtgcgggaggggtcatagggactgaggctgccaggggagggggctcatggggaccgaggctgtgaggggaggaggggtcatagggaccgaggctgtgaggggagggggggggtcacggggaccgaggctgtgagtggaggaggggtcatagggactgagtggggaggaggggtcatagggactgaggctgtgaggggaggaggggtcataggggccgaggctgtcagggaagaggggtcatggggaccgaggctgtgaggggaggaggggtcgtggggaccgaggctttgaggggaggaggggtcatagggactgagtggggaggagggctccaggctggggtggaggagctgggtggtgtggggtggattctgttcttcacgggctgcccctgcggatcctgctgggcctccggggctccaggtccactgtggctgggggccggccagcagagccgggttctccctggggaccctcagtgggtcctgtgtctggtaggctgctcagctggctggactctgctgtccctgggaacgtggaccctgcctgcctgtctcctggccccatataacatctccagcgctgaggtcccggctttatgcgtgcctgtcctgggctgctggtgtcgggcgtgagactcccaccgcaggccttattcccgcccagtgctggaggccagaaggctgagatgcaggtgtgggccgggccaggtccttctgaggctgaggggatctgcccaggcctcactcggctcctagtggcggccgcatccttggcatccttggcatccttggcatccttggcttgtggccgggttgcctcatccctgcccccatcctcatgcagcgtcctccccgcctgcgcctttgcctctgttctcttataacctgtccttggccagggccaccctacctctgtgtgacgttatcctaaccagtgacatccgcacagaccctgtttccagatcagagccgtccccgggttctggtgttcgtgcgtgtggggcgctagacggctctgtcctggagggcctcgcggtggctccggttgcgggtgccttctcctgcagtgcaagctcgccctggcactggccctcatgagggaatgacgcctccctgccagggtgtccccacccagctggtgcactgccgaggccattgtgagggttccgggaagtctgtggggttttcctcgagagccctgccttgagacccaccccagggctgggggtgccaccccctgccatctgcctgttctccccacccgtcctcccagctcggcctcccagcgcaggcagggaggatgcggcgtgaagatggaggcagggatggagcaatgtggccacaagccaaggaatgccaagctctgggatggttcccggggacccgagcaggcgctgggccctcagaagctgcggtgtcctctctggacatgggcgatggtgtatattgttacgagaattcaagtttttcttcttttttattcacacggggcccatgaccccaggatacagctgaggcgagccaggcataggccaggttgtggcatgaatgtcccctcacagccccacgctggcctcttaacagcgcaggcctctgtgtcctctgtcagaaatgtcctgtcccctccctgagctgagctcaggctgggtgtgtcaccccctctcc

SEQ ID NO: 20347 - DNA, 2300 bp, Homo sapien
ggggagggggctgatatgggagaggggctcatacaggccgggagctctaagggagggcgtctgatgggaggtgtcatgtatgggagtggagtctcagggaagggagatctcgtatgaggggggcctgtacgggaatgagttctccgacgcgggtgtctcatacccgtgggagatctgttaatgcagggactccttatacaggaggggtctcgggtgggaggggtctcgggcagggggatctcgggtgggaggagtcttgtacaaggagggcaccatgggagggggagtcttgtattggtgggtcttgtacgggagggagttgtcgtatgggggtgtcctgtataggtgatcccatatgggaggggtctcacaggaagggttcacgcacactgccagcgcagccccgtggggaccttggtggtagtccctgcatcctcctctgtgccctactgcccccaccctcggacccgtccctccctacgtggcccctgccccacggggtgtgtcagggcagctgagcactgagggtcttcacatgcccagccctctctgggcctggggatggcggccaggggagggtgttgtgtgccctcgtctgtgtggtcagtggctgccgttagtgctgtcaccactcagagctgtccctgccaggcacagtgaggccctgggcagctctggcgccctcatttccaccccggatctgtgctcctcccgtgagtctcgggtgtcatcttcgggagggcccctcagggtgccctgcctctggatgtgcagcgagagggaggggtctggcacacggtatagcctcggccgctggctgcaggcgcagggccctgctgtccctgggcaggggagtggcggggggcgctgcacctgctccagccgcacgtggcccctgcccagcagcctgtcctgtgggctcagagagccctggtggggggaggccaagggactggggcatagacccctgtcccaccagtccccagagcagccccttgaacacccccaggggcctttccaccggggcaggcaggagttactgggcgggtcgcctgcattgtccagggtggtggaggggcaggggtggccggtgggaagcagcgcccctgctggagcccctggatgtctctgaggcctggctgcagcaggggcaccgtgggtgggtgggggccactgttcctgctctgtaggctctgtgcccagccctgggggcctctcctctcaccctgggccttcgcagggcagccatgccagaggcctgccctggaaggctgtggctgtggagctgagtggatagaggccggcagagggctgagcagagggagcagcggtgggtgcagagccccaggttggaggcctgggccgtgacagtagtgccctggggctacagtgggattggcaccgcagctcacctggggagggaggggagctgcggcccgtcaggcatgcagtgggctgggggtcgagctgggtgggccgtgggccttactcgctcatcccctgggagtgacaaaggggcccacgagtcccttgccctgggccgggctggggcacagcctcaccctctgccctcccccaggtccccagcgggacgcccaggcggcgcgggagttcatcctgaagatgttcgtggacctgaaccccgacagcgacaagatcatctactcacacttcacgtgtgccaccgacacggagaacatccgcttcgtgttcgcggccgtgaaggacaccatcctgcagctcaacctcaaggagtacaacctggtctgagcgcccaggcccagggagacgggatggagacacggggcaggaccttccttccacggagcctgcggctgccgggcgggtggcgctgccgagtccgggccggggcctctgcccgcgggaggagatttttttttttcatatttttaacaaatggtttttatttcacagttatcaggggatgtacatctctccctccgtacacttcgcgcaccttctcaccttttgtcaacggcaaaggcagcctttttctggccttgacttatggctcgcttttttctaaaaaaaaaaaaaaaagaaagaaagaaaaaaagcaacgaaacataaaacacacaagcgccccgtgcccccagtgactctgggcctcacagagcccccgccagccagcatggggccccgccctgcagccagtcacgcgcccccacaccgcagccccctgtggctgtccttccaaccccacgtgctttttctttctcctgcccgcttcttttcttcatcacaaaaggcgtggagactcggagacggacgtttttccc

SEQ ID NO: 20348 - DNA, 2300 bp, Homo sapien
gggactggggcatagacccctgtcccaccagtccccagagcagccccttgaacacccccaggggcctttccaccggggcaggcaggagttactgggcgggtcgcctgcattgtccagggtggtggaggggcaggggtggccggtgggaagcagcgcccctgctggagcccctggatgtctctgaggcctggctgcagcaggggcaccgtgggtgggtgggggccactgttcctgctctgtaggctctgtgcccagccctgggggcctctcctctcaccctgggccttcgcagggcagccatgccagaggcctgccctggaaggctgtggctgtggagctgagtggatagaggccggcagagggctgagcagagggagcagcggtgggtgcagagccccaggttggaggcctgggccgtgacagtagtgccctggggctacagtgggattggcaccgcagctcacctggggagggaggggagctgcggcccgtcaggcatgcagtgggctgggggtcgagctgggtgggccgtgggccttactcgctcatcccctgggagtgacaaaggggcccacgagtcccttgccctgggccgggctggggcacagcctcaccctctgccctcccccaggtccccagcgggacgcccaggcggcgcgggagttcatcctgaagatgttcgtggacctgaaccccgacagcgacaagatcatctactcacacttcacgtgtgccaccgacacggagaacatccgcttcgtgttcgcggccgtgaaggacaccatcctgcagctcaacctcaaggagtacaacctggtctgagcgcccaggcccagggagacgggatggagacacggggcaggaccttccttccacggagcctgcggctgccgggcgggtggcgctgccgagtccgggccggggcctctgcccgcgggaggagatttttttttttcatatttttaacaaatggtttttatttcacagttatcaggggatgtacatctctccctccgtacacttcgcgcaccttctcaccttttgtcaacggcaaaggcagcctttttctggccttgacttatggctcgcttttttctaaaaaaaaaaaaaaaagaaagaaagaaaaaaagcaacgaaacataaaacacacaagcgccccgtgcccccagtgactctgggcctcacagagcccccgccagccagcatggggccccgccctgcagccagtcacgcgcccccacaccgcagccccctgtggctgtccttccaaccccacgtgctttttctttctcctgcccgcttcttttcttcatcacaaaaggcgtggagactcggagacggacgtttttccccttttttaagttattgacgcccagcgcgcctcgcctcttcacccatcaacgctgtgctttgcccactggactcctgaagagggggtggggggctccctcggtcgcccaccctgggaagtgcctaaccttttattttattttatttttttgaggaaaaagaacgcctgactcacaggttgaagaaacaccctgggccctctctcatggccgggttccccgtccctctgcagaggctgggaagggtccccgggctggagccacgggggcttctctgggctgtgcctccggggccaacactggctgcttggggctgcccggggactccagagggctgcacggccaccctgccctggctagagcgcaccccaccggagcccacgtgggctgggcggctggagggatggtcccccggtgacactgggagaaaggccacttggatgggggcgtttctgttttgttccgctttgtgatgtcaccaatttggaaacagcgagggtgggtggggacttttacagaatattctcaggtgtgtacccgagaggcagagagagggacgtggccggcagctctgtgcgtggccttgtcccaagcacttgcgcccgcccccgagcgccgcccccggggagcgggaagccagcactcgcactttggccaggggcgcgtggaaggtggtggcaggcaccggcctgggcagcttccaggcctggctggccacgaccacggcccgagggggagcccgccaggccacgccgcactgagccacagccccgggggccgcctcccggggccccttgaggcactgaggcaccgagactggttctccccgagagactcggaaggtggggaacgaggggactgtgtttggggaggtggctttttcgtctgctgttgactgaacactacagcgccctgtggttccgggcttcgcacagctgtcccagggatgga

SEQ ID NO: 20349 - DNA, 2300 bp, Homo sapien
ggtcggcactcacgagaaatcgttggcaggtgagattcaccaaggtaaaaacacacaccccacatgcccacgtggccccacacgtggcaagggtgggggttggctgtccttgcccctgggtgccactggcacgagaaccactgcctgggactctcctggggcaggcacccctgccctgggcctgcaacacctacctctgcttttttggggggcaggggatcaggcactcagacccagaggatccaggccacgacgttttggcggtcccagcccggctctgggatgcttggcacgccccctccctgggaaggcctaatacttagccccgcagcgccccggcctgcgtgctgggcgactccaccctcaggccacggccaggtcaccttgtgcaatctaggccctcagagatgccacaagcacaggccccccagagggctccgctgctggaaaaggttgtagcggccctgccaggggtggccccatctgctcccccagggcaccgccgggccccagcactcgccatggggggcttctggcaccaaccctcttaggtagacacctggcacaaaaaaaggacgcttccgggtgagacagaagtggtgtggggaagccggggggggggtatcccgccagccccgtctccccatggggctgatcaccagaaatgtagctgccctgacctggtctcccctgacccttccacggggctccccgctcttctgcccccagaagccagcagacagccctgcggacgaggaggccagggcaggcctgacagtggcgggcaggcaggcgggaactgctggttggagtggtcgtattttggggctgtttcttttgtcatctgtcgaggccagaagcagccgtgcagggtcccggtgtggcggcgggcgaaggcagcacaggcgatccatccctgggacagctgtgcgaagcccggaaccacagggcgctgtagtgttcagtcaacagcagacgaaaaagccacctccccaaacacagtcccctcgttccccaccttccgagtctctcggggagaaccagtctcggtgcctcagtgcctcaaggggccccgggaggcggcccccggggctgtggctcagtgcggcgtggcctggcgggctccccctcgggccgtggtcgtggccagccaggcctggaagctgcccaggccggtgcctgccaccaccttccacgcgcccctggccaaagtgcgagtgctggcttcccgctccccgggggcggcgctcgggggcgggcgcaagtgcttgggacaaggccacgcacagagctgccggccacgtccctctctctgcctctcgggtacacacctgagaatattctgtaaaagtccccacccaccctcgctgtttccaaattggtgacatcacaaagcggaacaaaacagaaacgcccccatccaagtggcctttctcccagtgtcaccgggggaccatccctccagccgcccagcccacgtgggctccggtggggtgcgctctagccagggcagggtggccgtgcagccctctggagtccccgggcagccccaagcagccagtgttggccccggaggcacagcccagagaagcccccgtggctccagcccggggacccttcccagcctctgcagagggacggggaacccggccatgagagagggcccagggtgtttcttcaacctgtgagtcaggcgttctttttcctcaaaaaaataaaataaaataaaaggttaggcacttcccagggtgggcgaccgagggagccccccaccccctcttcaggagtccagtgggcaaagcacagcgttgatgggtgaagaggcgaggcgcgctgggcgtcaataacttaaaaaaggggaaaaacgtccgtctccgagtctccacgccttttgtgatgaagaaaagaagcgggcaggagaaagaaaaagcacgtggggttggaaggacagccacagggggctgcggtgtgggggcgcgtgactggctgcagggcggggccccatgctggctggcgggggctctgtgaggcccagagtcactgggggcacggggcgcttgtgtgttttatgtttcgttgctttttttctttctttcttttttttttttttttagaaaaaagcgagccataagtcaaggccagaaaaaggctgcctttgccgttgacaaaaggtgagaaggtgcgcgaagtgtacggagggagagatgtacatcccctgataactgtgaaataaaaaccatttgttaaaaatatgaaaaaaaaaaatctcctcccgcgggcagaggccccggcccggactc

SEQ ID NO: 20350 - DNA, 2300 bp, Homo sapien
ttaatttttctggcagaatttttcaccatccaacgggctcaggtgtattaaaaaatatatatattttacacgtgtgtgtatatatatacacacatatatatttttatgtataatatacatatatgtatattaaaatgtatacttttatgtgtgtatatatgtatgtgtatatatgtatgtgtgtctatatattgtgtatatatatgtatgtgtatatatgtatgtgtatatacatatatgtatgtgtgtctatatattgtgtatatatatgtatgtgtatatatatgtatgtgtgtgtgtgtatatatatacatagagagagagggagagttttgttttgtttgtttctggagacagggtttcactatgttgcccaggctggagagcagtgttatgatctcggctcactgcagcctccatcttcggggttcaagtgattcccttgcctcagcctcccaagtagctgggactactggtgcgtgccaacatgcccaactaatttttgtattagtagagatggagtttctccatgttggccaggctggtctcaaactcctgacttcaagtgatcctcctgcctcggcctcccaaagtactttgattacagatgtgagctcccgcactcacctggccaaattttttattcttttattttttattttttttgagatggagtctcacttcgtcgccaggctggagtgcagtggcacgatctcagctcactgccacctctgcctcccgggttcaagcgattctcttgcctcagcctcccaagtaggtgggactacaggcgtgcaccaccacgcccggctaatttttgtatttttagtagagacggggtttcgccgtgttggccaggctggtctcgatttcttgactttgtgatctgcccgccttggcctcccaaagtatagggattacatgcgtgagccaccaggcccagcctaaaatttattttattatctgttctttaactagaaccttaggtaaggaggtctgggatctgtgtctcttggctaccgtgcctggcacacagttggcgctccatgaatgcacgcacaatgaagggatggccctgcctggaatctgcctggtaggcgtctagactctggggccccgcaggtgagggataggctcccggctctgccttgtgccagccccaccggtcactcccctgctctatgcctcaacctcctcatcagtcaaacagggatgacagtagtaactatacagggtgatgtgagtgtaaaaccagctaatgtgagccaaaacccggctaatttttgtatctttagtagagacagggtttcgccatgttggccaggctggtttcgaactcctgacctcaggcaagctgcccacctctgcagggtggatcacctgaggtcagggcagagtcgctggaaacagtccatgacacctggcctgagctgtttcttaaaaatatatcagaagggccgagcgtggtggtttatgcctgcaatcccagcactttgggaggccgaggcgggtggatcacctgaggtcaggagtttgagaccagcctggccaacgtggtggaaccctttctctactaaaaatccaaagttagcccggcgtggtggtggatgcctgtaatcccagctactcgagaggctgaggcaggagaattgcttgaacctgggaggcagatgttgcagagtcaagatcctgccactgcactccagcctgggcaataagagtgaaactctgtctcaaaaaaaaaaaaaaaaatatatatatatatatatatatatatatatatatatatatatatatatacacatatatatatatacacacacatatatatatgatatatatataatgtatcagcagtagcacgggtctgacggttcctgattggctccgaggagggggacagctccgggtgaagcctgaggagaatccgccccttctccagaaggaggaagaagggccctgctggtcacacaggacccagtctgcggtgggggttttcccgccaccgccccgccctccctggggcccccacctcaccctctcctggcacccttcaccgtcaacctgtcgggccgggtctgagcaggtctggaggtgggcggggagccctggcctccccacctcctcccgtccccaccctgttcccagcactcaagccttgccaccgccgagccgggcttcctgggtgtttcaggcaaggaagtctaggtccctggggggtgacccccaaggaaaaggcagcctccctgcgcacccggttgcccggagccctctccagggccggctgggctgggggttgc

SEQ ID NO: 20351 - DNA, 2300 bp, Homo sapien
tgtaatcctagcactttgggaggccaaggcgggcagatcacctgaggccaggagttggagaccagcctggctaacatggtgaaaccccgtttctactaaaaatacaaaaaattagccgggcatgatggcaggtgcctgtaaacccagctactcgggaggctgaggcaggaaaatcgcttgaacccgggaggcggaggttgcagtgagctgagatcgcgccactgcactctaacctgggcgacaaaagcgagactccatctcaaaaaaaaaagtacaataaggtctcaaatgccttgtgttatggggtacatcatatttccccaaaattcatacgttcaagacctaaccccctagaacctcagtttgtgaccttctttggaaacagggccatcacacgaggaattaacccagatgaggtcgtactggagtagggtgggccctgatcctagacgactggtgtacttattaaaagaggctattggctgggcacagtggctcacgcctgtaatcccagcactttgggaggccgaggcgggcggatcacgaggtcaggagattgagaccatcctggctaacatggtgaaaccccctctcttctaagaatacaaaaaaaaaattagccgagcgtggtggcgggtgcctgtaatcccacctactccggaggctgaggcaggagaatggtgtgaacccgggaggcggagtttccagtgagccgagatcgcgccactgcactccagcctgtgcgtgtgcgtgcatgtgtgtgtgcacgcatgtgtgtgcctgtgtgcctgtgtgtgcgtgtgtgtgcctgtgtgtgcgtgtgcatgtgtgtactgtgtgtgtgcatgtgtgtgttcatgtgtgtgcgcatgtgtacatatgcgtgtattgtgcacgtgagtgcatgcaagtgtgcatgtgtgtggtgcatgtgtgttcgtgtgcatgtgttgtgcatgtgcactgcgtgtgtacatgtgtcccgtgtgtgcacgtgtgtatgtgcatgtattatgcacgtgtctgtgcgtgtttgtgtgcatgcattgtgtatgtgcgtgtgtgcactgtagtgtgtgtgtgtgtgtgtgtgtgtgtgtgtgtgtgtgtgtctggggtcctgaccaaacaaatgctgtaggtctgtgtcttgggttgctgcaatctgaccacaaaaggctgaagggtcaagttcatagccatgctgggcacacacaggcccgttcaagagcagggatccctccctttctgcaccagagcttcctgctcaggtgagggtccctgggccaacaagtgggcagggcgagggaggcggtggcgcacctcctggttgttctcctccaggcactggtcgtattcactcagtgaggccaggtagatgagggcgatcacgttctcgaaacaatggatccatttcttacgctctgacttctggcccccgacgtccacgatcctacagggaaccgaggtgccccctttcagagctcaggagcctgctccgtgacacccccaacccccatcacgtctgggatatgccaagatccataatagcgacagcaagaataggtgctagcctctcgtggatttgccatgtcattcccgcgaggcaaggatgagtcttacgcccattttacagatgagaagcctgagatccagggaggagcggggactttcccaagcttctactgtgctgggctgcctgctttctacccccatattagaggggagcaggttggacagatctgagatgtgccctggtgctggctgggcgacccggcggaggaaattgccaaacatctccaaaactcagttttcccatctgtgctatggggctcctgtgctctggctggccatgggcatgtccagtggccacacagatgggaatgagggctgttcccagagcacacgtcctcccctccatctgtgactcagccccacgcaccgtaacaaaagcctgaaccctgcccccaccttcctgttctctctcttctgagaaatgtgggtcgctgataaccatctgtgcgtcatttccctggggatgcaaccgttactcaggaagtcccagaacagaggctttggacgggcccggcccagggcctcaagcaagaagggacttgccccattgcacaggaggggaaaccgggactgatgatgaagcagttaggctgcagctgctggatgtgtctcctgatccctgagacccactcctcccatgcatcctcagagtccctcaaaccccacatccagagccagacagggtaagcagccgtcgagagggggctctggagactgagacggga

SEQ ID NO: 20352 - DNA, 2300 bp, Homo sapien
cattatttcccaaatcaccccacaccccaaggccttctggatggggacgagtggggggtcacagacactgggggagctggagagcagagacctcacactccatccgtgacagatgatgtccaagcccctacatgccccagaccccagggcaaggctgagcctccctcctcagaccccagggcaaggctgagcatccccactcagacctcagggtagggcctcgcctcctcccttggaccccaggacagggcctcacctctcccctcagaccccaaggcagggcctcgcctcccccctcagactcaggacagggccatgcctccccactcagaccccaaggcaaggccaaccctcacccctagaccccaggcaggttcaagcctccccgctcaaacctcagggcagggcatacctccctcctcagacccagggcagggtgtgtctcccctctcagaccacagcacagggcctcgcatccctcctcagaccccaggacaaggctgagcctctccgctcagaccccagggtaaggtcatgcctcccctctcagaacctagggcaaggccaaccctcccccctcagaccccaggcaggtccaagcttccccctcagacgccagggcagagcctgcctccctcctcagacgccagagcagggtgtgtctcccacttagacccacagccacctcacctcaggctgagtcaccgtgagccgttgtcagcagggccatggggatggggtgagcaagtccctacttttcctatgcacctcaatcccagtggggggctgccccagggggccagcagctctgctcccagcagggtgagctcaggggcaggagaggcaaccatgaatcccaaaatgggcgcctggccccgagaccctaccagcttgtccctgggggtctctctccctggacctgtgtgtcctcccatgggcagaaagttggcctcaggccgcctttgtgggcctcagttttcccttctgtaacgcatcaggctctctgggcctcagtttccccttctgcaacgcatcgggctctctgggcctcagtttccccttctgcaacgcatcgggctctctgggcctcagtttccccttctgcaacgcatcgggctctctgggcctcagtttccccttctgcaacgcctcgggctctctgggcctcagtttccccttctgcaacgcatcgggctctctgggcctcagtttccccttctgcaacgcctcgggctctctgggcctcagtttccccttctgcaacgcctcgggctctctgggcctcagtttccccttctgcaacgcatcgggctctctgggcctcagtttccccttctgcaacgcatcgggctctctgggcctcagtttccccttctgcaacgcatcgggctctctgggcctcagtttccccttctgcaacgcctcgggctctctgggcctcagtttccccttctgcaacgcctcgggctctctgggcctcagtttccccttctgcaacgcatcgggctctctgggcctcagtttccccttctgcaacgcatcgggctctctgggcctcagtttccccttctgcaacgcaccgggctctctgggcctcagtttcctcttctgtaacgcatcaggccctgtttcggggatcaagtcggatgagtcagtgctcaagggcatgcaggcacttgacatttattaggcacctgctgtgtgctgagcgccggtggagcatgtggggagacctcagtggagccgacgggtgcttcgggggtgatcagggctggtggggaggagtcgtccggctggaaaggggtggcccatcccgagtggggactcatttcccctccgtgactgacggctccggggctccctgcgggtctccggctttcgaggacaggaagaaggcagccagggcaggggtgggggtcctcacagccagggcagccccagcgcgttggctccaggagcccgggtgggggccgaccgttggggtgcccctccctgtcctcggccttacctccaccctggagggcaccttgaacataacaggaaatttcaaataacaggaaaccaagaccagcaaggcgggtggctccaccctgcgtcgggcctcagtcagcccccgggggaggccatgaacgccacggggaccccggtggcccccgagtcctgccaacagctggcggccggcgggcacagccggctcattgttctgcactacaaccactcgggccggctggccgggcgcggggggccggaggatggcggcctgggggccctgcgggggctgtcggtggccgccagctgcc

SEQ ID NO: 20353 - DNA, 2300 bp, Homo sapien
ctggcggccggcgggcacagccggctcattgttctgcactacaaccactcgggccggctggccgggcgcggggggccggaggatggcggcctgggggccctgcgggggctgtcggtggccgccagctgcctggtggtgctggagaacttgctggtgctggcggccatcaccagccacatgcggtcgcgacgctgggtctactattgcctggtgaacatcacgctgagtgacctgctcacgggcgcggcctacctggccaacgtgctgctgtcgggggcccgcaccttccgtctggcgcccgcccagtggttcctacgggagggcctgctcttcaccgccctggccgcctccaccttcagcctgctcttcactgcaggggagcgctttgccaccatggtgcggccggtggccgagagcggggccaccaagaccagccgcgtctacggcttcatcggcctctgctggctgctggccgcgctgctggggatgctgcctttgctgggctggaactgcctgtgcgcctttgaccgctgctccagccttctgcccctctactccaagcgctacatcctcttctgcctggtgatcttcgccggcgtcctggccaccatcatgggcctctatggggccatcttccgcctggtgcaggccagcgggcagaaggccccacgcccagcggcccgccgcaaggcccgccgcctgctgaagacggtgctgatgatcctgctggccttcctggtgtgctggggcccactcttcgggctgctgctggccgacgtctttggctccaacctctgggcccaggagtacctgcggggcatggactggatcctggccctggccgtcctcaactcggcggtcaaccccatcatctactccttccgcagcagggaggtgtgcagagccgtgctcagcttcctctgctgcgggtgtctccggctgggcatgcgagggcccggggactgcctggcccgggccgtcgaggctcactccggagcttccaccaccgacagctctctgaggccaagggacagctttcgcggctcccgctcgctcagctttcggatgcgggagcccctgtccagcatctccagcgtgcggagcatctgaagttgcagtcttgcgtgtggatggtgcagccaccgggtgcgtgccaggcaggccctcctggggtacaggaagctgtgtgcacgcagcctcgcctgtatggggagcagggaacgggacaggcccccatggtcttcccggtggcctctcggggcttctgacgccaaatgggcttcccatggtcaccctggacaaggaggcaaccaccccacctccccgtaggagcagagagcaccctggtgtgggggcgagtgggttccccacaaccccgcttctgtgtgattctggggaagtcccggcccctctctgggcctcagtagggctcccaggctgcaaggggtggactgtgggatgcatgccctggcaacattgaagttcgatcatggtacgtgatgttgcggcctcttattccctggtgcgtgcatgcgtgggggccgtggctcaggggggctgtggatctaggggcagccgggtgtgtctttgctagagagggccacgggccagtgccctgtgagggtggagtgtgtgtgtgtgtgtgtgtgtgtgtgtgtgtgtgtggacaacctctgggcgttgcgggaagtgggggtgacaatgacagttaatgccgcctcttcttgttcacttcccctttagaaatggcagggcccatgccccatctctggcctctgcatcttttggggacccactctctggggctggcagaggcaccaccttggcttcctgggctgggggaatcttccctcacatccccttcagcatgaacggcctcggctttcccggtgggtaaaacagtttaatcactgaagccgaagcacagggttgattgtacacgctccccgccagccacaggggctgacaactgcctgccccgtgaaactccagtggagacgtttcagctccacaccattcagtatgggagacgccagccccacggggctacggtgcaagcagataactgaatttcgaagtgtaggttgtgtttaatttgaatctgtttatatttcggtagccccatggggcgggtggccacagtttcagtgcagatgtaaatccggaagcctccagcacctgcagctcatagacagctctcgcccaccttctcccaggaccaagccagtcccgtccagtccagtgtctgagcagagtcagaatccacaccacccgccgcctgggctcagaaagttctgctt

SEQ ID NO: 20354 - DNA, 2300 bp, Homo sapien
cgtctctactaaaaatacaaaattagccaggcgtagtggtgcatgcctgtaatcccagctacttgggaggctgaggcaggagaattgcttgaacccgggaggccgaggttgcagtggactgagttcgtgccactgcactccaatctgggtgacagagcaagactccgtctcaaaaaaaaaaaaaaaaaaaaaagagagagagagagagagacagggtcttgctatgtttcccaggctggtctcaatctcctgggctcaagtgatcctcctgcctcagcctcccaaagtgttgggactacaggcatgagctactgtggctggccaattgcagacagatggaactgtggccagccacttcaccagtgaagtcccaaacacccctctgcaggcatgataagctagggtagttcttatcttttcctgattcctgttctctgtgtgtttagtggggaccacagcaggcagggtggggtgttggtggaatttgggataagtggagtctgggcaggcctggagctctctgtctgccttctgggcccgtgttggctgaccctgttgccccctctgccctgctttggctgagctgaattatttcttggtccttcccttctgggggcttctcgcttaacctcctttgttgtccctgataaaggggccttgttagcccgcaccttccctccttcgtcacttgacttctgcctgctcattctttgtaccttagttttagcgtcacctcctccaggaagtcttctttgatttctcctcctccctaggtctcctctaggctcccacagctgcctgtgttccctgcatgacagctctgctttatactgggcacaactttccctctttcttcactcatctgctctggctcatcttttgagtttcagcttaagtgtcacctcctccaggaagcctcctctgatttcctctcctccctaggcctcctctgggcttctcccagctgcctttgtgtcctctatcccagctcccatcacccctggtcacacaatccacctcctcctttggacttcgagctccgtgtcggtggatagtgtggctttgctggggtcccggctgtgtccccagcacccaccacacggctggcacacagtaggtgctcagtgacccagcagcacactcagaaactccctttctagccgggcgcggtagctcacgcctgtaatttacagctactcaggaggctgagacacaggaattgcttgaacccaggaggtggaggttgcggtgagctgagatcaagccactgcactccagcctaggtgacagagactacatctcaaaaacaaacaaacaaacaaacaaacaaacagaattctcacatgctgctggcagggagagtgcttgattctttatcattatatctgaggaaactgagactctgagaggtgaagcgacttgcccaaagccacacagctgggaaatggaggagttgggatttgagcccaggctcttaatcggcaccaatgccacttctcacttgggacagaaaggaagccctgactccttaggcagctgtacggagcctgggatgataacgtgctgagagccagggctactgtctgctgcaccctggggctcagtctccccatctgtacaaagggacgttccttaggtacctccagccctgagacactgggttttaactttaaatttctgatgaacaacaaatacttttttagtataagtatgccccaaatatgaataaagataaatataaatacctgccaccgacccctgcacaaaccgcaggttccagactacaagtcccacaacccactgcggcctcccttaggaactgactatcatgactttctatttttcattcattcattcaaaaatggtataggccacccgccgtgcgccaggtcttgtgctagatgccggggatacatcatatgcacaaaacagacaaaagtttttgccttcgtggagtttgacatctacatcctcgggagttttaagtgatttttgtttttctcagcaatttctgccaggacgactacagttcccgtgaccctttgtgtgtttgacgggactacaactcccagaagacctagcgcgccaggcaggcacttccttttctctttatccccaacttccttccaggtcgcaaggtcacgtcctgtccccacctttcgcccctcaccctagctcccccaacgccaaagacaaggttaagaaagtgatatcgcgaaatagttttttaaagcattttattgcattttatgacttggagtttatgtgaaacctcaacggtattagccgaacagcctgcc

SEQ ID NO: 20355 - DNA, 2300 bp, Homo sapien
gaagtagcctctcggatcatcagggcagatccagagggtgaagcctgtgtcgctgctgctgcagcactggcaggggccttaaaacccgaggaagcacccaccgactcctctagcatttccctgcgggacggcgccggtgaggggtgcagatgagtccacacagatgaggggttgcctcactgtcgggggagccctgaacaagacgtgcttgctgttttggggacccaggccttgttggggggtgcccgagtggaaaagcagcggcttaggccggggtggggaaagtgtcctggaggccccggctccccatagacaggccttggcggaggagccctggggtttgtcgatggcggctgttctgtttgttcctgttggattgtactgtgggcccgggaggcgcgtcctattcccagcgccagttagtgtgcagtgagacccggtagcctggcctgcgtcactccacagtggcacaggcgctgggctccgcatcccatggggccatgtcgattccctttcccctggctgtgccctttctcctgtgagcagagccctcttggcagctgggctttgagttcagccgttgaaggatctccaagtggaaaagcatgttgcaaaaacagcaagtagactcccacagccagacggggagtccccaggccacagccggccctctacctgcttttgtaaataaagtttttgcttgtttgtttttgttttttgagacagagtctctctctgtcacccaggctggagtgcagtggcgcgatctctgctaactgcaacctccgcctcccaggttcaggcgattgtcttgcctcggcctcccgagtagctgggattactgtcatgtgccaccacgcccagctaatcttttgtaattcttttttttttttttttgagatggagtttcgctcctgttgcctaggctggagtgcaatggtgcgatctcagctcactgcaacctccgcctcctaggttcaagcgattctcctgcctcagcctcctaagtagctgggattacaggtgcccgccaccacggccagctaatttttgtatttttggtagagacggggtttcaccatgctggccaggctggtctggaactcctgacctcaggtgatctacccgccttggcctcccaaagtgctgggattacaggcgtgagccaccgtgccgggctgtgtaaataaagttttatggcacacagccatgctgatgcatgtgcaagccgtccatggcagtttcttagttgtaacagacaccatctggtccccaaggctgaaaatatcccctctggccctttatgaaagtctgctggcccccgggctagagcagaatccgactttggtggggtaagaggcagggaggggtgcacacagaccctgaaggaacccgaatgcctggctgaggggctcagccccgttcccacaaacagttatcctcctgaggggctcagccccgttcctataaaaacttaacctcctggccgggcgcggtggctcacacctgtaatcccagcactttgggaggccgaggtgggcggatcatgagatcaggagatcaagaccatcctggctaacatgatgaaaccccgtctctactaaaaagtacaaaaaattagccggatgtggtggcgggtgcctgtagtcccaactactctggaggccgaggcaggagaatggcgtgaacccgggaggtggagcttgcagtgagccgagatcgtaccactgcactccagcctgggcgacagagtgagattccgtctcaaaaaaaaaaaaaaaaacacaaacaaaaaaaaaaaacttattctcctgctctccccgatttttaaagatttcgacctgagggccagagcaggagtgggtccctgttcccggctctacctcctccctggaggagctccctggggctcccagagtcagaggctggcacctcctgtggtcctcagtgctgaggccgatgctggcacccagcggacgggccccacgtggcccagaggggaggggtctccaagccccacacacgggtcacctgccccaggaacagccaggccattcccctgctctctatccacaggggcggctgacggggctgggcggagaggaccttcccaccatcgtcatcgtggcccactacgacgcctttggagtggcccccgtacgtatgtgtgtccccattccccccaccccacagggcttggattctggctccagtccagtgccgaggcaaagcgcctgtaggggatggcggccagggtcagcggctctccctgtgacggcctttgcccgtcatcctggtcc

SEQ ID NO: 20356 - DNA, 2300 bp, Homo sapien
tggccccaaagtgggcctgagcccaggaattggggcgccttatttatcgagggctaagctgagccctcgcaggctctgtctcttggagtcccacagggcccagctgctgctcaccccaggaacctgctgggaatgctgtcagctgcaagtgttagagacgcccggttaagggccctggaactaggggatcccctcagccctgtgtggtcggggccggatttttcgctgggggtgggggccgtcctgggcactgcagggcgctgagcagcatccctgccccactcactccatgccaggaacacgccatagtcatgatagccacaggtgccctccgacatcacccactgtccgctgggggcagaagcacccctggttgagacccccctgggttagggaattccacgggcccccgagagactatgtcccgtgatcatctgccccgctgaggtcccaggaggctgcacacattgaaatccacaccctgagtaggaagggagagaggaggtgaatcccaggagctggggtccccctggtttatcccgtctaccccgttgggagtttatcctggtgtctggtgtgagcagggggcagacttgatttttccccagataatgaatgcaggcttcgtccccgtggccctgtggatgtcttctgtgcatgactctctcctgggtgccacccactccatcccaggagcacccccagacgtagcaaccacagatgtctccagacatgactgtgtctcctgtgcggggtggggtagaatcacctccgggtgagaccccggcccagtcacctgctcccgagatggtactgctgcagtcattgtgtcagcagctcagagaggccagggccactgtggctgagacgtttctcagccttctcacagtcacaaggcgccgggagtcatgtcctggttcaggcaggaacttggactcgaactcctggcctcaagcgatcctcctgcctcagcctcctaaagcactaggattacaggtgtgagccaccatgtccagccaaaacttgtttttttttttttaagctgcagaacctcttcccccagccccccactgatgccttttgagaagctcatgctgtcaaaaacgtgtgaacggggctggtttctgccaggcctgggggcttcttggcagctggggagaggttgggtttctggggcagagggaaactgggttggagagagtccggggcagatgtgggaagatgggggtagggggcgtgctgagcagtttccttctctgactctggtgacccttctaatagccaaggctgtgttccattagaatttttggcctgcctgggtggcttatgcctataatcccagcactttggaagcctgcggcaggtggatcacctgtcaggagttcgagacctgcctaacgtgttgaaaccctgtctctactaaaaatacaaaattagccaggtgtggtgctgcatgcctgtaatcccagctacttgggaggctcaggcaggataattgcttgaacccgggaggcagaggttgcagtgagccgagactgcaccattgcactccagcctgggcagaaagagcgaaactccgtcccaaaagaaaaaaaaaaaagaattcttcttctttaagtgaatagactttatttttttgatctcctcgtgtctgttgcctggtcggtcaccccggttcctcctgggctcagagaagcctctagagctggggtctaacgtggggtggccctgctgcctggagacactgagtgatttgcagttgtcattgggggaagctcccggtatggggtgggtgaggccagggatgccactcagcaccctgaagtgcccaggacagcctcacctcagagaaccatccagccccagtgtccacagggccgaggggtcatgccccgccctaaggggctggtcaggatttcctgctttggggagaccttcatacccttcctgggggacctgtgacctggcctggtccctcctccaccccaggcgcttgcccgtcaaagctaacactgggtcttccctcccagctacaacctcctgttctttgcgtctggaggaggcaagtttaactaccagggaaccaagcgctggctggaagacaacctggaccacacaggtgagcggccccgggtgggggtgggggtgccgcggtggtggtgccgtggggaggcacggaggcccaggggttgccatgggggcagccaggaggcacagagggagggccgggggccacttcctggtccccacccaccccgccagctctcggtgtcctgcagactccagcctgcttcaggaca

SEQ ID NO: 20357 - DNA, 2300 bp, Homo sapien
ccttctcacagtcacaaggcgccgggagtcatgtcctggttcaggcaggaacttggactcgaactcctggcctcaagcgatcctcctgcctcagcctcctaaagcactaggattacaggtgtgagccaccatgtccagccaaaacttgtttttttttttttaagctgcagaacctcttcccccagccccccactgatgccttttgagaagctcatgctgtcaaaaacgtgtgaacggggctggtttctgccaggcctgggggcttcttggcagctggggagaggttgggtttctggggcagagggaaactgggttggagagagtccggggcagatgtgggaagatgggggtagggggcgtgctgagcagtttccttctctgactctggtgacccttctaatagccaaggctgtgttccattagaatttttggcctgcctgggtggcttatgcctataatcccagcactttggaagcctgcggcaggtggatcacctgtcaggagttcgagacctgcctaacgtgttgaaaccctgtctctactaaaaatacaaaattagccaggtgtggtgctgcatgcctgtaatcccagctacttgggaggctcaggcaggataattgcttgaacccgggaggcagaggttgcagtgagccgagactgcaccattgcactccagcctgggcagaaagagcgaaactccgtcccaaaagaaaaaaaaaaaagaattcttcttctttaagtgaatagactttatttttttgatctcctcgtgtctgttgcctggtcggtcaccccggttcctcctgggctcagagaagcctctagagctggggtctaacgtggggtggccctgctgcctggagacactgagtgatttgcagttgtcattgggggaagctcccggtatggggtgggtgaggccagggatgccactcagcaccctgaagtgcccaggacagcctcacctcagagaaccatccagccccagtgtccacagggccgaggggtcatgccccgccctaaggggctggtcaggatttcctgctttggggagaccttcatacccttcctgggggacctgtgacctggcctggtccctcctccaccccaggcgcttgcccgtcaaagctaacactgggtcttccctcccagctacaacctcctgttctttgcgtctggaggaggcaagtttaactaccagggaaccaagcgctggctggaagacaacctggaccacacaggtgagcggccccgggtgggggtgggggtgccgcggtggtggtgccgtggggaggcacggaggcccaggggttgccatgggggcagccaggaggcacagagggagggccgggggccacttcctggtccccacccaccccgccagctctcggtgtcctgcagactccagcctgcttcaggacaatgtggccttcgtgctgtgcctggacaccgtgggccggggcagcagcctgcacctgcacgtgtccaagccgcctcgggagggcaccctgcagcacgccttcctgcgggagctggagacggtgggtgcccctttcatggatgggtccggagctctgcggagcacacacatcggggccgggttggggcatcctgtcccagggtgtccttgctgtccgcccctcaggctctgagggccacactgtgtcggggtcgggctggggtgttctgtcctggggtgtccttgctgtccaaccccggggctctgaggggcacactgcgtcagggccgggctggggtgtcctgtcccagagtgtccccttgtccctccttacccactgctcattgcccgccggggctccagcaggccttagggggaccccgggggcaggtggatttctcctcattttgcaccctcgggggttctgggaggcccctggagcatttggggaatgggctggggtggccgccatccccgcctgccctctgctaatggcgcctccggctgcaggtggccgcgcaccagttccctgaggtacggttctccatggtgcacaagcggatcaacctggcggaggacgtgctggcctgggagcacgagcgcttcgccatccgccgactgcccgccttcacgctgtcccacctggagagccaccgtgacggccagcgcagcagcatcatggacgtgcggtgagcgcggcagcacctgcccggcccctcctagggctttcctgggggctgagccactggtcgcaactgcagaggccatgagagcctggagggagcggcccccacacacaggctgcgaggaaggggccggtgcgtggccaaggccggctgca

SEQ ID NO: 20358 - DNA, 2300 bp, Homo sapien
tcatttgaacctggtaggtggaggttgcagtaagccaagatcacaccattgcacttcagcctgggcgacagagagagactccatctcgaaaaaaataaaaataaaaatgaaaataaaattttaaatgggtgtaactctgtggagggaaaaagaaggctgagaaaggagataatggtgactgagcggttttagataaggtagatggggaaagtgatggggaattaaggaatgagccacacatcatctggggagagcacatcccagacaaagggtacagcccgtgcaaaggccctgaggcaggaccgcacctgacaagtgagaggaacagcgaggaggcctgtgtagctgcagcagtgaggagggggagagagggagcaggggaaggtggggacaaggcagaacaggacacgcagagccttgtgggcctcaagaaggacttgggctttaattatgggacatctttgggaagtgttttttttttttttttttttgagacaagatttcattctgtcgcctagaccagaggcagtggtgcgatcctggttcactgcagctttaatatcccagggatcaaccgatgctcccaccgcagcctccgagtagctgggaccaacggtgcacaccaaccactcctggctgatttttttttttttttttctcaaacagagtttcactcttgttgcccaggctggagtgcaatggcgcaatctcggctcactgcaatctccgcctcccgggttcaagcgattttcctgcctcagcctcctgagtagctgggattacaggcatgcacaaccatgcctggctaatttttgtgtttttagtagagacagagttttctccatgttgatcaggctggtctcgaactcctgatctcaggtgatccacctgcctcagcctcccaaagtgctgggattacaggtgtgagccatcgtgcctggcctgttttcttattttttacagcaatggcgtctcactatgttgctcaggctggtctccaactcctgggctcaagtggtcctcctgactctgcttctcaaagtgctgggattacaggtgtgagccaccacggccagcacgtattattatttttattaatattattgatgagtttcatacgtaaaggatcacgggcactttagagctgggagatacttcagtatttctcctatcctgtcattatcagtgcgagccagtctccctccttgttgatgacattattgatgagttacatacttaaagggccaaggacactttctatgtgtaagcaccctatagaactggaagatacttttaccatttctcctgtgctgtcgtgattagtgggagcactttgtcttgctcttgattaattattattagtgttgttattattaggtgttttttttttttttttttaccaagacggagttttgctcttgttgcccaggctggagtacaatggcacaatcttggctcactgcaacctccgcctcctgggttcaagtgattatcctgcctcagcctcccgagtagctgggattacaggcaccccccgccaccgagcccagctaatttttgtattctttagtagagacggggtttcaccgtgttagccagtctggtctcgaactcctgacctcaagtgatccacccacctcggcctcccaaagtgctgagatgacaggcgtgagccaccgcgcccagccatattattagtgttattaatattattgatgagttacctactttaaggatcacgggcgctttcaacgacaagccccctacattatcccagcaacttttgacattcttccggccgatgccctccgcgggagccggcggggacccctgggaagccggctaaggcccgtcccgcccgcagctccgccctcgcccacccgtaggcggggcccggggccttccggcctcagtttccccccgcggcccggggatgcggggaggcgccggctgccccgcgcggcgcggccgccaggggccgctgcggagccgcctttgtggtcccgatgccggggcgggcgcgggcgggaggagggcgcgggggcccgggagggaggcgggaggcgcggccgccgctccagctgcgagtccgcccgccgcccgccgccgccgccgccggctcggtcccgcgcccgccatggcccgcctgacggagagcgaggcgcgccggcagcagcagcagctcctgcagccgcggccctcgcccgtgggcagcagcgggcccgagccccccggggggcagcccgacggcatgaaggacctggacgccatcaaactcttcgtgggccagatcccgcggc

SEQ ID NO: 20359 - DNA, 2300 bp, Homo sapien
gtctaaacctctctgagattcagtttcctcatctgtgaaatgggctcgatggtaatagcagccacttcagagggctgcggtgaggggtgagtagcttcatgtcaagcacttcacgcaatgccaggcagttgcagggttcgtagggaaagtaatgggtgagaggcgctacaccagtgctccactgtctctacgcccctcattacttcctggctgctatcaacccatccctcccctcccctcctcacccccaggtacctaattcccagaggcaggggagcgggtgaggattcaagctgcggattagcagaggccgattagagacgggtgggaggggggagggagggggggggtctctaacccactaacccttcccttgccggtcctgcctcaggtttgcgggaggggtgggggcctgcaaaacctcggtgcctgccacacccttggagaaagcattagtgtccctgctggttgaccccaggttgacccctctctgggcctcattggttccttctgaactatggggcgaagactgcagaaatgaaatgggaaagcctcagcgtctgaagatgagggcacagggtaaatgcctcagggctggctgagacatccttcgcgtagacaacacttactgagcacctaccatgtgggcagagctgctggcatcaacgtcgcctagaactgctcagctcccagagtgccagactcaacttccagaacccccagactcagccatcgctccgaaggggcgctccgggaactgattctcctcccggggtgccacctgctctcaccctcaccctggcgtcctccctgggggagcagggaaccactcctccaaaggggtccctgaaatcctggatcctcagtgtgtgtggaggggggtggaactggggaaagacagaaggaccatagcagaacccctttcacccgtcaggtcggagcaacactccccccacaccccctgcaacctcccccagctgcgccagacgcagagccggtgggggcgagggggcggcgcctactctgcggctgtcagaggagggggactgcgggagagcgcttgggggggcgctgcggcagccggtcccaacccgcagcggctcgcgcggcaggggcgggggcgctgacccacctcggcccggcccctcctccgctgcggaggcctcgccattaatcctgaccgggggagggggcgcccgctgccccccacttcctacgggggccgctgcgagcgctcccctgccgccccctgcctggagcccctgcgggacccccaggggacccccgccccaggtctgtcgccctcggtgtcggagtctctgtctgtgtccccgtctgtcccgtctccctgctgtgcgtgtgtgtagccgcgtgtcccccggacacctgcagtcaccggccagggctgctcggggaggggtcccgggggtcggcgcgtgagtccctctgaggtctgggtgtctttctgggactgtgcgtctgtgagatctcggggtgccagccccacaggctgcgagtgtgcgtctgtgttgacctcctgcagaaggtgtgtgtcccagatgccccaccggcttcgagcatgggtccccgtgtgcccggcggacacccacgggccgtgtgtccgtcacacgctgtaggcgccgcgcgtggggatctctgcgcgtgtccgtgtgcggtgtgtgtgtgtccgtggctgagtcgaggaggcccggcccgccggtgtccccgagtcgcctgcgcgtgagtgtgtgtgtgcgcgtgtgtgtgcgcgcgcgccgcggcgaaggtggatccgctcgctccgcagcgagcccagccggggccccgcgacctgcagccgccgccgccaccgcctccgccgctccccgggcctccccttgcgcgggccgggccggggatggagccgcagccggagccgccgcagccggggccgcggcgcggagcagcctgaggcgcgggcggtgcgcgggaccggggggagggcgggccgaggggagggtcctgcgggccgggggggcgggcgcggcgcgccccctccctggcgcgctcgctccctcccccgcgcgccctccctcgccgcctcctcccgccgcctgcggcccccccctcgccggggaccgagcgcgctcgctccggcgccggcctcgcctcctcgcagcagcgccatggtacgtcgccgcacccactttcgttttcgcccggggactttttggggtggtgcgtgggctccgggcgaaagttgcaagatctggggggacagggggcgggggccgcccggaggaggggctcgaggcggggac

SEQ ID NO: 20360 - DNA, 2300 bp, Homo sapien
gggggtcccttgccacccaaactgggatataggctgctgttcgtacacttgcagaagtttctccctgcagctaccgccaccaataatattcacacagccttcccacatgctatgtaaagactccaaccttccccacctcccaagatgcatcctgttactatagccattttacagatgaggaaaccgaggttccaagaggggcagtctctgctctctaaacttcaccttccaaaggattctaagctgctgaatgaaggctgcaggcagggtggtctgtacaggggagggagggtggaaggcacggggtctggaagtctaggaggagtgtctgaagtcaactgcaacttttaaatatctgtgaattttagatttcaccctgtatgtgtccctagcgtgttttaataaaataaattgcttcacgttatattggtatgtggatttccagatacacttctcaccatttaattcaaatgctccccacagctgcacagtgggtttaaaatacacagacacacacatttatggaccgttcgtgatgtactaagcactgtttgaataatgtcaccgtcatgcagaggggagcctgtggggggcctagggaacctacgctgcaggaattctgctccctcctagtttacctgtcagaccctgggcaagtggcttccgttctctgggcctcagtttcctctcctgtaatgcctgaggataatgggtgctggtatcttctgcgcccctgggcctggggcacctgccccagcttggtgagagggtatcatttgtccttgggaagctcagagagatgaggtgaaatggccaagctttctaagaatgtgtctttagtgaacatttgacccaaggtcaaggctctgctaaggtcattgtccttatccccagcaatcccacaggatgggcatctttaagccactttataggggagaacccttgggatgggaatgagagacacagcagcctctgagctagcctgggaggatccagggagtgaaccgggggagggttggggccctgtcatcagatgccctgggggctcagacggaggcaggccaggtctctgccctgttacgtctagaaggagaacagaatgtgggctccaggtccagatggcctggctccaagccacacttgccatacctcagtcttgagatctgtgaaaagggcacacccctgaggcaggtggaaattattggatacccagggggaggctgcaagggtttatctggccagctggagatcccgcctggacaccgtcctcctggggtgctggagagacacacaggcgaggccacccctcccctgccccttgggtgctgggtgaagagagcaaattctggagcctcccgtgttagcctgggcccttctggccaaggaagggacagctgcacacaagcccctctagctggggacccgcagcccctgcctggctctggggggagaagggagccagggtgctgtgggaccagctcaccgtgcacccagggtcgtacatctttaaggggaaagaggcgcgctggccggcctctgcgcacgtcacttcttcattccttccctcccccctggctctttcctccaacttcccggccagctcgggggtgatgggggggtggggagggggggccttaaaaatccacccctggcccctcaatgtccagaaacaaccctgtcccccctctccgcttgatccgaattggggtcgccctgcagtcctggggtcctggtctagtgccctggggcattgcgtaaatacgggaggagcgggggggtcctgagacgtcgggggaggctctcctttctcgctcgcgcccttttttccctcgtttctttgaaagttgggtgttgagaagtgggaggttcggggtgggagggggagggtgtcagagggtagagagagagacagagagacagagacgggggagagaggaagagagagacggagggagagagggacagagagcgaggcgggcggcgcgagagagggagagcaggagggaggaggagggagaccgagggaggaggcggcgaggagagcgcgccggccgcggggcgggggggggggttggggggggcgggggggtggtttggaaaaatgactcagtaagttcagcgcgcccgctccggccggccctgcgcctcccgccgcgcccgggatgtattcgtccccgctctgcctcacccaggtacggtcctcgcccggccccccgccggcgcccccgcgccccccgcatcccagccccggagttttgaagcaggaggaggcgggacgaaaaaggcgcgcgtccctcccg

SEQ ID NO: 20361 - DNA, 2300 bp, Homo sapien
gcaggtgcccgccgcgcctggctaatttttctatttttgtagaggtagggcttgactaagttgcccaggttaggctcaaggatctgcccgcgttggcctctcaatgtagtgggattacaggtgtgaggcactgggtgggcgcacccttcttaagatattccagttgtatttgtgagttccccctgtgtccagagtggcacggggcctgggccgggacgggaggtcgcagccatctcagctcagcccctgcagcagggatcacaaaggggtggccctgaggctgatggtccccagggcagggtgcagggaggagggactccctcagttaattgttacacaggtccagagtctggcctcccggagggagagcgatggggcaggagctggcaggggaggggcaggatgcccaatcaggtggtgccaggggcgggccccgctcccaggtctcaggcatcccccgcccggggaccgcctgtgccttatcacggggaggcagggcctcgcccacaccaaacctgtggacgccgacccgggaccgccgctggctggctgctggctcactcgaccgtcatggagaccctgggggcccttctggtgctggagtttctgctcctctccccggtggaggcccagcagggtaggtgcaggggggcgggagggggcgtcgcgggataggggagttggtcaggtgatcaccatctcccaattttccatggcgagaaaaaggagagggggcaggaagaaaaggaagagtggcttggaggcccttctcaacccccgcagtaccgcccggcctccctctcgctgggctctgccctcctctgtaagggaccccccaccgcccacccgagcctttcccctctccagcccttctgagcacacctggctgaaccccccgccttgagctcggccccactctgagctcgggcctcctttacaagcccctccccatctgagtccccgcctcttttgtgaaccgctccttctcactcctcctcctttataaacccctccccgagcccctcctcctctgtaagcccctcccctctgggctcctccttctttataagcccctccccctgagcctctgcctcctctataagcccctctccctctgagccccctagttcacaagcctctccccatccgagccccttcctcctttgtaagcacctccttctcactctccctcctttataaacccctccccgagtccctcctcctctgtaagcccctcccctctgagctcctccttctttataagcccctccccctgagcctctgcctcctctacaagcccctcccactctgagccccctagttcacaagcccctccccatctgagcctcttcctcctctgtaagcccctccttctcactcatcctttatagacccctccctgagcccctcgtctgttgtaagcccctcccctctgagctcctccttctttataagcccctcctcctgagcctctgccgcctttataagcccctcccactctgagaccctctccccttataagcacctcccctctgagctcctcctttataagcccctccctctaagcctctgcctccttttataagctccccccaacagctcctctgttgtaagccccaaccccccagactcttctttataagccctccccatctgagccacctcctccttcataagcccctcccctgagcttgttctcctttataaaccccacccctgagccactcctttgtcataagccccgcccttctgaggtccgcctttataagcccctccccctgagcctctgcctgcattataagccccgccccttctgagccctcctgatttgtaaactccgtcccctctaagccccccttcttttataagcccctcccctctctgggcccccaggctccctcccactctggtaaggtaccctccccctctctaaaccctcccgacccccctacgccatccaggtctctgaagctccgtccctttccaataccccctctgtcggagcacccccagtgaccttctctctctccttgctagggtggtgggggaagggggtcttctgaccttttcttcctctgagtcgaacctccccaacttcctgcagccacggagcatcgcctgaagccgtggctggtgggcctggctgcggtagtcggcttcctgttcatcgtctatttggtcttgctggccaaccgcctctggtgttccaaggccaggtgggtgcccgcccccaccccgctgcccccacagccctgcccccacccccagcttcccaaccctctctggtacccccatcacca

SEQ ID NO: 20362 - DNA, 2300 bp, Homo sapien
ttaaagtgactaacttcttttaatctataactaagatctgaatcctgaagactttcctttggaacctcagtaaatttacttaatctaaatgggtccaggtgctggggtgatcacccttatctcatctccagtgggtccaggtgctggggtgatcatccttatcttgtctcctgctaaatcatggaggtttggggagttcttcagacacccagtaaaacttgtttcatcctaaacgggtcacattaagaattccttcgttattggctgggtgtggtggctcaagcctgtaattccagcagtttgggaggctgaggcgggtggatcacctgaggttgggagttcgagaccagcctgaccaacatggagaaaccctgtctctactaaaaatacaaaattagccgggcatggtggtgcatgcctataatcccagatactcgggaggctgaggcaggagaatcacttgaaccctggaagcataggttgtggtgagccgagataatgccactacactccagcctgggcaaaagagcgaaactctgtctcaaaaaaaaaaaaattccttcattatcttgtcatgccttaaggcccaggaaaggcctgggcaaaactcttcatgggcttttgttacattccagcctttgtatgagggcactggctcttttagcttttaatgtttaacttaaccactcagtcagtgctgaaacagttatggaggcctgtgttagtgaggcctggcctgctacgtggggacatctagggaagaatgttcctcatggagatcacagcaaatgcaaaggccctagggctgcactgggcctggcgtgttggaggaacagcgaggaggcctgtgtggctggagtggagctagagagggaagaggtgatgggagatggtcatgaagggcctttgggactgtcaagtagttgagtgaggaggcataggaggattttaagcaagggagtgatatggtccagtttacatattgaaagtacttctgaatctgttatctaagctgtgtaacaaaaatccccataatggctgggggtagtggctgatgcctgtaatcctaatgctttgggaggctgaggcaggatgatcacttgagcttgggagttggagaccagcctgggcaacatagaagtgagaccccatctctacaaataataaaaaaaaaattagctgggcatgctggtgtgtgcctgtagacacagccactaggaagtctgaggcaggaggatcacttgagactgggagttcgaggctacagtgagccgtgatcatgctgccgtactccagcctggcgacagaacaagatcctgtctcaaaaacaaacaaaaaaacatacttggttaccttcaacaacagtaaacagtgtcgcacacagttgctctgggcctggcttagctggctggctctgggtctggcctctggtaaggcctcagtggagacgctctggggctgcatcatctgaaggttcgcttggggctggacgagctgctgccagcccacttctctcacatggctgttggtgggagggctcagttttttgccacgtgggcccctacaaaagactgcttgagcatcctcacaacatggtcactggcttcccctagagagagaacaaggatgagactgttgtgctttttatgccctaaccttggaagtcttgctctgttccatcttcttggcattcacatgggtcagccctgttcagagtgggagaggactatataaagccttgaatattgggtggggatcgctatataaagccttgaatattgggtggggatcgctagggccattttgggggtcagctgtccctctggctgctgtgtggagagcagacagtggaggtcatttctgataggcctataggcgagaggcagtgcagagactgaggcccagagagggaaagcaacttacggaaggctgcacagctagtagggaggttggagctgagctttcagcgtagatgctcaggttggtcagtgggtaggaatttgccccacccaggtcctaggaacagacaacgcactggtgaagggggcttctaacctgggctctcatttttctgccacaggttcttacatccccgcgtccccaggtttagcctgagcagggttgtggaaggccgggacccattgacagcacgatggtgacggagcaggaggtggatgccatcgggcagacgctggtggaccccaagcagcccctgcaggcccgcttccgggcgctgttcacgctgcgtgggctcggcggcccaggcgccattgcatggatcagccaggccttcgatgacg

SEQ ID NO: 20363 - DNA, 2300 bp, Homo sapien
ccattgcactccagcctgggtgacagagcgagactctgtctcaaaaaaataaaagtgggggtgtcagctccatgaggccagacactgtgtctgttttgtcctgtgtcctctgtgcccaggacactatcctctgtgctcaggacactgtccagcacacagtagttgctcaataagtatttgtgaatgttgtcttaaaatagaagttggccttccaaaaggatttctttgctatgcacagcattttatgttttttcattaatttttatttaattatttttttgagatggagtctcactctgtcacccaagctggagtgcagtgacgcgatcttggctcactgcaacttccgtctcctgggttcaagtgatgctcctgcctcagactcctgagtagctggaattacaggcacccgccactaggccaagctaattttagtatttttagtagagatggggtttcagcatgttggccatgctggtcttgaactcctgaccacaagtgatccacctgccttggcctcccaaagtgctggaattacaggcgtgagctacaatgcccagccatgtttttttattaattgctcattttttttttttttttgagatggggtcttgctctgtcacccaggctggaatccagtggtgtgattacagctcactggatccttgaactcctggactcaagctatcaagccacctgagtagctgggcctacaggcatgagccaccaggcacagttgattttttttttttttttttggaaatggagtcttgctctgttgcccaggctggagtgcagtgacaggatctcaactcactgtaacctgtgtctcccaggctcaagcgattctcctgcctcagccacccaagtagctgggattacaggctgagccactgcgcccagccaaattaaaaaaaattttttttctgttgagacgggggcttaccacattgcccaggctggtcttggaatcttgggctcaatcgatcatcctctcaccccacagcctcccaaagtgccaggattacaggtatgagccaccactcctggcagtcacccacattttaaaaataagagattgcaagcagggcacagtagctcacgcctgtaatcccagcactttgggaggccaaggcaggtggatcacctgaggtcaggagtttgagaccagcctggccaacatagtgaaaccctgtctctactaaaaatacaaaaagttagctggtgtggtgttgcatgcctgtaatcccagctactcgggaagctgaagcctttttgtatttttagtagagatgggggtttcaccatgttggccaggctggtctcgaactcctgacctcaagtgataacacccacctcggcctcccaaagtgttgggattaccggtgtgagccaccgtacccggcctctttcaggtctttcttcagatgtcaccacctcagattctggccacccttcctgaaactgcacaccctatacatacaccgcccttggctaccgaattttttctcgttagcctttttcaccatctaataggtattgcatttacttatcgtgttattttctgtctctataacaacactgggaggcgtacgagggtaagggctgaaggctctcttgtcctcaaggccatgtactatttattacatacatgaatgaatgaacgactgcatttcttcctttttttattcctcacctacttaaggttcgagctccctgagcccattggccaacacctctggagtctgaccacgcctagaaacactgcgcatgctccgttgctagccagcccaggcagggcgctgaatcggcacaaaccagtctcacttcttgtaccgcagtggggaggttggagagaattttttcccatgaaagggcatacgttgcccgtccccttccccgaagaacgcactaggaatactgttcctgcgtttgcatgagctgtggcaccagcaccgactcagccttccgggcctccctcatgcacggagcctctcactaggtctcacccgcggctgcgttggtgccgtccggcacggtcacgtgggcgagaaaatggcggcccccagaccgcactgcgggcgtcgcggcaggtgaagcggtggtggcagaggcgcctgcggttactggccgggccgacgggtcctgagtctccagagctcggtgaggcgtcccggaggcggcgatcacggtgtggggcccgggtctggcgggcggtggcaccgggagcgcctcgttagggaatccggtctcagggattcgttgactgtggatggggcgggttaaggggtctcgagtcc

SEQ ID NO: 20364 - DNA, 2300 bp, Homo sapien
tcttgacttcataatccgccctccttggcctcccaaagcactgggattataggcgcaagccactgcgccgggcaagaactttttaaataacagctgtattgagatatagtttacatactgtacaattcatctgtgtaaagtgataattcagtggtgtttagtatattcagagtcgggcagccatcatcacataaattttttttttttttttccgagacggagtcttgctttgacacccaaggtggagtgtggtggcatgatctgggctcactgcaacctacacttcccgggttcaagtgattcccctgcttcagcctcccgagtagctgggactacaggtgcgcgccagcacacccggctcatttttgtatttttagtagagatggggtttcaccagattggccaggctgatcttgaactcctgacctcaagtgatctgcccgcctcagcctcccaaagtgctgggattacaggtgtgagccacagctcacggccatcacatcaattttagaacatatccatcaaccccccaaaataaagtccattccagtcactcctgatccccctctcccagcccttggcaaccactaatccacttcctgtctctatggatttgcttatctggacatttcgtatcaatggaatcactcactatgtggtcttttgtatctggcttctttcactgggcatgatgctttcgaggttcatccaatctgtagcctgtgtccgagcctcattgcctcatattgcaaaacaccgtgtcattgtatgaatggagcattttcccttcatctgtggatgtacatttgggttgtgtgcactttgtggatgttatgaataaagctgctatgcacataggtgtgtgagtttttgcgtggatgttacatgtttgtttctcttgggtagatacctaggagtgttactgctgtgtcatgtggcaattctatgtttaacctttttttttttttttttttttttgagactgagtcttgccctgttgcctaggctggagtacaatggtgcgatcttggctcactgcaacctttgcctcccgggttcaagcaattctcctgcctcagtctccccagtagctgggattacaggcgcctgccacgatgcttggctaatttttcgtatttttagtagagacggggtttcactatgttggccaggctggtctcgaactcctgacctcaggtgatccacccacctccacctcccaaagtgctgtgattacaggcgtgagccaccgcgcccggcccataatttttttaaaaacctgttttttgttttttttttcaagacgtagtgttgctctgtcaccctggctgaagtgcagtggcgcaatctcggctcattgcaacctctgcctcctgggttcaagggattcttctgcctcaacctcccgagtagctgggattaactccgtacctcaggtgatccgcccgcctcggcctcccaaagtgccgggattacaggcttgagccaccgcacctggcctaaaaacctgttttgttccctgctgtctcactggggcctggaggagcagcacttaggagcgcaatgcaggtttgttgaataaattaatgactctcagcagtgacgtttgtacgttcgggacacgcacctggtgttgggtcccatctgcgctcattaggcgcgacgtcaatgccgcactgaggtgtgcctggcttcgatctaccctaggaagggtctgccctggggcgccccattccgcgactgtccccagtgggaaccacgccctccatctaccagagccatttctgcaacgtctagcaccccgcgggtcctcttccggccgcggttgccctgggcaacgcgtggagccgcgcttcctgtattgatttgaatcgcgggagacgtcacgtcctcccgagatgcccaacgcgcgcaggcgcagccactcggagtgggcagggcctggctgggtgttgggcagggcctggcggtgtgtggggtaggcggggggcgtggccgcgattagccgcgcgcggcgtgggggcgtggtcgggttgcgggggtgcgcgcggccggccgggcgcgcgcggcggagggagggagccgggaggcagcggaggagcgaccgccgccatattagggaccgcggagcccgggatcccgtcagcggcggccgcggccgggcctgcgggagctgcggaggccggaggcgggcgctgtgcggtgccaggagaggcggggtcggcgggagccagcgagccacgggagcgagccaggtgaggcggccggggtcggggacccgccccccgggccctaggcgg

SEQ ID NO: 20365 - DNA, 2300 bp, Homo sapien
tacctggtgacgcaagccagtgcatgcctcaggtgtctgtttcctaaaaaggcaggtgtcgcctcggcccttctggtctccgtgagtcagcctcctccagggccctcccaggtcttttgtgtctggtgtctctcacagggtgcaacgtcctcagggcgtgtccgcgctgtggcctgggtagagccttgctcctttcatggctgggtcgtgttctggcgtgtggagggccgcgctggttcgtccctcacctgttgatgcgtatgtaggattttgccgtcttttggctgttgtgaattgtgcgtctgtgagcatttgtgtaccagttcctgtgcctttcccattctcctgggtgtgtatctaggaagtgctgggtcatgtggtgactgtgggtttctcttgcgtagacataactttatcatcacttaacattagtagcagaacgggactaagctttcatcactgacagactctgtgtttaacgattgaggaacttacctgccaaagaagtcaccagggactggggagagggatggggagtgagtgttccatggcgacagagtttcagtttgggaagatgagaaagttctagagatgaccgtggtggtggctacacaaccacgggaatgtgattaacaccactgaactgtacgctttttttttttttgagacagagtcccgctctgtcacccaggcaggagtgcagcggcacgatctcagctcactgcagccttcacctcccgggttcaagcgctcctcctgcctcagcctcctgagtagctgggattacaggcatgtgccatcacacccagctaatttttgtatttttagtagagacggggtttcaccacgttggccaggctggtctcaaattcctgacctcgtgatccacccgcctcggcctcccgaactgttgggattacaggcgtgagccaccgtgcctggccagaactgcacacttaaacgtgttcgagatggtaaactttaggtaaattttttcactttttttttttttttttcttgagacagagtcttgctctgtcacccaggctggagtgtagtggcatgatcatagcttactgcagcctcaaactcccagcctcaggcgatcctcccacctcagcctcccaagtagctgggaccacaggtgcgcgccaccacacttgagcccaggaggttgaggctgcagtgatccgtgattgtgccatggcactacagcctgggtgacacagggagacctgtctacaaaaagaaccgctgtatttacagaccggcagcctgtacatggccttgggctgtggtttgctggccctggtgggaagagcgtttttcctaggctaccttctgtctccatggcctgcacggaccttcactttattcttgtacaaacccccttcctgcctcgggctgtgcatctctctctggaacgttctttgcggtctcctcaccgccacttttcttcacacctcaacataaatgccacccccttggaggggccttcctggtttggctgagcctggtcccatgtgggctctgcatgggcccctggatgttaccttggttgtagctgagtgcggatgtggcttgtccacaggaggctgatgtccctggagctgtgacttggtctacctgggcctggacccacgtggccggcccggggcctgtgcgtggccagctcttgcacactgccttagagctggtgtggcttgttgaaccccgttgcagacgcacacgcacgtgggtccccatggctcctcgggacatggaggctgcccacgctcagggaagagtccttgtcgggacctccaggactcttcccagcccccgcctccctcctggggcctccagggcagaaagcccctttcccgggcaggaggacagggtgtggatatacaggctgggagggtctgtgggcagcagccgaggcccaggttgggggagcctcacctaggatgaggctagggctggcagaagatccccacagaggagccaggaggaccccacagtcactctagctcccagggcctggaggtgcaggcgagccccgtggtctccgggcagccggccctgccccactcacctctcctgcccttcccgctgcaggctaaccttgccgcgggccgagccctgcctcgccatggaccaggactatgagcggcgcctgcttcgccagatcgtcatccagaatgagaacacgatgccacgcgtgagtgcccccgccctgcccaccactgtggctccccctcccccagctgcctctgccctggccagcagcctcaggtgtccccactgtcactaaagcc

SEQ ID NO: 20366 - DNA, 2300 bp, Homo sapien
cccaagtcagcactaaacctttctgttctcagcttttcttgcctggagaagagggaggggagaggacaagggccctggctactcctggattcctacagtccttgtccagcctccaagacccacaagtcccttcctctgggaagcccccctggcctggaggtgcaccaggaagaagtggtctggggctggcactaagccatggcccagggaagactgggggacccactaggccaggtgtgtggctcacgcttgtaaacccagcactttgggaggctgaggcaggtggatcacttgaggtcaggagttcgagaccagcctggccagcatggtaaaaccccatctctactaaaaatacgaaaattaagccaggcatggtgtgggggcggggggcacctgtaatcccagctactcaggaggctgaggcaggagaatcgcttgaacccaggaagtggagtttgcagtaagctgagatcgtgcccttgcactccagcctgggcaacagagtgagactctgtctcaaaaacaaaaagacaagagactcaaagatgttttatgctttgaccttgctcttgggaatatgtcccaaggaagtcatcccagaaaacaaggttgctggccccaagacagtctagcagggttcaaaacaatctcatctgccctgcacggaaagcccggttccagctctcatggcaggaactctgcttaaatcctgactagactcccaggtgcccacagaacatgggagtagcctggtcagttacagagcctgtttgagggaccccacatagactcggcttttccactagaaaggcaatttcaagatcaggagaacctcacccttttgaaatgaattgcaagacacatgtagcttttaaaacacaattaaaacagcacaaaattgtctgggcgcagtggctcatgcctgtaatcccagcactttgggaggccaaggtgggtagatcacctgaggtcaggagttcgagaccagcctgaccaacatggtgaaaccccgtctctactaaaaatacaaaaattagtcaggtgtggtgatggacacctgtggtcccagctactcgggaagctgaggcaggagaattagcttgaacccgggaggcggaggttgcagtgagccgagattgcgtcactgcactccagcctgggtgagagagcgagactctgtctcaacacaaacaaaacagcacagaataatattcaatgagaaatgagcccctcacccctgctgtcggccccgtacccacctgccactcactactttctggtgtttcctcccaggagcaggtggtacatgcactcacccccgttattacacacttgcgggagcccattcactgcatctccatttttttaaaaaatagaaatagggtcttgcactgggtgcggtggctcatgcctgtaatcccagcactgtgggaggccgaggcaggcggatcatgaggtcaggagtttgagaccagcctggccaacatggtgaaacactgtctctactaaaaatacaaaaattagccgggcgtggtggtgggtgcctgtaatcccagctactcaggaggctgaggcaggagaatcgctagaacccaggaggcagaggttgcagtgagctgagatcattccactgcactccagcctgggcaaccgagcgagaccctctttttttttttgagacagtcttgctttgtcacctaggctggaatgcagtggcacgatttcggctcactgcagccttgacctcctaggctcaagcgatcctcctacctcagcctcccaagtagctggcattacaggcacgtgccgccatgcctggttgattttttttttttttttttgagacagagtcttgctctgtcacccaggctggagtgcagtggcctgatctcggctcactgcaacctctgcctcccaggttcaagcgattctcctgcctcagcctcccgagtagctgggattgcaggcgcccgccaccacaaccagctaatttttgtacttttagtacagatggggtttcactaccttggccaggttggtcttgatctcctgacctcgtgatccacccgcctcggcctcccaaaatgtggggattacaggcgtgagccactgcgcctggattttttttttttttttttgagatggagtttcgctctgggctgaagtccagtggcacgatctcggctcactgcaacctctgcctccgaggttcaagtgattctcctgcctcagcctcccaagtagctgggattacaggcatgagccaccattcccggctaattttgtatttttagtagaga

SEQ ID NO: 20367 - DNA, 2300 bp, Homo sapien
gttggcgggcacctgtaatcccagctactcagcaggctgaggaaggagaatctcttgaacccaggaggcggaggttgcagtgttctgagatcgtgccaccgcactccagcctgggcgacagagccagactccgtctcaaaaaaaaaaagacttgtcccaagtggagcagcagagaatcagtggaaccaagtctggatccaacgattctccttccatactgcaaggaccttttgttttgttttgttttgttttagagctggggtcttgctgttgcccaggttggagtgcagtggtgcaatcatacctcactgcagactgcaaggccaaatatactgctgtaggccgggcgcggtggctcgtgactgtaatcccaacactttgggaggccaaggcgggtgggtcacttcagttcaggagtttgagaccagcctggccaatatggggaaaccccgtctctactaaaaatacaaaaattagctgggcgtggtggtgggtgctcgtagtcccagctactcgggaggctgaggcaggagaatcgctggaactcgggaggcagaggctgcagtgagctgagattgcaacacagcactccagcctgggtgacagacggagactccatctcaaaaagagagagagagagagaaagaaagaaagaaaactgctggagacccgcccgatgcagaggctcatgtttgtaatcccagagcttctggaggccagggtgggaggcttgcttgagaccaggagtttgaggtcaacctaagcatcatagtgagaccctgtctctccaaaattaaaaatacaaaagttagccacatgtggtgatgcgtgcctgtagtcccagctacctgggaggctgagacaggaggattacttgagccctgaagattgaggctgtagtgagccatgattgcaccaatgcactgcagcctgggccacagagcaagaccgtttctttctttctttctttcttttttgaggcggcgtttcactcttgttatccaggctggagtgcaatggcgcggtcttggctcactgcaacctctgcctcctgggtcaagcgattctcctgcctcagcctccaaagtagctgggattacaggcacctgtcaccacgctcggctaatttttgtatttttaatagagacgggtttcaccttgttggccaggctggtctcaaactcctgacctcaggtgatccgcccgcctcggcctcccaaagtgctgggattacaggcgtgagtcaccgcgcccgtctcaagaccctgtttctgaaataaataaaaagaggaaagaagagaaaatgctgctggaaggagtagggcctgagttagggggaaccgcacacaccccctggaggaacttgaaaccctcagtccggtgacccgtttgtgggaggacgttggttggacggggagggtcgcgcgcacaggcctgggagtcacagacgcctgactcactgcgagcctcgggcaactctgttcctcgcctgtaaaatgagagtgaaatttgcgtcaccacgtggggctctttgcaggcaacgctcgttaaaggccagctggtactattatgttgattacccccatcattaccgttagtaaccaattaattagtgttgttgcgtcctctccgcgcccgatcgcgtctctctaggccggggagtcagcggaccccgaggccagctcgggctcagacctccccccaaccccaaatccagagcccgtcccactcgctccaccccggcccgcagtgggctgtccagctccgggtggactggggtggtgcgggcctggaggccgggtctgggtgggagccggcggtgccctctggtccatttccttccccagtctatgggggtgccggccactcctgcggcgcgctcggggttcgccctcatacccggcgggcgctaggaccgcgtgggcgcccgtcgtagaggcggaacgagccctgcggccacgcccctctcctctctccttggcgattggctgcggttccccggggcgcggctccgattggctcaggcaccggaacctccccgccctgccccgcccggcgcagtcgcccggctctggggcccggcggctgcagagtcgagcgtggggcggacgcggcggacgtgggtgagggcgcggccgtaagagagcgggacgcggggtgcccggcgcgtggtgggggtccccggcgcctgcccccacggcacccaagaaggcctggccagggtaccctccgcggagcccgggggtggggggcgcgggcccggcgccgcgatgggcccgggacccccagcggccggagcg

SEQ ID NO: 20368 - DNA, 2300 bp, Homo sapien
tgtaaaatactttcatcacccaaatgaaaaccgcatccctctcagtggtcattccccacccactggcacccacacgtccccctcctgtctctgtggatgggcctttcctgaacattctgatcacacactgtgtgacctttgtgtctggcgtctctcactgagtgtgatgtcttctaggtacatccatgctgtgacttgtgtcagagactcgctccttttttttatggctgataatattctttttttttttttttgagacgtagtcttgctctgttgcccaggctggagtgcagtggcacaatcttggctcactgcaacctctgcctcccagttcatgggatcctcctgcctcagcctcccatgtagctgggattacaggcgtgcaccaccacgcctggctagtttttgtatttttaatagaactggagtttcaccatgttggccaggctggtctcgaactcctgacctcaagtgatccgcctgcctcccaaagtgctgggattacaggcgtgagccactgcgcccggcccatggcggataatattctgttgtaaggatatatcccgtcatcgatccatgcatcattagcagacgtttgagttgttttcactttttggctattatgaatcacgctgctaccgacgcttgtgtacacgcttttgtttgaacacctgttttcagttgtctggagtatattcctaggagtgaactgctgaattgcatggtgattccacatttatttaaccctttgaggaaatgccagtctgttttccaaagcagctgcatctgcctcctagacatctgaaggattcaatgaatgtgtattgagcatccaccatgggcaatgctgtgaaccaaacaggcaggccacagggagaagccgacttatggaggcaaaaaaaaaatcagagaaggcctggctgagcaagtgacatttaagcggacttgaggaagaggaagtgggccgggcgtgggggctcacgtctgtaatcccaccactttgggaggccgaggcgggtggatcacgaggtcaggagttcaagaccagcctggccaagatggtgaaaccctgtctctactaaaaatacaaaaattagccgggcgtggtggcaggcgcgtgtaatcccagctactcgggagggtgaggcagagaattgcttgaacccgggaggcagaggttgcagtgagccgagatccagccactgcactccaccctggacgacagggtgagactccgtctcaaaaacaaaagaggaggtgagcagccccaacttgggccagaagcctagactgctgctgggaggtccctgatccaccagagcggagcctcctgacccatcctcacgaagtccttgccatctcccttcaccaccatctttccccaaacacttccagcccagctcccaaccccaccccctgcctgacccacacccagttctcagcttcccagcatcccagtctctctgtcctggatatcgtgtgatgtccccgttgcacaggggggaaagccgagaccccagagggagagcagcccctatggccagaagccctcggatccggacgtcgggggctctaaactgagtaaatacataggaaacttctccgctaggttttgcaggatgttaagaacaggtcccaccttgcctagggctggggactgcctcgcaggaccttaaccctagcaacccacctccgtccccatggcaaccggggcggggcccgacccggatccgccggtcgccccatccggcagcggctgggagtcttgccttcagagagggaggaggagtccgcgcctctcctactggccctttaagaggctccgcccggcaagtccgccactcgctcccgattggtcccgagcgcggccgagcgcagccgaacttgacgcaccgcccgcagccttccttaccaacctcccacgcgactcagcaacctccccaaccaatcgccggccggcgcgccgatcggtatctgcatgggctcgcccggggggaaggtctcacccaatgggaccgttcgccgaggccttcattagcatgccgggggcggggaggggcggggcggccgacgggggcgggctgcgggcggttggttggagcgtcgcgcagtcgggaggtccgggaaagtttctttggaggtgaaaacagccgcggaactccgggccctgagagggggcgggggtgcaggggtcccagggccgggccggggtctttcctggcccgggggaaaccggcccaggcctcccggggggggcaatcgcccaacaaaggattcttggggcgcccgccctcgaggac

SEQ ID NO: 20369 - DNA, 2300 bp, Homo sapien
tatttaaccctttgaggaaatgccagtctgttttccaaagcagctgcatctgcctcctagacatctgaaggattcaatgaatgtgtattgagcatccaccatgggcaatgctgtgaaccaaacaggcaggccacagggagaagccgacttatggaggcaaaaaaaaaatcagagaaggcctggctgagcaagtgacatttaagcggacttgaggaagaggaagtgggccgggcgtgggggctcacgtctgtaatcccaccactttgggaggccgaggcgggtggatcacgaggtcaggagttcaagaccagcctggccaagatggtgaaaccctgtctctactaaaaatacaaaaattagccgggcgtggtggcaggcgcgtgtaatcccagctactcgggagggtgaggcagagaattgcttgaacccgggaggcagaggttgcagtgagccgagatccagccactgcactccaccctggacgacagggtgagactccgtctcaaaaacaaaagaggaggtgagcagccccaacttgggccagaagcctagactgctgctgggaggtccctgatccaccagagcggagcctcctgacccatcctcacgaagtccttgccatctcccttcaccaccatctttccccaaacacttccagcccagctcccaaccccaccccctgcctgacccacacccagttctcagcttcccagcatcccagtctctctgtcctggatatcgtgtgatgtccccgttgcacaggggggaaagccgagaccccagagggagagcagcccctatggccagaagccctcggatccggacgtcgggggctctaaactgagtaaatacataggaaacttctccgctaggttttgcaggatgttaagaacaggtcccaccttgcctagggctggggactgcctcgcaggaccttaaccctagcaacccacctccgtccccatggcaaccggggcggggcccgacccggatccgccggtcgccccatccggcagcggctgggagtcttgccttcagagagggaggaggagtccgcgcctctcctactggccctttaagaggctccgcccggcaagtccgccactcgctcccgattggtcccgagcgcggccgagcgcagccgaacttgacgcaccgcccgcagccttccttaccaacctcccacgcgactcagcaacctccccaaccaatcgccggccggcgcgccgatcggtatctgcatgggctcgcccggggggaaggtctcacccaatgggaccgttcgccgaggccttcattagcatgccgggggcggggaggggcggggcggccgacgggggcgggctgcgggcggttggttggagcgtcgcgcagtcgggaggtccgggaaagtttctttggaggtgaaaacagccgcggaactccgggccctgagagggggcgggggtgcaggggtcccagggccgggccggggtctttcctggcccgggggaaaccggcccaggcctcccggggggggcaatcgcccaacaaaggattcttggggcgcccgccctcgaggacttccctgcccctggatccggcccccccagcgctccgggcccggcatcccggggctctccatcgcggggtaccccagttcgcggtctgccatcgggcagcccgggcgctactcacctccgcccgcgtccgtgttccaggtccggcccggagcggccatgtcccacggccccaagcagcccggcgcggccgccgcgtgagtgcactgatcccctccccacgccctcgctactttcccggctgcagccctagctcctgaacccctgacccagtccctcccgccggagtcttgactcccccacctgggtcagggggcttctccctccacccaattctgcaccccccacctcggcctccagtccctcccaggagccccgcttgtcccaccttccccggatactgaccccatcagaccctgcctcctcgggctcatgcactctcgctgcagccccgccgtcgggggtcaaaacgccctggggtgggcttttgggggaggggagattcttgggacggggctgaccgcggtatccttggctccaggccggcgggcggcaaggctccgggccagcatgggggcttcgtggtgactgtcaagcaagagcgcggcgagggtccacgcgcgggcgagaaggggtcccacgaggaggaggtgagagtccctgcgctgagctgggggaggccccgggctcccgccccagcctcgaagccccgccccaggctggatttgaattgcttgtggc

SEQ ID NO: 20370 - DNA, 2300 bp, Homo sapien
gctctaaactgagtaaatacataggaaacttctccgctaggttttgcaggatgttaagaacaggtcccaccttgcctagggctggggactgcctcgcaggaccttaaccctagcaacccacctccgtccccatggcaaccggggcggggcccgacccggatccgccggtcgccccatccggcagcggctgggagtcttgccttcagagagggaggaggagtccgcgcctctcctactggccctttaagaggctccgcccggcaagtccgccactcgctcccgattggtcccgagcgcggccgagcgcagccgaacttgacgcaccgcccgcagccttccttaccaacctcccacgcgactcagcaacctccccaaccaatcgccggccggcgcgccgatcggtatctgcatgggctcgcccggggggaaggtctcacccaatgggaccgttcgccgaggccttcattagcatgccgggggcggggaggggcggggcggccgacgggggcgggctgcgggcggttggttggagcgtcgcgcagtcgggaggtccgggaaagtttctttggaggtgaaaacagccgcggaactccgggccctgagagggggcgggggtgcaggggtcccagggccgggccggggtctttcctggcccgggggaaaccggcccaggcctcccggggggggcaatcgcccaacaaaggattcttggggcgcccgccctcgaggacttccctgcccctggatccggcccccccagcgctccgggcccggcatcccggggctctccatcgcggggtaccccagttcgcggtctgccatcgggcagcccgggcgctactcacctccgcccgcgtccgtgttccaggtccggcccggagcggccatgtcccacggccccaagcagcccggcgcggccgccgcgtgagtgcactgatcccctccccacgccctcgctactttcccggctgcagccctagctcctgaacccctgacccagtccctcccgccggagtcttgactcccccacctgggtcagggggcttctccctccacccaattctgcaccccccacctcggcctccagtccctcccaggagccccgcttgtcccaccttccccggatactgaccccatcagaccctgcctcctcgggctcatgcactctcgctgcagccccgccgtcgggggtcaaaacgccctggggtgggcttttgggggaggggagattcttgggacggggctgaccgcggtatccttggctccaggccggcgggcggcaaggctccgggccagcatgggggcttcgtggtgactgtcaagcaagagcgcggcgagggtccacgcgcgggcgagaaggggtcccacgaggaggaggtgagagtccctgcgctgagctgggggaggccccgggctcccgccccagcctcgaagccccgccccaggctggatttgaattgcttgtggctccgcccacagcccattttcctctggaagctgagaccccgccccgtgccagctgccacgcccctgacaggtcctctgccactctaagtccaggccccgcccaccgcacaatgccagctctgcccactctaaggtcccgcccacttccactccttgggggcggcaccctccccttggtcctgtgggcccgttctccagcagaaaaccacgcccaccaagcagaggccacgcccacaaccgaagtcaacgccaaccctgtactcaaacctcggcccatagttcctcagatcccctcacccctggccagggatccctctaacccaccgtgtcccgactgctgaccgggccctacctccatcttttccgggttcttcctcccagctaggccccgcccccatccccgcccatacgcgttaggccccgcccatgcccctctgagccctgccccagtacgccaggcccccctcccaacgacgcagcccggttctgcagccggtgaagaaacgcggctggcccaagggcaagaagcggaagaagattctgccgaatgggcccaaggcaccggtcacgggctacgtgcgcttcctgaacgagcggcgcgagcagatccgcacgcgccacccggatctgccctttcccgagatcaccaagatgctgggcgccgagtggagcaagctgcagccaacggaaaagcaggtgggcggggcggggcgccgagcagggctggcggggtccacggactaccccccagtagccccgacccccaaaggattccacgtgcagggtttttccttcttcctggagaaatgcccacccataaccaactttttttt

SEQ ID NO: 20371 - DNA, 2300 bp, Homo sapien
ctgaccccatcagaccctgcctcctcgggctcatgcactctcgctgcagccccgccgtcgggggtcaaaacgccctggggtgggcttttgggggaggggagattcttgggacggggctgaccgcggtatccttggctccaggccggcgggcggcaaggctccgggccagcatgggggcttcgtggtgactgtcaagcaagagcgcggcgagggtccacgcgcgggcgagaaggggtcccacgaggaggaggtgagagtccctgcgctgagctgggggaggccccgggctcccgccccagcctcgaagccccgccccaggctggatttgaattgcttgtggctccgcccacagcccattttcctctggaagctgagaccccgccccgtgccagctgccacgcccctgacaggtcctctgccactctaagtccaggccccgcccaccgcacaatgccagctctgcccactctaaggtcccgcccacttccactccttgggggcggcaccctccccttggtcctgtgggcccgttctccagcagaaaaccacgcccaccaagcagaggccacgcccacaaccgaagtcaacgccaaccctgtactcaaacctcggcccatagttcctcagatcccctcacccctggccagggatccctctaacccaccgtgtcccgactgctgaccgggccctacctccatcttttccgggttcttcctcccagctaggccccgcccccatccccgcccatacgcgttaggccccgcccatgcccctctgagccctgccccagtacgccaggcccccctcccaacgacgcagcccggttctgcagccggtgaagaaacgcggctggcccaagggcaagaagcggaagaagattctgccgaatgggcccaaggcaccggtcacgggctacgtgcgcttcctgaacgagcggcgcgagcagatccgcacgcgccacccggatctgccctttcccgagatcaccaagatgctgggcgccgagtggagcaagctgcagccaacggaaaagcaggtgggcggggcggggcgccgagcagggctggcggggtccacggactaccccccagtagccccgacccccaaaggattccacgtgcagggtttttccttcttcctggagaaatgcccacccataaccaactttttttttttttttttttgtgagatggagtcttgctctgttgcccaggctggagtgcagtggcgtgatctcagctcactgcaacctccgcctcccggcttcaagcaattctcctgtctcagcctctcaggtagctgggattacaggcgcgtgctaccatgccctgctaatttttgtatttttagtagaaatggggtttcgccatgttggccaggctggtctcgaactcttgacctcaaatgatccgcccacctcagcctcccaaagtattgatattaaaggcgttagccaccgtggccagcccatgaccagcttttgggggcgcggctagcaagaggcaagacagattgaaaactggatgaccaacaaagatatgtctaagaagtcaggatggggcctggattttttgcgaaacccgattttcatatcctgttagtttaaaaattgcaaaaacatcacggaaatgtaacaaaagccatcactgctttgcatccctgtaagtgagatttcaaagagagaaacgggtgcgggagggagtccaggcatccgcatacgctggaggttgggttcctgcccatgactctggcgtccgggagtggtttgtcagggctggaggtggggaagagtccggggcatgggaagtgaggtgggagctcggaggtccctgagcaacaggctgaggagccggttctgtctgcctggagggaatagggagctatagaaggttcaggagaggggagggtgctgtgaaagcagagtgataaagactggatcctggcgttggaggcttcccctgcttcaagccttctggtgctgccccccagcggtacctggatgaggccgagagagagaagcagcagtacatgaaggagctgcgggcgtaccagcagtctgaagcctataagatgtgcacggagaagatccaggagaagaagatcaagaaaggtgggaggggtcgggcgcggtggctcacgcctgtcatcccagcactttgggaggccgaggcgggtgtatcacctgaggtcagaccagcctggccaacatagtgaaaccctccccctctactaaaaatacaaaaattacctgggcgtggtggcgggtgcctgtaatcccagctactcgggaggctgaggca

SEQ ID NO: 20372 - DNA, 2300 bp, Homo sapien
gctgggcggggtcgcgctcgatggctccgtgaagccgggccatgtagaagtccagagtgcccagcgtgggcgtttcgcccgtgcctgggggacaggcgggaaggtcaggcgagggtgccggggagtcgcggggcgggggctccaggggcagcggtagggggtgactcagggcgggtcgcgcgggcgctcagaggtccggacaccgccagcgcaggagcggcgcagggtgggctaaggtaagccggggcaggaggatggcgaggacggggacagggtggggacgcggggctagagcggcgggcgtccagggtccgctgaggacagtcacggacggagggaacgaggtcggggaggtggggatgacaccggggggctggggtcgcgtgggacgtgactggggtggtggagggggctcaggcgtcagcggggcgtggggagggatgggtgacgggggcgtggggaggtggggtgaatgggaacgtggcgtggcgagcggggaggctgggtcagtgctcaggctggtcgggggctggcgagggagaggggccagcgacggtggggccggtagggagcggtgggggcgcgaagggtgggggcacaaaggggctgcgggaggaagcgagtaagcggggacgcgtcgggagaggtcgtggccgggaggcgcggtcggtgggggcgaggtcagggagccggccgagtaacggggcgcggagcggagctcgggtgtggtctgggaagaaccagacggagctatggggtaggggtgcgggggtcggggaggaggcggagctgggggtgatgagggcggggcgataggcggggccgggtgactggggaagaggggacggggcgatgggcggcgccgggcgacaggggaaggggggaagggaggagggggggggaggcgggcggggccgggtgaccggggcgggactgggagatgggcgtggcccgcacccggcaccggcagtgaggcgaagctggcggtgagcgcctggcgcacggcctggagctgctgctgcagcgccagcgtcctccgctcctccagcgccagctcctgctccagacgctcgcgcgcgctgctcatgctctgcgtgtgcctctgcagtaccgcgttctgctcctcgaaggccacattcatcttccgcaagcgccgaagctccgcctcacgcgctgcgccggggggagcggggtcaaagcctgcgcctcccctttcccctacctccgggcttttgcccgggacgtgcccctgcccaggtttccctcactgcgccctctgcctcctgctccacatcagcctctggagcgacagcgtgcgcctggacgctcatagggaacctcccgatccgcctcctgcagtcttggggccctcctggcccacgcccccctctaccacccagtttcacggagttcgcatcaggagcgcagttaccgctcacctttgttttggtccaagaactcttcagtgaagatgggaacatcgaaggtggagaagccatcgcagtccccaccctaagacgaagggacaaggtggcaatttactggtggtaggaggcagccacgctctctgggtgtgccccaagcctaggagggtctcctgggacaccccggtgggagtacaatcaacagcgatcccacggtgcagtggcaccgcccctgcttgcacacatctgggcgagcactggctctgactcagggttctagaagcctccagacctttctcccccaggtgctttgagaggaagaaggtcgcttaccttgtgtccattcaggagagtgttcatgagcccagagctcgagtcttctggcgggggaggggaagggcagggtcagcctcccaggcctccagggaccacgccctgcaccctaggtcagcgctgctcagccggctccagctccccacttgagtgccccgcgtctgggcatcccccatcgctgtaccgagtgagcccccttcactcctgtctggctatgtatctttcccccgcccaacccacgggactgtgccccacggagggaggccctgcctgggctgaggtcgcaccccacagagcaggaccccaactgctcgcaccggcccctcccacctttcatttttctttttcttttttttttttttttgagacggagtctcgccctgtcgccctggctagagtgcaatggcgcaatcttggctcactgcaacctccacctcccgggttcaagcaattctcctgcctcagcctcccgagtagctgggattacaggcacccgccaccacgcccaggtaatttttgtatttttagtagagggggagggtt

SEQ ID NO: 20373 - DNA, 2300 bp, Homo sapien
ctgctgtagggcccgccactgcaggcaggatggctgtttattgagccgacattcctgggtaggaatctgatggatacgtaggtgtttctgacattgcactccagcggatttttaccaacgcctcctggtgcctggggtctcctccttcatctgtgacctggacatccgttcattcctcaccaaagatcactgggcacctgctgtatgccaggcactgtgccctggacactgggcatggggacagagcaggggaacagcccccaccctcctggagctgacattcctccagtcctggggacaaacaggacaaaagatgaaatgaaatatcagcagggggctggggctcaagcctgtaatcccaacattttgggaggctgaggcgggaggattccttgaggtcaggagttcgagaccatcctggccaacatggtgaaacccccgtctctactaaaaatacaaaaaaaattagctgggcatggtggcaggtgcctgtaatcccaactaatcaggaggctgaggcagaagaatcgcttgaacccgggaggcagaggttgcagtgagccgagatcgtgccactgcactccagccttggcaagagagagagactccgtctcaaaaaataaaataaaataaaatatctgatatgtcagatggtagctttaaatgctgaagagaagctgggcacagtggctcacatctgtaatcctagcactttgggaggccaaggctgaaggatggcctgaacctcctggtcttgagtttgagaccagcctgggcaacacagtgagatcccaactgtacaaaaaattaatcatgtttctaaattaaattttaaaaaactgaatgcggccgggtgcggtggttcacgcctgtaatcccagcactttgggaggccaaggcaggtggatcacctgaggtcaggggttcgagacaagcctgaccaacatggtgaaaccctgtctctactaaaaaatacaaaaattagccaggcatggtggtgtgcgcctataatcccagctactaggggggctgaggcaggagaatcgcttgaacccaggaggtggaggttgcagtgagccgagatcacgccattgcactccagcctgggcgacagagctagactccgtctccaaaatcaaacaaacaaaccaaaggctgggcgtggtggctcatgcctgtaatcccagcttttttggaggctaaggtgggtggattcctgaggtcaggagttcaagaccatcctggccaacatggtgaaacctcatctctattaaaaatacaaaaaaattagccgggcatggtggtatatgcctgtaatcccagctactggggaggccgaggcatgagaattgcttgaacctggtgggcagaggttgcagtgagctgagatcgtgccactgaactccaaactgggtgacagagcgagactccagctcaaaataaataaataaataaaaataataaaataaaataaaacaatgacctcgcctagcagagggtgagtgctccagcaccctcagctgtccctgtccttttttttttttttttttttttttttgcgacggagtctcgctttgttgcccaggctggagtgtaatggcgccatctcagctcactgccacctccgcctcccgggttcaagagatctcagcctcccgagtagctgggattacaggcgcccgccaccacgtccggctgatttttgtatttttggtagagacggggtttcaccatgttggccaggctagtcttgaactcctgacctcaggtcatctgcccgcttcggcctcccaaagtgctggaattacagacgtgagccaccgctccaggcctgtccctgtccttatttgtggtccctgttcttccagggtcctgagctcaggcccccccggactgcgggtatccccggggagggcacagctggccctggcagggcccggacacctggggcccgacccacccctgcgcaccccgcggtgtcgccttcccgggaggctcgggttcccagatccccttacccgggcgtctcggctgtcgcgccctgggccgggggaggggaggctgcaggaagcggcggatccggcggcggcggcgagggcccgggtgggtggccgaacttctcccgccatggagggagcagcggcccgggaggcccgggggaccgagaccccgcgcgcgtctgcgcccccgcccgcgccctcggagcccccggccgcgccccgcgcccgcccgcgcctcgtcttccgcacgcagctggcgcacgggagccccacgggcaagatcgagggcttcaccaacgt

SEQ ID NO: 20374 - DNA, 2300 bp, Homo sapien
tgtttgtttgtttgtttgtttgttttttgagacagagttttgctcttgttgcccaggctggagtgcaatgacgtgatctcggctcactgcaacctccacctcccgggttcaagctattctcttgcttcagcctcccgcgtagctgggattacagacatgcgccaccacgcccggctaatttttttgtgtatttttagtagagacggggtttctccatgttggtcaggctggtctctaactcccgacctcaggtgatctgcccgtctcgacctcccaaagtgctgagactacaggcgtgagccaccgcgccctgcaatttttgtatttttagtagagacaggggttcaccatgttggccaggctggtctcgaacttctggcctcaagtgaccctcccgcttcggcctcccaaaatgctgggattacaggcatgaacaatcgcgcccggcccatttatatctacttttaatgacacacagattcaaaggtggtttgattgcaggttccagggctaacctgtagccctcccattacaggctgctggaagaattctaggtggtaccacccatcaagtgattaggaaacactcaagaaacaaggtgggggaggaaccgaatcctctatgtccctccccatccttcccagccctgccctcgtctgctccgggtgaggcccaatgcacaaactccagagattgaaaacttctggacccaaaggaaaataaaaccaaaggcagagatatattttggcaagaaaagggggtgcccccgttcacattcaatcctttctggacagagccttccctgttggaggttcaaaaggaagcaactgtaccccagcaagtaggtcaaattcagggtcaaagagcatgcaaggccgggcgcagtggcttacgcctgtaatcccagctgctcgggaggctgaggcacgagaatcgcttgaacccgggaggcggaggttgcagtgagccgagatcgtgccactgtactccaggctgggccacagagtgagactccgtctaaaaaaaaaaaaaaaaatggccaggtgtggtggttcatgcctgtgatcccagcactttgggaggctgaggctggtgaatcacctgaggtcaggagttcaagaccagcctggccaacacggtgaaaccccgtctctactaaaaatacaaaaattagccgggcgtggtggcgcgcgcctatagtcccagctactcaggaggctgaggcaggagaatcgcttgaacccgggaggtggaggttgcagtgagctgagattgcgccactgcactccagcctgggggacagagcaagactccgtctaaaaaaaaaaatagcaatgcaagaccctcttccaatgtctgcatgcccttcctggggttgggagggacgcagagaaggggtgggagctctggatgggaaaaaggggccgaggaagggagagtgcttggtaaaaggatcagggaggagttgggggtccccgggttggattggggtcaacccaaaaccctgctgctgatgcccactgtccatccagcacccccagcccctgaatcctcagaacaggcagatgggctgtccgaggggccaagggctccgcggaaaggcgcgggaggggcgctctgtccacttcctactgcagcccggagcgctgcgtgagctggggctggagggacagcgacctgggccgggtgctgaggcgaggctggagacgccggagcacggcgcggcggaacaggatatacacccaggggtccaggatctggttccaggtggccacgcgcaagtagatgagcagctccttctccgtggtgcgggacagctgcccggcggggctcatggcaggcgggtttcgcagcactgtctgggcgatgaagacctgcaaaggggagagctgtcagcctgggcccccgcctccagccccgcccgccccggtccctgcccggggtcccttgagatccagggtccactccgttttttaattttatttttgagacagggtctcactctgtcgtccaggctggagtgcagtggtgcgatctcagctcattgcaacctctgcctcccgggttcaagcaattctcctccctcagccttccaagtagctgggattacaggtggctgccaccacacctggctaatttttgtatttttcgtagagatgggggtttcaccatgttggccaggctggtctcgaactcctgacctcaggtgatccaccagcctcagcctcccagagtgctggaattacaggagtgagccactgcgcccggccagtgtccactctgttactgcattgctgggt

SEQ ID NO: 20375 - DNA, 2300 bp, Homo sapien
tttttttttttttgagacggagttttgctcttgttgctcaggttggttcagtggcacgatcttggctctggggccctgtttccggcccacaaacatcacttcccctgtcgggttcaagcgattctcctgcctcagcctcccgagtagctgggattacaggtatgcaccaccacacccggctaatttttgtatttttattagttgagatgcggtttcaccatgttggtccggctggtctcaaactcctgacttcaggtgatccgccctccttggcttcccaaagtgctgggattacaggcgtgagccaccacgcctgaccgtaataggaccttttgagccttaactgcctggcacctccatctcgcacacagtcccattcgcccacctttgcccacccagtccctccaggtgacttgggggtgtgtcagggcaagaggcaggagacccgggttccatcctagcctcctgggtgactttacaaccagccacaaccctctggactttgacatgacccatggggtatggggagctggttttgttttgttttgttttttagacggagtctcgctctgtcacccaggctgcagtgcagtggcacgatctcagctcactgcaagctcctcctcccaggttcacgctattctcctgcctcagcctcccgagtagctgggactacaggctcccgccaccacgcccggctaattttttgtatttttagtagagacagggtttcactgtgttagccaggatggtctcgatctcctgacctcgtgatccgcccgcctcggcctcccaaagtgctgggattacaggcgtgagccaccgcacctggccgttttgttttcttgagatggagtctcgctctgttgtccaggctggagtgcagtagtgcgatctcggctcactgcaacctctgcctcccgggttcaagcatttcttctgcctcagtctcttgagtagctgggattacaggcgcccgccaccatgcctggctactttttgtatttttagtgaagatggggtttcaccatgttggctaggctggtttcgaactcctgacctcagatgatccacccacctcaacctcccaaagtgctgggattacaggcattagccactgcacccagccagaagctggtttttgaaccatctcattttatttttacttcactcatcacacctggccccatttttttgttttttggggtttttagcgtttttgtttgttggttggttggtttttttttttttgagacagggtctcactgttgcccaggccggagtgcagtggcacaattgtagctcactgcagcctcaacatctggggctcaagcaatcctccaacctcagcctcccaagtagcagggattacaggtgcataccactacacccagatatatatatattttaagagatagggtctcgctatgttggccaggatggtcttgaactcctgacctcaagtgatccgcccactttggcctcccaaagtgctgggataagaggcgtgagccactgcgcctggcttggctccgattttgttgtgcattgtggctgagcgttagccccacacagagtaacaggtccccgcctgctgctctctaccaaccatccctggggaacctgccattccgaagaagtgttttttgttcccaaaatagaactggatttcagggtttatttcttattataaaaccgacaccatgaaaatggaggaaaaggccgggcacggtggctcacgcctgtaatcccagcactttgggaggccgaggcgggaggactacttactacagggtatgtgcctgtagtcccagctatttgggaggctgagatggggggatcacttgggtccagaaggtcgaggctgcagtgagccttgattgcatcactgcactccagcctgggtgacagagcaagactctgtctcaaaaaaaaaaaaaaaaaaaaccggagaggatatttgagctggggcattgaaggttgtgtaggagttcaccagagctacttacactgaaatgcagaattaatcacaagcaaatcttctctcgcctcccaggtgtgcctgaaccagtgccagcctgccctgtctgcagcatcggcctgatggggtggtgactgatccctcagggctccggagccatgtggcccaacggcagttccctggggccctgtttccggcccacaaacattaccctggaggagagacggctgatcgcctcgccctggttcgccgcctccttctgcgtggtgggcctggcctccaacctgctggccctgagcgtgctggcgggcgcgcggca

SEQ ID NO: 20376 - DNA, 2300 bp, Homo sapien
ccctgtgagcctcgctttccccatctctctagtgggggctccccagggagcatgtacggagctccgtcacacaggggccagcagggaccagggggcgggacccgggaggtgcagctggtggttaatggtggaccacaagttacagtgattccaccaacatgcacctcaggccaccaccgtgtgtgcacactcgagacacacagacacagccagacacacacaggcagaaacacagcagacacacaggcagaaatgtgacagacagaaacacagcaggcagacgcacagacgtgcacagacacacacacagaaacatggcagacacacagacacacacacagatagaaacatgacagacacacaggcagaaatgtgacagaaacacagcagacagatgcacagacatgcacagacacacatacagaaacatggcagatacacagacacacacagatagacacacacagaaacaccacagacacacccagacagaaacatgacagacacacaggcagaaatgtgacagacagaaacacagtagacagacgcacaggcatgcacagacacacatacagaaacatggcaaatacatagacacatacagatagacacacacagatggaaacatgacagacacagacacacacaagcagaaacacaacagacacacagacacacgcagatagacacacacaagcagaaacacaacagacacacagccacacacagacacatacaggcagaaacacgacagacatagacacacacagatacacacataggcacacaggcagaaatgtgacagacacagacagaaaaacacagacacacaggcagaaacacaacaggtacatagatacagacagacacagaaagacacacagaagaacacacagtatttaacagtcacagactctcggcagaaacaaacacacggtcacacacacaaaaccaccacacacgcacagacacagacacacaaccagggccatgcatggttcactcccagagacaagatcacacacacagccgcacaaccacactcgatccctgccacacccagggcctgggccccctccccggctgcagccccctgagtctgggacccccattcacagccatgtggccccacagagaccagagagccccccggacagaatcagcctgggccgcacccagacccagccgcctgggcgcccagggcaggcctcagggcaccatgccacccgccgggccacacaggggacacctggcacctggccgctgtcaccgcgggctttgcgacacacccacagcagggcagggccagcgccggatgcgcccagcagcccgggctcacaccagagcagtgcatcccgccctaagccagcggggcgacctcaccttcagagacctcatctgcggggctcccacctggctggatcccgcgcccgggggtccgggcgccgtctggagctgagcaggcagatgtgcgggcgccgagggtggggcgagggctgggggcgggcagagggaggggaaggacgggctcgagcgggacctcccagggaaactgagtcagtctggctgtgaccaggggcgggcccagcagaggacccacacagatggagggcgtggcggcacaggacgccctggggtcgcggcctggaggggtccgcgggggctaagccgagctgggacgggtgggggccgctggcagcccgcggctcgctctctccgtccagtctctgtctcccgctgtctctcatcagccccgcccaccctgcgctggccacgcccctcgggcccgggcctggctgacttggagtcagtgggtgccccccgcacgccgggacaccctacagccttctggggaaggcggcgcccttgggacccccaggccaccggtggcagggatgcaatggcccgcgtaggggtggcaggggcgcttcctcgggagcctcagcccctccagccgcccagcgccctgccaggcctcttcccggcgctcccgccgccaggcccgcattattcaccatctgggcagcacccaaggcctggagggggcggggcaggtccaggcggatcggctcccgggggtcgcccagactccagggctccaaattcactgggtgcgctggaacgcggcacacagtagtagtatgccctgcttaatacatacaggacatatttgaggccccttccaggggtggggtgggaggacagagggatggggggtgcaccagacgacacagccagactgagaaaggtggtcccagagcaggtgagccgggagggctggggtgatggcatcgcatggg

SEQ ID NO: 20377 - DNA, 2300 bp, Homo sapien
aagaatagacgctccctgcccggcccccgccggaaaccgcagccacgggggtacatcctgagcctggcctctgttcccaccatctgccccccagcccctcacaactcctcccaccagagcctcctgtgctcccattgaacccgaagtgctggcggggggtggggggcggggggcgggccaagaccgggagaccagcaaccagccccagatgacagggaagcccagtgctcatgttccaatcccacacatgggcgtggcattgttccccctttgtgcctcagtttccccatctctaaaatttaagagtatctttaccccctgccttgcagagatgtggtgaggcttaagctaaatgcaagtgtccttctctgaactctgcccaggctgtttcccagaagagtcattgtccttgttatctcagggccgaggacagaggaagtggggacaggacagccttcctccgtctctcactgccccctcatctggagccccagccccacatcctcctcccccaacatctgccctccttgcagttagtgtagcaagggcctcatgctctctcttgcctccaaagctttatacatgcaattcctgtcactgccacgtagcccagacctggggagctcctattcatcctacaaaaccccacttcccatgccctctcctcacaagatgtcttcctagctcacctctgggcttccctaggccctgtctcttcctttggcccagccctgaccccagggggctggaacagcctgtgtccagttcattctccagcctagggcatcctgaagggcaggcctggtttcaggtctcacttggagctcataattgtcccactgtataagctgaacacagagaggggttggggagagtaagacttggagattaggtcggcttcacgggaaagcagccttggagccagggttttgccacatccataggagttggatagcctccttgccaggaaagagagaagttgtgttaaatggctggtgacttaatgggatagagctttgggagggaggttgggtgtggccgaaggccaggaggaggaaggatagtgggcggggtagccggggaaggggcttccggactgggctgacgagagggccgggccaggctgggaatacccctcactcacagcctggactagcagccctcccgggcccaggggacggggtggggtgcagtcagggcaaggtcagcttgtccggtcccactccaggtccctaactcaaggttctgtccggctcgggtgtacaaacaaggccaaggaagcccaaggtcccccctctgcaaagagacggtcccagtccctgcgtccggcaccttctcagccattcctgttgggctccatccctccttccccagcccgagctggggggtggccaggaaagagtgcccatcccccactgcagcctcccggctccagactgttcctcctctggctccaaagccacctccgagcctcctcaagagaccctcccatgcgatgccatcaccccagccctcccggctcacctgctctgggaccacctttctcagtctggctgtgtcgtctggtgcaccccccatccctctgtcctcccaccccacccctggaaggggcctcaaatatgtcctgtatgtattaagcagggcatactactactgtgtgccgcgttccagcgcacccagtgaatttggagccctggagtctgggcgacccccgggagccgatccgcctggacctgccccgccccctccaggccttgggtgctgcccagatggtgaataatgcgggcctggcggcgggagcgccgggaagaggcctggcagggcgctgggcggctggaggggctgaggctcccgaggaagcgcccctgccacccctacgcgggccattgcatccctgccaccggtggcctgggggtcccaagggcgccgccttccccagaaggctgtagggtgtcccggcgtgcggggggcacccactgactccaagtcagccaggcccgggcccgaggggcgtggccagcgcagggtgggcggggctgatgagagacagcgggagacagagactggacggagagagcgagccgcgggctgccagcggcccccacccgtcccagctcggcttagcccccgcggacccctccaggccgcgaccccagggcgtcctgtgccgccacgccctccatctgtgtgggtcctctgctgggcccgcccctggtcacagccagactgactcagtttccctgggaggtcccgctcgagcccgtccttcccctccctctgcccgcccccagccctcgccc

SEQ ID NO: 20378 - DNA, 2300 bp, Homo sapien
gcacagggaacagcagcagccagccccattgcccgcctcgggaagctgccatcgctggatggtcagggagggcttcctggcggaagggatgttctcactgagcatggaggatgcgaggaattcaggaagcgaatgggacagagaaggatgggtagctggcaggaagcacagtgcgtgcaaaggcccagaggtggcaggggttcggcatgggcagcaaggggcagggttgcgaggtgaggccagacccagcggggtgggtggaagtggcctgagagcagcactgaggccgccgggatgccacgtggtgtggggcagagcacgcggagtcaggctaggctccagcctcccagcaccccactcccgccctcagcagcctccccgtctatcgaggagggacttgagcctcgggcccctgggccagtggtagatgccagacagactccatgtaggatggggggcggcggtggggagctgtttgtcctggggcgggcccaggacttccccaggggccagcagggtggccttctttgctaggcttcacagagggaaactaaggcccagaaagggcaggccacttgcccacagtcacacagcccaggctggcagagaagatctgaattccagagagcctggctaccgagcacaccccccaaccccctcatggactgcccaaggccagggcagagttgggccaggttggtgggccgggcccacaactagggttcccagacccacatatcagactcacctggggaggggcattctcagggccagtcctggcctcccccacgctgggggcctgggcctccaggtcaaggcctcagcaactgcatcttaacgtggctcccaacctccgcccaccccctcccctccgctgtggccagggtggggacaacctgagaccagggaggtggcgggactggatgggacccctgtgggggaagaggaggggagggggacccccccatggcaggggaggaggccctgatggggtggaggagcacgtaggaaatgtggaaccgcccccccatgcccccaccccgctgcaggtgagcgccgcgagggggtcaacgcctccgtcagctctgatgtgcagtcggtgttcaaggggaagacatacaaccagctgcaggtcatcttccagggcatcgagggcaaaatccgcgctggtggccccaacctggacatgggctactgggagagcctcctgcagcagcttcgtgcccacatggcacgggcccggtgagcactaggtgcgggtaccagggttggtgccgtccgggtgggatgggtttcgccccctcctgagtcctgggtggggtgggtctcgcctcctcctgggaccatgtggggtggagaggggcaggaaagtgccgactggccggggccagcctgtgagtgacgaaggggggccggggggcgcgtagtcccgtgccctagcgggaaggccccaggatgctccagtgccctcacctggagtcagccctgttggtctcacagggctccccaggagcttccgccctttaacgagtacctggcgcgctccagcagccatggcatcacaggaagcccccaggcggcctgcctgtccccactgccttgcgcccaggcctgcgccctcccagcgctgctgcctcccggcctctggctgtgtacagatttctggagtgtttttggcaccgctgtgtaaatacatgtctcctctgctaatttgtaaatgtctctaaatttatcatgcttgttggctggtgtcctgctgggccccttctcctggccagccccagccacaagacactgagactgcagcgtgagacagagacccacctctccctgccatgggatggttcaccagggtacctgcgtcctctcgtcctctctcccataagccttgaccctgaactgaccaagcctgggcaaaggtcccagccagagccgtggctgctcgccaccttctcagggtccttgcagcaataaggggcgtgagaatctcggtgggggtggggcgcggagccccttcgcctccatgcgggtgaccccggctctgcgtcccaggctgcgtgagcgccaccaggacgtgctgcggcagaagctgtacaaactgaagcaggagcagggcgtggagagcgagccgctgttccccatcctcaagcaggagccccagtcccccagccgcaggtaggcccggccggcaccccggggacgccgatgcagacgcggagcaggatggaggggccgtgggcagcctccgcgcctccaacgctctctcctcccagcctggagcctgaggacgcggcgcccac

SEQ ID NO: 20379 - DNA, 2300 bp, Homo sapien
ccgggcgcagtggctcacacctgtaatcccagcactttgggaagctgaggcgggaagatcacgaggtcaggcgttcaagaccagcctggccaacatggcgaaacctcatctctactaaaaatacaaaaattagccgggcgtggtggcacgtacctgtagtcctagttacttgggagggtgaggcaggagaatcacttgaaccctggaggcagaggttgcagtgagctcagatcgcccccctgcactccagcctgggcaacaacagcaagactccatctcaaaaaaaaaaaagaaggatataaatattgctacttacatttgcataaatatatataatttattatgtatttctataattatatgtttcttataatagcaaactgtattattattgataaaataatataaagaaaacaataacatatctatacttacgtaatacaaacgatggaatataaatattatttgcaatatgataataaacaggtagttaattgcaaatgttattgatatgtattgcgtagatcaatgttaataacatgtattgtgtagatctatatatatatatatttttttttgatatggagtctcgctctgttgcccaggctggagtgcagtgacacgatctcagctcactgcaagctctgcctcccaggttcaccctattctcctgccttagcctcccaagtagctgggactacaggcgcccgccaccacgcctggctaattttttgtatttttagtagagacggggtttcaccatgttaaccaggatggtctcaatctcctgacctcgtgatccgcccgcctcggcctcccaaagtcttgggattacaggcatgagccaccgcgcccggccctgtgtagatcaatattatttacatgtactgtgtatatcactgttattggtatattttgtgcatatcaatgttattgacatgtagtgtgtatatcaatgttattgacatgtagtgtgtacattaatgttattggcatgtagtgtgtatatcaatgttattggcatgtagtgtgtatatccatgttattggcatgtagtgtgtatatcaatgttattgacatgtagtgtgtgtatcaatgttagttacatgtattgtgtagatcaatgttattggtattcattgtgtatagcaatgtgattggcatgtattgcatatagcaatgctatttgtatgttttatgtagatccatgtcaatgatatagtatagattcatgttattggcatgtattgtgtatatccatgttattggcatgtattgtgcatatccgtgttattggcatgtattgtgtatatccatgttattggcatgcattgggtaactccatgttattggcatgtgctgtgtaggtccatgtgtggttttttttgggacagagtctcactctgtggcccaggctggagggcaatggtgcgatctcagctcactgcaacctctccctcctgggttccagcgattctcctgcctcagcctcccgagtagccgcgattacaggcatgtgccaccacgcccagctattttttgtatttttagtagagacaggatttcaccatgttggtcaggatggtcttgaactcctgacctcaggtgatccgccctcttcggcctcccaaagtgccgggaatataggcgtgagtcaccgcgcccggccagatccatgttattgtcatgcgctgtgcaggtccctgttattggcatgtgctgtttagatccatgttattggcatgtgctgtgtacatccatattattggcacgtgctgtatagatccatattattgtcatgtgttgtgtagatccatgttattggtatgtgttgtgcacagcaatgttattgatacgtatcgtgcctgtcaatcttactgacctaatacgatggaatggcgagcctggctctgtactcccacccctgggcgcgagggggcactcgaggcgctcctggctgcgggtcgcaagcaggccccgcccccgagccccgattggccgcgcgccgtccgcggcgtcgcacgcacgcaggccccgccccgtccgccccgcgccggcccggcgcgccctcccttggccggcggcgcttgttgttcggcggcggcggtcgcagctcgggtccccctcgggcgcccccgccgccgtccgcgcgcggccatggagctggaggtaccggacgaggcggagagcgctgaggcgggggccgtgccctcggaggcggcgtgggcggcagagagcggggcggcggcaggtaacggcccggcctcccggggctgcggcccgctgggctcgtccgagcg

SEQ ID NO: 20380 - DNA, 2300 bp, Homo sapien
ctgcaggctggagggaccctagtccattcattccaaaaacatgtattgagcacctactgtgtaccaggcactgtgctaggccataggacacggcagggatgagcacgacaaagtccatgacctctgtgaggtggcattttaatatttatttatttatttttcagccagcgtcttgctctgtctcccaagctggagtgcagtggcgcgatctcggctcactgcaacctctgcctctggggctcaagcgattctcccgtctcagcctcctgagtagctgggattacagacgcatgccaccttgcccggctaatttttgtatttttagtagagatggggtttcaccatgttggccaggctggtctcgaactcctaactcaagcaattctcccacctcaacctcccaaagtgctgggattacaggggtgagccattgagcccagacttaattttttaaattttaattttaatgtactggtaaagatgggggggtgtctcactatgttgcccagactggtctcgaattcctggcctcaagtgatcctgccaccttggcctccaaagtactgagattataggtgtgagccatcatgcccaacccttcctggttaattttattttattgagataggatcttgctctgtcacccaggttggagtgcagtggcacagtcatagctctctgcagcctcaacctcccagggtcaattgatcctcccacctcagcctcctgagtttctgggactacaggtgtgtaccaccacatctggctaatttttaaaaaagttttctgggctgggcgtggtggctcacgcctgtaatctcagcactttgagaggccaaggcaggcggatcacctgaggccaggagttcaagaccagcttggccaatatggtgaaactccgtctctacaaaaatacaaaaattagctgggcatgatggctggtgcctgtaatgcaatcccagctactcgggaggctgaggcaggagaatcacttgaaaccgggaggcaaaggttgcagtgggccgagatcaagccattgcactccagcctgggcaacatagcaagactctgtctcaaaaaaataaaaaaaaaataaaataaaaacaaaaaacaaaacaaaaccaacaacagccagcagcaacaacaaaaaaacttttctaggccaggctcggtggctcacgcctgtaatcccaacactttgggaggccgaggcgggcagatcacttgaggtcaggagtttgagaccagcctggccaacataggaaaaccccgtctctactgaaaaaaaaaaaaaaaattagctgggcgtggtggtgcacgcctgtaatcccagctacttgggaggctgaggcagaagaatcacttgaacccaggaggcggaggttgcagtgagccgagatcgcgccactgcactccagcctgggtgacagagggagactccatctcaaaacaaacaacaaacaaaagatatataaaaatttttctagagatgggtttcaccgtgttacccaggctggtctcaaattcccaggctcaagtgatcctcccacctcggcctcccaaagtgctggaattacaggtgtgagccaccacacctgaccctttcttgttttttagatgaggacagcaagaagcccctgtaatttgcccaaagccacacagcggggaagtggcagaagcttctgtacgtaggaacccagtcacttcgtagcagagaggcagactgcgcacagatctgcgtggggaagggagtgcgccaagccacagcctgatgggccggcgtgcctggcaggaggctcagcaagcacagagactgggcagctccagatgcaagaagcaggagggagggggactccgggagtgcggtccattcatgtctgaatgtagccaacgagggtttcctaagcacctaccatgtgcggacgcttgataccagggcctcggcggtgagggcacaggcaggagcaagctcacctctgggcaagcaggggttaaggccagttgctcccacgtgagggcaccttgcgacagagccacacacccagtcctcctgctggcccgcccctcaccctggtccgtctccctgtgtctgtggtcgtcagttccactggcaggggacctgcctccctgttgccaccacaagagaggaaaagttggtcaaacaggtggggaggccagagctacaagcctcgggttccctccccaccacccgtgccaggcaggcacccgggccctggcacctgctgcctgcccagaggccacccagcctcctagacaggtaagtcccccgccccactgtg

SEQ ID NO: 20381 - DNA, 2300 bp, Homo sapien
agggagggggactccgggagtgcggtccattcatgtctgaatgtagccaacgagggtttcctaagcacctaccatgtgcggacgcttgataccagggcctcggcggtgagggcacaggcaggagcaagctcacctctgggcaagcaggggttaaggccagttgctcccacgtgagggcaccttgcgacagagccacacacccagtcctcctgctggcccgcccctcaccctggtccgtctccctgtgtctgtggtcgtcagttccactggcaggggacctgcctccctgttgccaccacaagagaggaaaagttggtcaaacaggtggggaggccagagctacaagcctcgggttccctccccaccacccgtgccaggcaggcacccgggccctggcacctgctgcctgcccagaggccacccagcctcctagacaggtaagtcccccgccccactgtgcttttccacccagtgtgcattgtctgagctggccttccccagctgagggtccttagactcccccccaacctcccccaccacgagctgtctccccggctcctcggaaagcaggaaactgacactcctgcgtgggcatctgacatagtttcgtagggattatctgaccggcagttactgcacctggcggcctgcccaggacgctgagctggaaacttaaaagggtcattgttacctaggtggcgcagggaccggggaggcggcaaaggggcacaggttggtctctgatccccctaactgaggaggggaggggatatcagtccagacggagcctgggtttacctcctgcagcccgaggctaggaggtgacaggtgggaaaggctgcgacctcactcatctctgagcctcctggaacttcttaaaaggctcccaagttttgaaacaactgcgtctcccgccccccaacccctcaccctgttctcaccgctggaacctccaggagctttgcagggagggattggggtggcctttcttttgctaattttttttttgagacggagttttgctcttgttgcccaggctggagtgcagtggtgcgatcttggctcactgcaacctctgcctccacctctgcctcccgagtagctgggattacaagcgcccaccactatgcccagctaatttttgtatttttagtagagatggggtttcaccatgttggccaggctggtctcgaactcctgacctcaggtgatccaaccccctcggcctcccaaagtgctgggattacaggcgcaagccactgcgcccagacttctttttctaatctttactcctccgagcaaaatctctgtgggatggggcagaggggaaggaggaaggagcgctcagagccagagaggggaggggtcggcagcaaaagtgtttttctgggtcatttgctcccaaatgggaagaccaagggagcttcctcgtgagccaagtgtccgattgcatctcaagtctctctccagaaccaagagggtcccccggggccgaggaggcatggatgatcgcatagtgggggacagagcggcccggcatttggggtcaccttgtggctgtgtggctgcagagctcccagggagcaggcttgcttgagattcgggagtccgtgggggtgggcgacatggatcccaccttgcctgggttttgagagcaaacccgtggactcagttagatctggcttccacacctcccttctctccgggcctctgtttcctgctctgtaaaatggggatattgagggccgggcgcggtggctcacgcctgtaatcccagcactttgggaggtcgaggcgagtggatcacaaggtcaggagttcgagaccagcctggccaacatggtggaaccctgtctctactaaaaatacaaaaaatgagccgaatatggtggcaagcacttgtaatcccagctactccggaggctgaggcaggagaattgcttgaacccaggaggtggaggttgcagtgagccgagattgtgccactgcactccagcctggacaacagagtgagactctgtctcaaaaaaaaaaaaaaaaaaaggggtggggggatatggagtcaccaaggcacagggctgttgagtgccggatgtaataaagcgggtaacagattctcggtcattctggggtcaagacgagctatcccggtccgaatcggagtctggtctcatcagcttcctggtttgtagaggatgaaccctggctcagagaaggacagccgcttaccccgggccgcacagccaagtagaaatgtcaggcggccaagagtcaagacgcagaggacagggagctggtgg

SEQ ID NO: 20382 - DNA, 2300 bp, Homo sapien
gaggcaggagaatgacgggaacccgggaggcggagcttgcagtgagccgagatcgtgcctgcagtccagctgggcgacagagcgagactccgtctcaaaaaaaaaaaaaaaaaaaaaagaagggaagacatataaccttcatgcgatgtgagaaggtgcgttgaaatgccttctacaattcttgcttcggtcggaagtcacaaagggattgaacttcattttggctgctcccacttctgtgatggccgcaaaagggaagagaactacatgctcctttttatttattttgtatggagattgggtctcgctatattgcccagcctggtctcaaactcctggcctcaagtgatcctcccacctgactcttcaaagttctggaattacaggagtgagccattgtgcctggcctctacgccccttttaatcctcctgacaaccctgtgatgtaggggctattattttccccaattacagatgtggaaactgaggaacagagaggggcagtaagttgtctgaggtcacacagcaaataggtgagagctggttttagaactctcctagctctgaagttccaagtgggtccccacaagaggctttggcaatgctttattcgggcccttggagacccttgaggggctgactgtagctgacttgggtctctggactagtgttttgggtacaattgcagtggaggaggtgagatgtcatcttcggggaccctctaagactttgatattgttggccttgtttactaagcaaactcttaaccaaccttcaaatccccagctacgatgccccctcctccaggcagcctttcttttaccgctagagttttctctatgctcttcacccctagccacaacctgggactcctgtccctgcccagccctgactggataaggctgggaaggggtgtttatgtgtagctttgcccttttacccttttaaccttggggtggggcccaggcacagctgggcgcaggtttttttttttatagtaaggaatgtgggggtgcagccacgaccagccccgcccacccaggtgacttgaaggtttcctaccctggtccagtccctcctaggtctaaccttaggaatcccggaatcccaggcccctgagcgggaggctgggctgggctgggtgagaagaaggaaacgacctttactccctcccagagcctgaagaatttcctcctgccttgcactctgcccctttcttttccttcgttccttccttccttcccttctttccttccttccttttctttttttttttttttttttgagacagggtctcactctactctgtcgcccagactggagtgcagtggcgtgatatcagctcaccgcaacctccgcctcccgggttcaaccgattctccttcctcagcctcccgagtagctgaagcatgcgccaccacgcccggctaatttttgtacttttagtagagacagacgtttcaccatgttggtcaggctggtctcgaactgctgacctcgtgatccgctcgcctcggcctcccaaaatttggggattacaggcatgagccaccgcgcccggccctgccctgccccctttcttttctggatgctgggtgtgaagacagagcccgcaggccaagaccgcaggaaaaaggcacgcagccgctgttgtatcttcagagtccacgcctctggcctctggggcctccggttcccctctgtggaatggggcaaaccttccagagataaggtgacccagggaccagcgctatgctaaggaggtctctggccttcgacaagcttctaatccaagaggcctcccagatgcacctcaaaatgtgcccatttcgcggacggaaacaccttccaaatagtaggctccgttccaagcgcgggggttattcctgccgggtcttgctggcagccttgtcgggccgggctctggccgcggccgccggccccctctcggctgcgtggataacccggcctggagtttccgcctcaggacctggctcctgtgatgggaggtggggagagaaacctccgccgcgtccagggggcgtgtctgggcaggggcggggctgacccgagacctggaggaggaagaggggcaggtgcagccgggagctgcggagctggagggaggaggacgagagcccggccctcagcccgctgtgactctcctcagccccctcccccagcccggggtgggggccgattgactgtttccaggaccccctcgggtaggggggctggagagcccccaggtggaccatggcggtgagattccaggcgagtaaccctccaagggtggcagg

SEQ ID NO: 20383 - DNA, 2300 bp, Homo sapien
gtgttctcattcatgccatggacatgaaaataacagaatctgcctggtgtggaggctcacgcctgtaatcccagcactttgggaggccaaggcgggcggatcacttgaagtcaggagttcaagatcagcctggccaacatggtgagacccccgtctctattaaaaatacaaaaattagctgggcatggtggtagacacctgtgatcccagctacttgggaggctgaggcaggagaatcgcttgaaactaggaggcagaggttgcagtgagccaagttggcaccattgcactccagcctcagcaacagagttttttttgttttttttttttctaagtgggaaagcccaggtgggaggatcatttgagcccaggagttcaagaagagtctgggcaacacagcaagaccctcctgtctctataaaaatagaagttaaaaaattagctgggcatgatggtatgcacctatagtcccagttactcaggaggctggggcaggaggattgcttgaagccaggagttcgaggctgcagtgagccataatggctcacacttgtaatcccagcactttgggaggccaaggctggagaatcacttgagcctaggagtttgagaccagccttggcaacacagagagactccatctctacaaacaataaaaaaaattagccgggcatcgtgatgtgtgcctgtggtcccagttacttgggaggcagaggtgggaggatcacttgagcctgggagttcgaggctgcattgaaccgtgatcacaccactgcactccagcctgagtgacagagaccctgtctaaaaaaaaaaaagtgtgggaggggggacttcatggctctgtgcctcagtttcctcatctgtaacatggggataattgaatgcacctttgatgaatgtattaaatgagatagtacatgtaaggctgggcgcggtggctcatgcctgtaatcccagcactttggaaggccaagggggtggatcacaagatcaggagttcgagaccagcctggccaacatagtgaaaccccgtctctactaaaaattcaaaaaaattagctgggcatggtggcacatgcctgtagtcccagatacttgggatgctgaggcaggagaatcacttgaacctggaaggcggaggttgcagtgagccaagatcacgccattgcactccagcctgggcaacaagagcgaaactctgtctcaaaaaaaaaaaaaaaaaaagagatagtacatgtaaagcacctggcacaaaggaagtgtttcattcattcactcattaattcattcagcaaatccttcttgaatccctgctgcaactcaggcgctgttctaggcagggaactgagggctcagttttggacaaagacaaaaatctctgccctctgtgggtggatcagttgaggtcaggagtttgagaccagcctggccaacatggtgaaatcccgtctctactaaaaatagaaaaattagcctggcgtggtggtgggcacctgtaggtgcccagctactcaggagcccagctactcaggaggccagtaggcagccagctactcaggaggctgaggcaggagaatcacttgaacttgggaggcagagactgcagtgagcagagattgtgccactgcactccagcctgggcaacagaatgagactccgcctcaaaaaaaacaaaacaaggctgggcacagtgactcacccctgtaatcccagcactttgggaggccgaggtgggtggatcacttgaggccagaagttaaaggccagtctggccaatgtggtgaaaccctatctctattaaaaatataaagattagccaggtgtggtggtgcacccctgtaatcccagctacctgggaggctgaggcaggagaatcgcttgaacccgggaggtggaggttgcagtgagctgagatcgtgccactgcactccagcctgggcgacagagccagactctgtctcaaaaaatgaaacaaaacaaaaaaacaaacaaaaaaacctgaggccctgagagaggtagtaacttgtcacaggctccaaacacaggcctgtcagagctggactccccaccctgagctggggacccccaagtgctcagatgaacctgtgtggcctcatgcccatcttccccgctcccctcgaccaggtggctgacatggaggagctgaccatctgggaacagcacacggccacactgtccaaggtgaggcctccctctccctgtctgggtgccagagagtatggcggcttaggcccagctcaatagaggggagaccctttaccctgggggaaacagca

SEQ ID NO: 20384 - DNA, 2300 bp, Homo sapien
ctagccagaacctgtcactgaacgacacccggcgactgattgagaagtcagaagggaagctaagcctgctggtgctgagagatcgtgggcagttcctggtgaacattccgcctgctgtcagtgacagcgacagctcgccattggagggtgaggacctagaggttaggacctgggagggggttgaatggatggcagggaaggtgggaagccccaggcagggccaaggaatcaatgagcctggtccctagaggctcagagagtgacaggaacttgctgaaggccacacagcaagtcaagagttcaggggggcgatctcggctcactgggttcaagcgattctctgcctcctgggttcgagcgattctcgtgccttggcctcctgagtagctgggattataggcgtgagccaccgtgcccagctccagagccgaatcttctaactgagcttctgactttggtctagggccctttgtttagaggggtgttgatatacccctctgtaaaatgggtccagtccagaaggcgtgaccatggctgatgagatgtcctctccccctgcagacatctcggacctcgcctcggagctatcgcaggcaccaccatcccacatcccaccaccaccccggcatgctcagcggagccccgaggccagccagaccgactctcccgtgtaagtatcacccatcggccagaatggtgatagggagggagagggaggtgggagggagaggggaacgcgggcgtagctttccaactgggggtaaccttgaggacgcagtcctgtatttctagcatgtgcctcaaaatacctccagcctctacccattacccagttccaaagccgtgtccgcatttgtaggtgttggttacagcagcaccccacttcttagtatcaaactctgccttaggccaggtgcggtggctcacgcctgtaatctcagcactttgggaggccgaggagggtggatcatctgaggttaggagttcgagaacagcctggccaacgtggtgaaaccctgtctctactaagataccaaaattagcccggcgtggtgccgggtgcctgtaagctcagctacttgggaggctgaggcaggagaatcacttgaacccaggaaatggaggttgcagtgagccgagatcgtgtcattacactgcagcctaggcaaccagagcaaaactctgtcttaaaaaaaaaaatttctttttcctctatttatttatttgttttgagactgagtcatgtgagactggctaattttcatatttttggtagagatggggtctgtattgcccagctatgttgcccaggctggtcttgaactcctgggctcaagcatttggcctgcctcagcctcccaaagtgctggtattacaggcgtgagccaccacgcccagcccagataaattaaaattatttttattttgtttatttatttatttatttttttggagacaaggtctcactctgtcgcccaggctggagtgcagtggcatgatcttggctcactgcaacctctgcctcccgggttcaagcaattctcctgccttagcctcctgagtagctgggattacaggcgcccaccatcatgcccggctaatttttgtatttttggagagacggggtttaacctcgttggccaggctggtcttgaaatcctgacctcaggtgatctgcccacctcgacctcccaaaatgctaggattacaggcatgaaccaccgtgcccggcctaaaattctttttaaaatggccccttgaaatccatccctgcctcactcccaatctgttccccaccagggagagtccccggcttcggcgggaaagttcagtagattccagaaccatctcggaaccagatgagcaacggtcaggtgggtggtgactctgagcacccctgtccctgacatttctgatccctgacagcaaggctgtgccaggcagagctgggggaggttggcctgagcctaagtggtgagacatggtttcctgagaaggactcgaggtgggtgacagtccttccaggatgaggacataaagcaaaggtttggaggctggactgagccagtgtgcttgggaaagagactggcttttccctttcagagttgcccagggaaagcagctatgacatctacagagtgcccagcagtcagagcatggaggatcgtgggtatgtaccccagaagaaagcaaacccgctcaaaactcctacatcccaggctgcctccctcatcagcgcaatcctgcctgcttgtatccattgtgttgagtgggaccattaagtgggggttttggggaaa

SEQ ID NO: 20385 - DNA, 2300 bp, Homo sapien
aagctttaaagttaaaaaaagaagattaacaatgagtctaatatactccagtagggctggagtctaatcactgttaatttttataacattatatttttaaaattatatataacatatataatacatataatatatagtatgttttatatataatatataaattaataatatatattttatatattcttttccagctctactactgctaaatccttaacccgcttgatctaatttaatcctcacaattgagaggtaggtactattttttccccagcttataatgaggaaactgagttctcagggaggtaaagttcccaggccgaccccaaatccatggtgcacctatgtgtctccctactgtgagccaaaccgaaagtccgtctttaacagggtctccacgacgcttccggtgcctcaaggtcccaaggaaaccacctctcacacttctttaatatttcccaaccccacttctccccatctgccatcctttggaataatgaacacagcccccagagccaggcagtgattattaaccctattttgcaggagaacaaacaggtcctggggccagccggggcagtctgcgggccgggaagcctgggattcgaactcccctccaacatctgcagttgtcccagcgcccccgcgtggcgaggctgggtgggagaactacatttcccagcaggcctcgcgaggccgcgcatgctcaatgggccagggctctgcgcggatagaggagcgggcgccgggaccgggaatccccgagctgcgccttctggggacgcggcccgggctacgtcggggccgtccgtggggagcggggtcctggaggctgcgcggggctgaggcggcctcgatttgggaagtgagtgtcctcgaggtgcagagcgcagtctgagtcggcgcttgaggtcttcggtctgaggggggactagggtctgggcttggggctgggtcctgaagtcggggtctgagtctggagtcgatcttggggtagcattggaggtttggagactggggtccgccttatggcgtcttgggtctctggtattaagtccagggtcctgggtctaaagttctggatggaggtattgggggttgaggtcatgggactggggtcttgggtctggggtcttggggaactgcctctgaccagtcggtagagtcagggtgtgaggtctgggtctccagcctgggttccgcgtcttgagggaggaggacctggaagaaccagggctggagtgaacagactccattagttgagagaggtctgggatgacacaggggctcgggaagccactgcctcacacctccccattctgtggctcagtttcttcatctgtaaaatgggaatcctaacttccttgcaagggttagtgggtattaaattatgtgccctgtatgaacagtacccagctagagcctagcaccggataggcagccgggaaacctcaagttttttgtttttcgggtttgtttgttttttttaagacagggcctcactctgtcacccaggctggagtgcagtggcacaatcaaggctcactgcagcctctgcctcccctggttcaggtgatcctcccacctcagcctcccaagtagctgggactacagcctacaccaccacccctagctagtttttttttttttttttggagatagtctcgtctgtcgcccaccttggagtgcaatggcgcgatctcagctcactgcaacctccgcctcccgggttcaggcgattctcctgcctcagcctcttgcgtagctgggattacaggtgcctgccaccacacctggctaattttttgtatttttagtagagacggaatttcaccatgttagtcaggctggtctcaaactcctgaccccatgatctgcccgcctcggcctcacaaagtgctgggaattacaggcgtgagccactgtgcccggccttaattttttgtattttttgtagagagagggtcttgctctgttgcccaggctgatcttgaactcctgggttcagtcagcccttctgggcctcccaaaattctgggattacaggcatgagccactgcacccgggcgaaacctcagtgctgactctctctctttcagctgcctgaagatgccggcctaagcctggagtccaggcatggacttccccacaatttcccgatccccttcggggcctccagccatggacttggaggggcccagggacattcttgtgccttcggaggacctcacccctgacagccagtgggaccctatgccaggaggccccggcagcctcagtcggatggaacttgatgagtc

SEQ ID NO: 20386 - DNA, 2300 bp, Homo sapien
tccgtctctactaaaaatacaaaaaattagccaggtgtggtggcaggcacctgtaatcccagctacgcaagaggctgaggcaggagaatcgcctgaacccgggaggcggaggttgcagtgagctgagatcgcgccattgcactccaaggtgggcgacagacgagactatctccaaaaaaaaaaaaaaaaactagctaggggtggtggtgtaggctgtagtcccagctacttgggaggctgaggtgggaggatcacctgaaccaggggaggcagaggctgcagtgagccttgattgtgccactgcactccagcctgggtgacagagtgaggccctgtcttaaaaaaaacaaacaaacccgaaaaacaaaaaacttgaggtttcccggctgcctatccggtgctaggctctagctgggtactgttcatacagggcacataatttaatacccactaacccttgcaaggaagttaggattcccattttacagatgaagaaactgagccacagaatggggaggtgtgaggcagtggcttcccgagcccctgtgtcatcccagacctctctcaactaatggagtctgttcactccagccctggttcttccaggtcctcctccctcaagacgcggaacccaggctggagacccagacctcacaccctgactctaccgactggtcagaggcagttccccaagaccccagacccaagaccccagtcccatgacctcaacccccaatacctccatccagaactttagacccaggaccctggacttaataccagagacccaagacgccataaggcggaccccagtctccaaacctccaatgctaccccaagatcgactccagactcagaccccgacttcaggacccagccccaagcccagaccctagtcccccctcagaccgaagacctcaagcgccgactcagactgcgctctgcacctcgaggacactcacttcccaaatcgaggccgcctcagccccgcgcagcctccaggaccccgctccccacggacggccccgacgtagcccgggccgcgtccccagaaggcgcagctcggggattcccggtcccggcgcccgctcctctatccgcgcagagccctggcccattgagcatgcgcggcctcgcgaggcctgctgggaaatgtagttctcccacccagcctcgccacgcgggggcgctgggacaactgcagatgttggaggggagttcgaatcccaggcttcccggcccgcagactgccccggctggccccaggacctgtttgttctcctgcaaaatagggttaataatcactgcctggctctgggggctgtgttcattattccaaaggatggcagatggggagaagtggggttgggaaatattaaagaagtgtgagaggtggtttccttgggaccttgaggcaccggaagcgtcgtggagaccctgttaaagacggactttcggtttggctcacagtagggagacacataggtgcaccatggatttggggtcggcctgggaactttacctccctgagaactcagtttcctcattataagctggggaaaaaatagtacctacctctcaattgtgaggattaaattagatcaagcgggttaaggatttagcagtagtagagctggaaaagaatatataaaatatatattattaatttatatattatatataaaacatactatatattatatgtattatatatgttatatataattttaaaaatataatgttataaaaattaacagtgattagactccagccctactggagtatattagactcattgttaatcttctttttttaactttaaagctttgaataattactcattggatggaatcaggaacatataaagtgtgatatttttagtaaatgttatgtaattgaagaagggcaagaagtcaatgaaatatcccttgaacgcctcctcctatagtaactgtgtatgtctacaaaagtctgaagaaatcaccatagattatgaaagcttgggagaccgcatttcccagacacctccacggggcctacacttccacggggcctacaactcccaaacacccttgggccactgacgtcttccggaaacgtgcacttgcaagctgcccgcaatacgtcatggcgaccaaacgccttttcggggctacccggacgtgggccggctggggggcctgggagctcctaaaccccgccacttccggaagactcctggcccgggattatgccaagaaaccaggtgagctgggttaagaggaaccaaatggggacggtgggtgcactgaggaattgac

SEQ ID NO: 20387 - DNA, 2300 bp, Homo sapien
catgccccactaatttttgtatttttagtagagctagggtttcaccatgttggtcaggctgatcttgaattcctgaccttgtgatccacctgcatcagcctcccaaagtgctgggattacaggcgtgagctaccgcgccaggcaatttttttttttttttatacaaacagggtcctgctatgttgcccaggctggtctcgaactcctgggttcaagcaatcgatcctccctccttggcttcccaaagtgccgggaataaaggtgtgagccatcatgcctggcctcgaaatcactttaagtgggatttggacacagcattaagtaactttaagtgggatttggacatagcattaagtaacaccgatgcttggaatgaccaagtcattcaagttatattttgtctgctatgtgtctgtctttaaggccgaacattggacaatttccccctttcaacaaaggagatcaggcaaggctgtatccagctaaaccttaataaccttgttttgttcttgctgaagtggccaattaaacgggctccataatttctttgaatgtttggtaacgtcttggccaaggttacccagcgatttggaggcaggcagagaaacagaactggaacccaagttcatgacctccccagactcccttcaaatcctttccaacccgcgcctgcgcagtgaaacgcgtggtctccacgtaaccacatcctcctcccaggccgctccgccccaagctggcgcctgcgccctgggtccaatcgctacagtatctccgagccagacgcccgagctccaagcggcgctgggtccctcaaactgcgcctgcgcatacagcctggcatccgcctctctgcgcttgcgcatcagttctagcaccacctccccaaccaccgcctgcgcactgtcaattcctcagtgcacccaccgtccccatttggttcctcttaacccagctcacctggtttcttggcataatcccgggccaggagtcttccggaagtggcggggtttaggagctcccaggccccccagccggcccacgtccgggtagccccgaaaaggcgtttggtcgccatgacgtattgcgggcagcttgcaagtgcacgtttccggaagacgtcagtggcccaagggtgtttgggagttgtaggccccgtggaagtgtaggccccgtggaggtgtctgggaaatgcggtctcccaagctttcataatctatggtgatttcttcagacttttgtagacatacacagttactataggaggaggcgttcaagggatatttcattgacttcttgcccttcttcaattacataacatttactaaaaatatcacactttatatgttcctgattccatccaatgagtaattattcaaagctttaaagttaaaaaaagaagattaacaatgagtctaatatactccagtagggctggagtctaatcactgttaatttttataacattatatttttaaaattatatataacatatataatacatataatatatagtatgttttatatataatatataaattaataatatatattttatatattcttttccagctctactactgctaaatccttaacccgcttgatctaatttaatcctcacaattgagaggtaggtactattttttccccagcttataatgaggaaactgagttctcagggaggtaaagttcccaggccgaccccaaatccatggtgcacctatgtgtctccctactgtgagccaaaccgaaagtccgtctttaacagggtctccacgacgcttccggtgcctcaaggtcccaaggaaaccacctctcacacttctttaatatttcccaaccccacttctccccatctgccatcctttggaataatgaacacagcccccagagccaggcagtgattattaaccctattttgcaggagaacaaacaggtcctggggccagccggggcagtctgcgggccgggaagcctgggattcgaactcccctccaacatctgcagttgtcccagcgcccccgcgtggcgaggctgggtgggagaactacatttcccagcaggcctcgcgaggccgcgcatgctcaatgggccagggctctgcgcggatagaggagcgggcgccgggaccgggaatccccgagctgcgccttctggggacgcggcccgggctacgtcggggccgtccgtggggagcggggtcctggaggctgcgcggggctgaggcggcctcgatttgggaagtgagtgtcctcgaggtgcagagcgcagtctgagtcggcgcttgaggtcttcggtctgag

SEQ ID NO: 20388 - DNA, 2300 bp, Homo sapien
ttggggggcactcgtctctggggcttcccctggagcccgctccacctctcaggcctctgcctctgaaacagtcccacctcacagcccagaatgggcctgggcaacgcccttgcacctccatacccacaccctgcccctctccagcttccttcctctggaattgctacccccacccttctgtcctccccatctcccccggcccttggcctgactagaccctgtagcctcacctgcctggcacctgcccctggtttctcagctgctcatcattgatgtttgtataaaatgccactgtgtccctgctccacaacctcccatggttccccagcactccatccttcacaccccatgtgtccagaacttgcggctttgcactccatcttccattctcaccaccttccttaacatagcaacccgactggtcgcggtggctcacgcctggaactcctgcactatgggaggccgaggcaagtggatcacctgaggtcaggagttcaagagcaacctggccaacacggtgaaaccccatcttcagtaaaaatacaaaaattagctgggcgtggtggcgcacctgtaatccgagctactcaggaggctgaggcaggagaatcacttgaacctgggaggcggaggttgcagtgagccgagatctcaccactgcactccagcctaggcaacagagtgagactccttctcaaaaaaacaaaaataggccaggcggggtagctcacacctgtaatgccagcactttgggaggccaaggcaggcggatcacgaggtcaggagttcaagaccagcctggccaaggtggcgaaaccgtgtctctactaaaaaatacaaaaattagccaggcgtggttgcaggtgtctgtaatcccagctactcaggaggctgaggcaggagaattgcttgaacccaggaggcggaggttgcagtgagctgagatcgtgccactgcactccagcctgggcgacagagtaggactctgtctcaaaaaaaaacccaaaaactaaatgaaatatcaacccaccttgcccccacaggcccccctccgtgggttttctccctaggctcgtggccactggccacgctctgcattttaacacagtggttggttgtctgtctgccctgctagaaagtcagccccgtgacttctgtctgttttggtcactactgctgtgagcagtacctggtacacagtaagtgctcaataaatgtttattgaatggtgaacttctgtttttcttttttgttggtggtggttttggttttttgtttttttttttttttgagatggagtttcactctgttgcccaggctggagtgcaatggcatgaccttggctcactgcaagctccaccccaccaggttcaagcaattctcctgcctcagcctcccgagtagctgggagttataggcacccaccaccacgcctggctaatttttgtatttttagtagacagggttttgccatgttggccaggctggtctcaaactcatgatctcaggtgatccgcccgcctcagcctcccaaagtgctggggttacaggcgtgagccactgcgcccggctgtgaatggtgaacgtctattcatacctccagacccagctaaaagggtccctaccccttgtgtccagaggaaccaactgcagtgccttcacctctggacctcagcttccccaactgcctctgacatctgtgagttctaagacacctttttctgcccccagcagataaaaatattaacagtgagcattcattaagtgccccctgtatgccaatttctgtgcgatgctctgagaagctgaaatccccccagggtaggtcctagtgtggcagttttacagccagggaaactgaggcccagagagggagaggcccttgccgtcttatggcaaggggccgtggagcctgtaagactatccccccagccacccacttagagccccagccctccatccaccctgccctccctcctggctcagaacagcccaggaccaagtgggaggggccgcctcaattaatcaccttgagctaatcctcccccacgcagccccgacctggctcggctccggcagggccaggccacagcagacgcagcgccaggcccgctggggcaggtgtcccgtggaaatcgacggaggggctgccgtgggcggtgagtgcggggtgggcactggtgggcctgggtaggaggtggtgggggcagagatcccctcagggtggagggcttagggcgtgagaagggatcctgccttccttgacgggggggcatccttgacccccccccgccgacaca

SEQ ID NO: 20389 - DNA, 2300 bp, Homo sapien
tcccgagtagctgggattacaggcatccaccaccacaccagactaatttttgtatttttagtagacagggtttcaccatcttggccaggctggtctcgaactcctgacctcgtgatccacccgcctcggcctcccaaagtgctgggattacaggcatgtgccaccacgcccagctaatttttgtagttttagtagagacggggtatcaccacgttggctaggctggtctagaactcctgacctcaggtgatctgcccgccttggcctcccaaagtgctgggattacaggcgtgagccactgggcccagcctacagatgggattaagttgatgctattgagatgagagagcatcctggatgccccaggtatataatataatataatataatataatataatataatataatataatataaatattaataatataatatatataatagtatggtttaaccaggcaccatggtgtgcacgtgtagtcccagctactcaggaggctgaggcaggaggttcgcttgagcccaggcatttgaggccagcctgggcaacacagagagacccccagctctaataatgataataataataatatagtttcctagtctgctgcataatgttccttaatatagctgttctgtaattctcttgtaactgggcctctgctccccgcaaaatcatgtgatgcccccaagtccagacacacagccttttggggtaacagaagattaaatatgggcgcaggccacctgggcatctcggttcattgccctcctaagatgaacttcatctttgtttcagaggactcatcccttagaaaggatgataaggtgcaaggcgtggtggctcacgcctgtaatcccagcactttgggaggccgaaatgggaggatcgcttgatcccaggagtccaagaccagcctgggcaacaaagtgagacttcatctcaaaaaaataaaaataaaaatacaaaagttagcagggcgtggtggcacgcacctgtaatcccagctactcaggagggtgaggaaggagaattgcttgaacccgggaggtggaggttgcagtgagccaagatagcgccactgcactccagcccgggtaacagagcaagactccatctcaaaaaaaaaaaaaggcaaagtggccaattcttggattcctcccaggacagggaactcaccccctcctgaggctaccccttctatggctctatgaaaatttgggaaaaaaaaaattaccctgtggtcccagctacacgggaggctgaggcgggaggctggcttgagcccaggtggtcaaggctgtagtgagctatgatcacgccactgcactccagcccaggggatagagtgagaccctgtctcaaaaaataaatgaataaaaataaagataaaggcctgcattgggtgaaagcagattgggcgttttggtcaccccaaccacaaagccatcgctgggggccagggccctgtccaccaagaccaagtgagatcaaactgttctgtgaggtgaaagcgggtggggcccccaccctccatatgggggaggaaatcccggctggaaaaggggtacctcctacctacgggcagagccaggtccctccaactcccaggccccccttttaccctccaaggagggcagctctaagaagtttgcatccggatgattacagttcccgatgattctgttactccaattttcccttaatgttgatgattatgataatgatattgatagcggctgacattttgaaagctttttttttgtcaaccaccaatagccctctgagacggtgggtgctcaaatgggcgacactgagggagttggaattgcagagtacgaagtgtcctctgggagtccgggcttggcgccttgcttatctccccggacgggcagctcactctccctcacccccggtccccgccgcgcgcactggcggcgcccgttccacgctccaagaaccccgcttcccagggtgggtggggggtgcacgcccgacagggccaggtcagggccaggcgtggagcccgcgtgcgccccgggaccccgcccggggcgcgcgggaggcgccgggggccgcggaggcggggcggggaggggccggcggcggcggcggcgcgcggaggagaccgcagtgcggccggcgctaggacccgcgggggcctcccaggccgcggcgcctcccgctttcccccactccccgacccttcttcgcccccaaaatgaggaaacggagcaactcgctccaagttgtgcagccgggaccgcctcggggtgtgcagccggctcgcggaggcc

SEQ ID NO: 20390 - DNA, 2300 bp, Homo sapien
caaatgtggactgggaggggcccaaggggctggcactgctcagtggctgctccccaaggtgtgggcatcctcaggctgtcccctcacaagggtcccctgggaacacagacacaccggctgagaatcattcatctcaacgcctcccataacccagctctctgcctcggtccttgagggttcccctggccccatcctagagacacacagtgagatgctctggaggctccccgagggcttcctggaggaggaggcaactacgctgagtttgggagagatgcctctgcccacagagtgcttcccccgccacattcccaaaccctcagaaggcgggcggagggtgttcagatgctgagacctggtcacagtggaagagtttcgtgacagtttccagcccacagggcttccctggcagtgtttgggacggggggcaggcggggagcagagtggggaggaggcagatgcagggtgggggaggaggcagatgcagggtgggggcggcgggacgggagtggcaggggctgggtgtgcagggaccgctgtttcaggcccaggccaaaggaggggggtggggagccaccgaggggtccccttctagcagggattatctgtcagcaacaggaattgctggttaagcctccccggagggcaggcggcctctaggccaccgtcctcctccacctcacaccctctctcctgctttccactctatcccagatttcttgggaacttcactcccttgctacacactccgtccacacacagcccctctctccgtcagcatcgcggcagcagcaccgccatttgcccagggctcaaggtgacagccagcacaaccagggaggcctcctggattcctctgtgctcccggccaatccatgaggatgtcttgtcaattccagttccaccttttttttttttttttttttttgagacagggtctctgtctcccaggctggagtgcagcagctcgatctcagctcactgcaacctcgcctcctgagttccagtgattattccacctcagccacccgagtagctgggactacaggcctacatcaccacgcccagctaattttttgtatttttagtagagacggggtttcaccatgttggccaggctggtctcaaactcctgacctcaggtgatccgcccacctcagcctcccaaagtgctgggattataggcgtgagccaccgcgcctggcctattccttgactttaaaccatgcatctttgaaacgatttggtatctgtcttccccttgagaatgtgaactctctgcctgtcaggaagcctctcaccatcaattggatcaccactgtattcccagatctcgggcaggccaggtggacgctagcaactgagtcggtctcagtgctcagagccacgctctgacaccagaggacgtgtctctttctggtggttatgagaataccatttgtcggccgggtgcagtggcatgtgcctgtaatcccagcactttgggaggccaaggcgagcggatcacttgaggtcaggagttcgagaccagcctggcccacgtggtgaaaccctgtctctactaaaaataccaaaaattagttgggtgtggtggcgggcacctgtaatcccagctacttggaaggctgaggcaggagaatcgcttgaacccgggaggcagaagttgtggtgaactgagatcacgccattgcactccagcctgggcaacaggagcaaaactctgtctcagaaagacagagaacaccatttgtctctgtctcgttaccggtgagggactccagccaaggctgtggggacagagggaagggacaggggaaggggcacaccctggcaggcctggcgatcacagcagcccctggtgggaggcacctcgtcccctgctgtgaaccccaggcggtacctgcagccccgcttccttccttatgccccgggagaggcggctctcggaagcctcccacccacagttcccgttcccatccctggctcccggggaaggcaaacaggattcctgccaccaggtgggtgaaaaccagcccggctgacaaagagttaagtcggccctcctagcaactccaaaaaaccaagtttaggcggcgcgacagcaaaatcaagcagttggttagcgaagggattcggtgcagatggatggaccgtctgggctgcggagtccacgggcctgaaacgcggtcgctcctgacccgtcctccgcaaccctcgtcccaccaggccgcggttcccggagcaggccggcgggtggcaggaagacaccaggctgcagggggctggagaagcaacacccc

SEQ ID NO: 20391 - DNA, 2300 bp, Homo sapien
ggccaggtggtgtagagcctctttgccttctaatccattttccccaaaatgaccctcataccttgctccttcccctatggggttggaggttcactttttaatatatatccatagcggtattgggctaaaatctttactgatacttttccctggcaaatgggcttttagactccagaactgtctactgggtagctgatatttagctgaacaaggggcattggggtcagaaagatctgggtctgaaccctcccctgcacttgacatgagcccctggtcctccttggaggttttctcgtctagaccgtggggagcgatggtgccgcatgtcctctgaagggtgaatgaggccatgtggacaaaggcctcggcactgtgcaaaccctacaaagactcattctttttagtgaagagttattagtttagtgctaactaaagtaattattttaatactcaggtggactgacttgttctgttaaaaaaaatacagtcagagcctgggcaacatagtgagaccccacctctaccaaaattttttaaagaattaactgggcatggtttcacacttgtgttctcagctactgagaggctgaggcagggttgcttgagcttgggaagttgaggctgcagtgggctgtgatcgtagcactgaacttcaacctgggtgacagagcgagaccctttctcaaaaacaaattttttttttaaagagaaaatacggttggccttccgcattcataggcactgcatccatggattcaaccagccaagggtggaaaatatttgggaaaaaaatgcatctgtactgaacatgtatggggtttttccttctcattgttccctaaacaatggaatgtaacagccatcggcatagtgcttacattgtattaggtattataagtaatccagagatgatttacagtatatgggatgatatgtttaggttatatgcaaacactatatcgttctatgtcagggactcaagcatccatggattttggcatctgagggggtcctggaactcaacccttgcagatagtgagggacagctgtactgttttttgttttgtttgttttgagacagagtcttactctgttgctcaggctggagttcagtggtgagatcatagctcactgcagcctctacttcctgggctcaagccatcctcccacctcagcctcctgagtagctggcactgcaggcgtgtactatcacactcgctaattgtttgtttttttttaattttggtggagacaaggtctcattatgttgtccaggttggtctcaaacacctgagctcaagcaatcctcccgccttggcctcccaaggtgctgggattacaggcatgagctaccacacccggccagacactgtgctgttaaagttcaattttctggccgggcgtggtggctcacacctgtaatctcagcactttgggaggccgaggcggccagatcatgaggtcaggaggttgagaccatcctagttaacacggtgaaatcctgtctctactaaaaatacaaaaaaaaaaaaaaaaggctgggcgtggtggtgggcgcctgtagtcccagctactcgggaggctgaggcaggagaattgcttgaacctgggaggcggaggttgcagtgagctaagatcgtgccactgcactccatcctgggcaacagagcgagaccctgtctcaaaaaataaaaaagttcaattttctttgaagaatcttgacatggagaaaaagccctgccacacaagtagatcatctgcaaagcggaagtcagatgggttcgagtcccagctctgccactgacagtgcctcagtttcttcatctgtaaattgggtgcagtgataggcccagcattacagcgttgttgtgagacggtgttaatttgtgtaaagtgcttccggccgtgcctgggctcctaggagggtctccaccaagcagggcagctcaggtccagtggtggctggaattgacaccgtcaactcagtgcacctgagaactcgctctaacctggtggggctttggtgtgtgtttgtggttctagcgcccagcctccgacccttcccctgcccactgtgggggccagctatactgcacaacccactcctgggatggaccctgccgtgaacccggcctttcccccagctgccccggcagggtacggtggataccagccccactccggccaggacttcgcctacggcagccgaccccaggagcccgtccccacggccaccaccatggctacctaccaggtatccagtcctttctttgaccagcgttgccgggaaacgtgggtcg

SEQ ID NO: 20392 - DNA, 2300 bp, Homo sapien
tcaaaaaaaaaacaagcaaaaaaaaaaaaaaaaaaacccgcagagggaggaggtgtaggaggcccgcaggtgcaaactgaccaggcggttgacggctgcctccaccgcggtggaataattctgacgaatctgggagctcatggttggtcggcaagaaggagctaaccaaaaaaacggcgttggttggtccgagaagcaggagatggctgagccgatgctcctggaggttgcaagaagagaggaaatcagcgggtggtcggaggctggaagtgagttcccggatctgttccatccaaacactgtggaagcaagagacggatccgcgggaccgccaaacacgctgctgcttgtcaggtttcaatactgtcaagtgactctccctccccctccttccaggctgcagtcttgggaaggaagtcactatgcacaacccacactcaagaggtgtagagttactctctatctccttaagcgcagtgtagctacacaaattaggaattcttctgcataagagatttgtctgtttgcctccatttatttgtttattcattcaattctttctctctctctctctctctctcttctttccttcccttccctccctccctgctcctctccctctcctcttttattatttatttatttatttttttattttttatttttttatttttttgagacggtgtattgctctgttgcccaggctggagtacagtggtgtgatctcggctcgctgcatcctccacctcctgggttaggtaattctcctgcctcagcctcccgagtagctgggattacaggtgtgccccaccacgcctggctaatttttttttttgtatttttagtagagacagggttttgccatgttggctaggctgctcttgaactcctgaccttgggtgagctgcccacctcgccttcccaaagtgctgggattacaggcgtgagccaccacgcccagccctttctttcttttctcttttttgagacagggtctcactctggagtgcagtggtacagtcacagatcactgcagccttgacagcccaggctcaagtgatcctcccaccttagcctcctgagtagctgggaccacaggcatgtaccaccatgaccagctaattaaaaaaaaattgtagaaacagggtcttgctatgttgcccaggctagtctcaaagtcctagggctcaagatcctcctgcctccgcctctcaaaatgttgggattacagacgtgagccactgtgcccggcctatcatttatttatatcacgttgtgaacacaggaggcagagaccatgggggccttctgaagagtcattctgaggctagatgcagtggctcacgtctgtaatcccagcacttttggaggccaaggcaagattatttgaggccaggagttcaacatcagcctgggcaacatagcaagacactgtctctacaaaaaatttaaaaattagctggctgtggtggtggtggggcttgagcagagacctccacatctgagtggttaaagagaaggtggggctcggagacagaggtagggcttgtgcagagaccatatctgagcaggtaaagggaaggcggggctccgagaaagaggcggggcttgtggcatgggtggggcttgagcagagacctccacacctgaatggttaaagggaaggtacggttccaaaaaaaggcggggcttgtggcatgggtgggggttgagcagagatcacatctgagtgggtaaagggaaggcagggctctgagtaagaggcggggcttgtagcatgggcgggacttgatcagataccaccacatctgagtggttaaagggaatgtggggctccgagaaagaggcagggcttctagcatgggcggggcttgagcagagacctccacatttgagtggttaagaggagggcggggctctgcgtaggaggcggggcctcggggcaggtgtggtcgcggggcggtgtctccctagcctaagagaaggaagcgagaaggtgagggcttcgcgcagggggcggagcttggggcgcgtggccaggcgcgagcggcacgcggctcgggggcggggcgggtgacgtcgcgggtccgccaggctcggggaagacgccaagatggcgacgagtcagtatttcgacttcgcgcagggcggcggcccgcagtacaggtaactgccccgccgcgccagcccccgccagtcccggcccctgcagcctggccgggaccccgcctaccccttctcccgccgcgtgcgcccggcccggccccagtcccagccccaacctggaaccccggcctgag

SEQ ID NO: 20393 - DNA, 2300 bp, Homo sapien
tgaaaccccgtttctaccaaaaataaaaaaaatagctgggtgtggtggtgcatgcctgtagtcccagatgcttgggaggctgaggcatgagaatcgcttgaacctgagaggaggaggaggttgcggtgagctgagatcacaccactgcactccagcctgggaaacagagcaagtctctgtctcaaaacaaaacaaaacaaaacaaaacccagtatattctaataaggaggagcagagaatcaacaacaacaacaaaaaagtgtaaataatttcaattaatagtaagtgctgtgggtcaggcacggtggctcacacctataatcccaacatttttcgaggctgagatgagaggctcacttgagcccaagaattcaagaccagcctgggcaatagagagataccctatttctacaaaaattacacagattagcagggcgtggtggtaggagcctgtagtctcaaccactggagagaaagaggtgtaaggatcacctgagcccgggagttcaagactgcagcgagctgtgattgtgccattgcactccagcctggatgacagggaaaactcctgtttcttaaaaaaataagtaaataaaataaacattaaaaacagcaatagcaagaaatacatataggccgagcacagtgattcgcacctctaatcccagcactttgggaggccaaggtgggcggatcacctgaagtcaggagttcgagaccagcctggccaacatgttgaaaccccgcctctactaaaaatacaaaaaaaaaattagccaggtgtggtggtgtgtgcctgtaatcccagctacttgggaggctgagggaggagaaccacttgaacctgggagtcggaggttgcagtgagccaagatcgcaccactgtactccagcctggcaacagagcgagactccacctaaaaaaaaaaaaaaaagaaagaaagaaagaaagaaagaaagaaagaaagaaagaaagaaagaaagaaagaaagagaaagaaacacatagggagcttttcttgtgccccagcactgtgtttagtgctgtctatgcattatctcataatgtggaaaagccatagcggctccatttcacagatgagaaaaactgaggcccgcaggtgagatcactcatgcccactggtctgccagctggggagtggctgggctagagttcaaacccacttccagtccgactgcacggcctgcactctccaccctaccatcttccacagtctccttgaattcctccagggcgaggccacgccagcgcacaactgcagggggcgccgttcccacagcagccctgcaaagtgagtgtgcctgagaaacttccgcctcccctgcacccagccctgtttagggcacgaggctgaatcaatggtaagtgaccatctaatggacccacaacacggtgacctggggacagtcatttctttctttttttttttttttctttgagacagagtctccctctgccgcccaggctgcagtgcagtggcgccatctcggctcactgcaacctccgcctcccaggttcaagcgattctcctgcctcagcctcccgagtagctgggattacaggcgcacgccaccacgcctggctaatttttgtattttcagtagaaacggggtttcaccatgttggccaggctggtatcgaactcctgacttcaggtgatcctccctcctcggcctccgaaagtgctgggattacaggcgtgagccatggcatccgacctggggacagtcatttctttgcctgcacagactttttgggggatgccacccctcacccctgctccctttgcaaggagaagtgccaagaagacctttcccaactcccccaccccccattctctaaggaatgaggccatcttgccatttatttatttatttgtccgttgttttgtttttaaatctctgatgcgccatcagaaaattatttctgcctctgcccctggcgtggctttcggagatgcttgtctgtcagccaatggggaggatcggattctggcagggggctgtgcttttccgtcaggccgccaccccccaccccctcctccctgcacacaaaagcagcataaattaaccgtcttcgggaagccgagcctctgccagccctgagctgggaagaagcagctacctcggaggcagggcgcgcaggcgggcggcgatgagagggggcgcagccgcagccccgcgctggggagcccaccgctaaccctgcaccccacccacccctgcacaaaagagctggcgggcgctggccacgtcgccctgggtgaccttcctcggatg

SEQ ID NO: 20394 - DNA, 2300 bp, Homo sapien
agtaaaaaccaagcatgcatgccccgagtatcctcgtggtttgatgaagcagatgcattcaccagctctgagaagctccaggacacaggtccttaaccaacagagtgccctgggaggccagcaaagggaatgtccagaaaggcttcctggaggaggcggcatttgagccaggccttgaaaggggagtaggagaggaaaatgggtcagcagggcagccaggtggggagaagcgaaggacttgtgggtcccggcagcgagggaggtgggagaggggaaggaaggctgagcaggagggcaggagatatccggactctggcgtccatgcgactctccgccacctgcttctagacgacacccccgtggccaccgccaagaacatgcccggggacagcgcggatctatttggggacggcacgacggaggacggcagcgccgccaacgggcgcctgtggcggacagtgatcatcggggagcaagagcaccgtatagacctgcacatgatccggccttacatgaaagtggtcacccacggaggtgagacccgccccccggtgcccccttggggctccagcccggcccactgggcaacagggggttcgtcagtgcccctctctgatgcacggggatgttaagccgtcaactcgcttcgggtggacggactgtgggcaaggcgtgcatggtcagggaggcgcactgggggcccctgatggtcgctgtcactcctcagcgaaggcagagactggctaaggggtcgccggctgctgtggctcggagccatgccctcccgagcgtgtgggcaccgggacgtggtgggtggtgcgcgggaggcagctcagggctgggagaggactctgacgttgccgatcggctgcctctcctcagggtactacggcgaaggcctcaacgccatcatcgtcttcgcagcctgcttccttccagacagcagcctccccgactaccactacatcatggagaacctcttcctgtgagtccccgcccgcggcgagcagcctcgggccagctctgatgcctccctggccacaggggcaccaggctgcaaggattgcattgtggccctaggaagcctgcctggcaccagggaagggcgtggtggccacagaccttgatctgagtccctgctggccctgaggctcacagtggccttccctctgggccaccctgttctcctccccgtcctcctcctcctcctcttcctcctccttcccctcctcctcactgtcctcctcctcctccccttcttcctcccccttcccctttcttctcctccttctcctccccttcttcctcccccctcctcctcccttttctcctcctcctccccttccctctcctcctccccctcttccccttccctctcctcctcccccctcttccttctcctcctcttcctcccctttctccacctcatcctctttctcttcctcccctttctccccccttcctcctccttctcctccttccctcatcttcctctccttccctctcctccccctccccatcctcctcctccccatcctcttccccttcctcctcctcttcccgctctgagatggcaccactgcactccagcctgggtgacagagtgagaacctgtctcaaaaaaaaaaaaaaaaaaaaaaagcaaggcctagagaccagcctggccaacatagtgaaatcctgcctctactaaaactacaatttagctgggctcggtggcaggcgcctgtaatcccagctactagggaggctgtggcaggagaatggcgtgaacctgggaggcggagcttgcagtgagccgagatcgcaccactgcactctagcctgggcaacagagcgagattccgtctcaaaaaaaaaaaacgactcaataaaagagtaactgccctatgaggatgcccgctgacactcatgtggagtgtgctgggatcatccacgtcctctcccaccctgcagtccgccaggacagcagacaacacctggaccagtggggctgacccagccagcggcaggagtggaggcaggcagggtcggcaccgcaggtgtcctgaccctggacccctccatgttgggtccctgccttctgtgccccgtgagcaggtacgtcatcagcagcttagagctcctggtggctgaggactacatgatcgtgtacctgaacggtgccacgccccggcggaggatgcctggaatcggctggctgaagaagtgctaccagatgatcgaccggaggtgaggtggggatgcctcaggaagcacagtgggggcatgaaaatcacacagggggctggacatggtgg

SEQ ID NO: 20395 - DNA, 2300 bp, Homo sapien
ccctggcacccacgcgtccccttcctgtcctcgtggattgacgtgtcctgggcatttcatgtaaatgggatcactgcaccgtggggcagtgaggtcgctaatcaataccctgggacctgggactgcttggggactggcaggcatttgtagcccctgtggcttctccctctccttcctgccggggtgggctggcacagggaggcctcccagaggtgccctgccagggcctttatctgggcatgtcactgtcacctgaggccctgggccacgtgccccaccaagaggctgccaggaaattcttgccaccgaaactgggccagaggtgaagcccaggagccgggctttcctgggtgcctgcttgagcacctggaggagctctggccacagacatagccaccccgctgcactgccacagatcctgtggctgactgctttttctgagctttcctcatgaataccccaagatttccagtccattttgcaaaagctcttgaagtccagggtcacaattctgttaacaggactcataaagtacatcattggtcgggcgtggtggcttaagcctgtaatcccagtactttgggaggccaaggaggaaggatcacttgaggccaggagttagagacccgcctaggcaatgtaacaagacctcatctcttaaaaattctctctctctttggtgtattgatctcttactgcatacagacatacaaacttggccatcctatcaccccaccttcctagtcacttcccatcctctgatcacccccctgctcctgggctataatttcccacttttccttgtattggtggaaagggagaagattgaattcaatctccctcccatactacaaaaccccatggtagtagtccctcacccgcctcaacaaagtcagccttactgttttaagaagcatcagaaaaattattttctggtggggagaggcgtcacatgcctgtaatcccagcactttgggaggccgagttggaggaatcatcacgtgaggccaggagttcaagaccaacctgggcaacatggcaagaccccatctctacaaaaaattttaaagttaggtgtggtggtgcgaacctgtagtctcagctgctcgggaggctgaagcagaaagatcgccccagtgtgagaagttgaggctgcagtgagctgtgatcacatcaccacactccagcctgggccacagagcgagaccctgtctcaaaaaattcaaaaatgtaggctgggcatggtggctcacacctgtaatcccagcactttgggaggcctgaggcgggcagatcacctgaggtcaggagttcaagaccagcctggccaacatggtgaaaccccgtctctactaaaaatacaaaaattatctgggcgtgttggtgctcgcctgtaatcccagctattggggaggttgacgaaggagaattgcttgaacctggaaggcagaggttacagtaagccaagatggtaccactgcactccagcctgggtgacagagcaaaactctgtttcaaatttatttatttttattttattttattttatttttttgagacggagtctcgctctgtcgcccaggttggagtgcagtggcacaatctcagctcactgcaacctctacctgccaggttcaaacgattctcctgcctcagcctcccaagtagctgggactacaggcgtgtgccaccatgcccagctaattttttttgtatttttagtagagacggggtttcaccatgctggccaggctggtctcgaactcctgacctcgtgatccgcccgcctcggcctcccaaagtgctgggattacaggcgtgagccactgcacccggctccatctgaaattaaaaaaaaaaaattaaaacatttaataagagaatactttttccctttaccagtagaagagagaagcagcagagtgtcattcctccccattaccccctccccgccccgccggcccccagtcaaatgactccacccacaaggcaggcacgggatgaatggtccctggtgtcacgctgagatcctgtggctgggcccccggtcacctgggcaaggctatcttgtgattcactgctaaggatcttaagcccaccttggccctgacctcgttggaaaacgaagctccccgcagggtcccggcctctagggctgctgtgcgggcgggggtgggtgagttcgcttccttgacgccacgagaaccagtcttaatgtcagggtcaggccataggacacagagagcgggatatttttagggagggaaaagtgtggggctgctgatctgagctctctggcc

SEQ ID NO: 20396 - DNA, 2300 bp, Homo sapien
cacaattctgttaacaggactcataaagtacatcattggtcgggcgtggtggcttaagcctgtaatcccagtactttgggaggccaaggaggaaggatcacttgaggccaggagttagagacccgcctaggcaatgtaacaagacctcatctcttaaaaattctctctctctttggtgtattgatctcttactgcatacagacatacaaacttggccatcctatcaccccaccttcctagtcacttcccatcctctgatcacccccctgctcctgggctataatttcccacttttccttgtattggtggaaagggagaagattgaattcaatctccctcccatactacaaaaccccatggtagtagtccctcacccgcctcaacaaagtcagccttactgttttaagaagcatcagaaaaattattttctggtggggagaggcgtcacatgcctgtaatcccagcactttgggaggccgagttggaggaatcatcacgtgaggccaggagttcaagaccaacctgggcaacatggcaagaccccatctctacaaaaaattttaaagttaggtgtggtggtgcgaacctgtagtctcagctgctcgggaggctgaagcagaaagatcgccccagtgtgagaagttgaggctgcagtgagctgtgatcacatcaccacactccagcctgggccacagagcgagaccctgtctcaaaaaattcaaaaatgtaggctgggcatggtggctcacacctgtaatcccagcactttgggaggcctgaggcgggcagatcacctgaggtcaggagttcaagaccagcctggccaacatggtgaaaccccgtctctactaaaaatacaaaaattatctgggcgtgttggtgctcgcctgtaatcccagctattggggaggttgacgaaggagaattgcttgaacctggaaggcagaggttacagtaagccaagatggtaccactgcactccagcctgggtgacagagcaaaactctgtttcaaatttatttatttttattttattttattttatttttttgagacggagtctcgctctgtcgcccaggttggagtgcagtggcacaatctcagctcactgcaacctctacctgccaggttcaaacgattctcctgcctcagcctcccaagtagctgggactacaggcgtgtgccaccatgcccagctaattttttttgtatttttagtagagacggggtttcaccatgctggccaggctggtctcgaactcctgacctcgtgatccgcccgcctcggcctcccaaagtgctgggattacaggcgtgagccactgcacccggctccatctgaaattaaaaaaaaaaaattaaaacatttaataagagaatactttttccctttaccagtagaagagagaagcagcagagtgtcattcctccccattaccccctccccgccccgccggcccccagtcaaatgactccacccacaaggcaggcacgggatgaatggtccctggtgtcacgctgagatcctgtggctgggcccccggtcacctgggcaaggctatcttgtgattcactgctaaggatcttaagcccaccttggccctgacctcgttggaaaacgaagctccccgcagggtcccggcctctagggctgctgtgcgggcgggggtgggtgagttcgcttccttgacgccacgagaaccagtcttaatgtcagggtcaggccataggacacagagagcgggatatttttagggagggaaaagtgtggggctgctgatctgagctctctggccaggaggagggaagagggtgggggtggagaggagggaggagggggtaagaaggggaggagaggggaggagggagtggagagagggcagggaggtgggaggagggaagaggcagccccctgcccggccagctcgtgactaatttaggcaaaaggcagcctggagctatttccattcggcggcgggaacaggtgccggcgcctccgccccatccccaggggccgcctcccccggggcggcctccaggctgccgagacctataaaggcgccaggttttctcaatgaagccgggacgcactccggagcgcactgcgtggtcgcaccctacccgggctgccttggaagtcgtccccgccgcccctccgcaccggcatgaagctcatcgtgggcatcggagggtgagcgccgggggacctggtgggcggccctgcggggcaaagccccctgtgcgcgcagagggggaggcccgggaatgaatggagggatgcctggcgcctgaggtcacct

SEQ ID NO: 20397 - DNA, 2300 bp, Homo sapien
ccacatctccctgttctgcagccccagagattgtgaactatgagccgctgggcctggaggcggacatgtggtgagtgtaccacctgctcccaccgggcctccctgcattcctggagcgcaggccagtgctgcagctggggatgaagcggggccttgctgctgttggggtatggggggaccgttgccctagaacaggggcgctggacgccacggtcctgggagggtgggcggccccacgctgcgctgacccttgcctcttgtctgtccccaggagcatcggtgtcatcacctatatcctgtgagtacctggcgggggccccctcggctgtgcaacacagctggcatgggtccccggctccgtgtgtctcatgtggacgccaggggtccccagcctggctgtgacccatcgcgggtactcaggggataccgggtgaacggatgagtgattctctgtggctgctgtcacagaggcttctggagagttctgaaggcaggacactcacagagcggctgagcaggctccgggttgggggtcgtgtgtgctcctgtccctctggctgctagggagcccagcctcctctcgaagtgcaaggaaggggtccgaccccacgctgggttttggctcctgtccctgggccacacgtgggcctgctgttgtttattatttttatttgttgagacggggtcttactctcttgcccaggctggagtgctgtcctagctcactgcagcctccacctcccagacttaagcaatcctcccacctcagcctcctgagtacctgggactacatgtgcacacaaccatgctcccatgctcggacttttttttttttttgatggagttttgctcttgttgtccaggttggagtgcagtggtgcgatctcagctgctcactgcaacccccacctcccaggttcaagcgattctcctgcctcagtctcctgagtagctgggattacaggcgcccaccaccatgcccagctaatttttgtatttttagaagagacggggtttcaccatgttgatcaaggctggttttgaactcctgacctcaggtgatctgcctgcctcggcttcccaaagtgctgggattacaggcgtgggccgctgcacccagctggctaatttttttttttttttttttttttttgagacagagtttcgctcttgttgcccaggctggatgaagtgccaaggccccgtctcagctcaggcttactgcaacctctgcctcccgggttcaagtgattcccatgcctcagcctcccaagtagctgggattacaggtgcctgccaccatgcctggctaattatttgtatttttagtagagacgatgtttcaccatttcggtcaggctggtcttgaactccagacctcaagtgatccggccgccttggcctcccagaatgctgggatgacaggtgtgagccaccgtgcccagctggctaatttttaaaagtttttgtagaggtggagtttcactgtgttgcccagccatattgaatgggcatagctcattcagtaagcaaggaaataaacaatggcgtgggcccagcccgctgtagtgcgtgagcggacccaaaggcttcaggagatgggctagaccgtttgtattctttttaaatgttcagataattcagacttacaaaggagcaacagaaacagcacagacgccccctgcagcttcctcctccttcagtttacatttttcatgaacacgaacgttatgaacaccaagacgttagccttggtgctacgctaatcacaaaagtgctagatgggccgggtgcgatggctcacgcctgtaatctcagcactttgggaggctgaggagggcagatcacgaggtcagggcattgagaccatcctggctaacacgatgaaaccatgtctctactaaaaatacaaaaattagctgggtgtggcagcgggtgcctgtagtcccagctactcaggaggctgaggcaggagaatggcatgaacccaggagatggagtttgcagtgagccgagatcgcgctactgcactccagcctgggtgacagagcgagactccgtctctaaaaaatttaaaaaatttaaagtgccagaggtggttagacacccccgttttccactcctgtcctctctgaggtccccacacggcatttagccattcagctccttcgccgcctccagtctgaggctgttcctctgtctggctttcatgaccttgaccctgacttgtgctcacgggtcaggtgttttgcagaaggcgtctgagtccacgtttagtctcgtgcgctgtcacgatcaga

SEQ ID NO: 20398 - DNA, 2300 bp, Homo sapien
gagaccagcctgggcaacatggtgaaaccccgtctctactaaaaatacaaaaattagccgggcgtggtgatgggcacctgtaatcccagctacttgggaggctgaggcacgagaatcgtttgaacccgggaggtggaggttgcagtgagctggataccgccgctgcactcctgcctgggtgacagagtgagaccctgtctcaaaaaataaaattaaaaaaaaaacaaacctgatacctcccagtgttgtcagttggcacatactatgtctcaataaaatgcttgctgttaccctctattttgagacgaagagggaccctgtgtatgacaaccccagattgacctcatttgcattttaagtatttagaatgtgggtaacagttttcagtggaggaaactgccacatagggactaaagcagtcccagggtccactccaggagctgccaggcgcgctcggccacaggtgagccatccattcgcccaaccggtgctccaggaaggcaggaagcgggatgcagggcttcagcctcacttctcgcagcttcagcacctgggtcagaggagaggcgggcggggcgatgaagggaccggaagtcggccttttttccgtccgcttgaccagcgtcgactgcagccaatgaaatcagggatggcgagtgttcagccagtggtgaggctgcatccgggtgtgggtgccgaaaaggcagctgggggcgggacgtcgaggtgcggcacgagcggcgggcgcaccggccaataggcggcggggttcgtttcccgggggtgggcactggcgggtgcggtgacgtcggcgcaggcgcgtcgcggcggcaggggcgcggggcttctggaggcggcggcggtggccagcgcggcggcgccggccgtattctccgggctgcggagggtaaagagcgggctcgggccgaggctggagggctgggtggggccagagcggcgcttcgggggcccgcggaggacgagggagggagagaatctgaggagctggtaggtttggggacccatctgggtgaccgggccggggaaagggctcggccgggcgtgcgaggggcgtagcggccccagggatgctggagcggagccttagggatgggcaaggccttgggggcggggggaggttctgcaaagggagccactggggtctgcctaggggcttgtgcggagattgcgggcgagaaggggcagaggacggtggaggagactcagatggggccctttttggcggcccgttttggggggtaggggagacggcggttgggggactttgatacatggagcgtggaggaagaggttaatcttgcgaggacagtggaggtcagcgggggagggaggcaaagtgggctttcaggagcgtggaaggcgtcgtccggttcttggaaaattcagaattggagggagtcagagatggttgggggtgggcgggggtgttccatcgatgagggtcttaagagacctgccgagggcaaggaccaggaggggttaaggtagtaacttgggaattttgatcggaatggcagcactttgggaggcctgggacgatcgcttgagccttggagttccaggctgcagtgagccatgattgcaccactgcactccagccagggcgacagagcgagactccttctcaaaaaacaacaacaccaacaacaaaagaagtagacttgagaacttcgttaagacattggccagggagtaaggtagccctgggatttgaggttgaggagaacgtgcaggaatggtgggggattttggctgagcaggttgagagaagtctaggagtgagaggcaaaaaaagacgcaggcagcgtcggggaaatcagaattatgtgtctggagagagttttgcggggtgaaggtggcccagtggggctgttaccaaacttttgagtggttatggggctctaagaggtgacatgacaggacccagcccagtaaacacagcacctctttttgtcgagtttggagcttcagagtggagaggtgggaggcttgtgtttgctggacaggtctgtccattaatctaggagaaaagggtggtgtctcagttcctcacttctgtctttccctgtcttctccagggttgccattaggggactcctgaggtcctatctccaggctgcggtgactgcactttccctggagtggaagctgctggaaggcggaccggccgccatgtccacgttcaggcaggaggacgtggaggaccattatgagatgggggaggagctgggcaggtgagctgtctgcccgcacggctgggctccagggataggagagag

SEQ ID NO: 20399 - DNA, 2300 bp, Homo sapien
ttgctctgtcacccaggctggagtgcagtggctcaatcttggctcactgcaagctccgcctcccgggttcacgccattctcctgcctcagcctcccgagtagccgggactacaggcacccgccaccatgcccggctaattttttgtatttattagtagagacagggtttcaccgtgttagccaggatggtcttgatgtcctgacttcgtgatctgcccaccgtggcctcccaaaatgctggaattacaggcgttagccaccatgccctgccacttttttttctttgagatggagtctccctccgtcacccaggctgtagtatagtggcatgatctcggctcgctgcaacctccacctcctgggttcaagcaattctcctgcgctagcctcccgagtagctgggattacaggcatgtgccaccaggcctggctaacttttgtatttttagtagagacagggtttcaccatgttgagcaggctggtcttgaactcctacttcaagtgacctgcccgccttggctgcccaagctgttgggattacgggcgtgagccaccacacctggccaacccattgtacgttgaaaatgtaaataaaaaatataaaggccggcttgtggctcacgtctgtaatcgcagcactttgagaggccgaggccggcggatcacagatattgagaccatcctggccaacatggtgaaaccctgcgtctactaaaaatacaaaaatcagctgggagtggtggcgtgcacctgtagtcccagctactcgggaggctgaggcaggagaatcgcttgaacccaggaggcagagattgcagtgagcccagatctcaccactgcgttccagcctggacgatagaaggagactgtctcaaaaaaaaaaaaaaaaaaaaaaaaaggctgggcaaggtggctcatgcctgtaattcctgcactttgggaggccgaggcgggcggatcaggaggtcaggagatcgagaccatcctggctaacacggtgaaaccctgtctctactaataaatacaaaaaattagctgggcgtggtgacgggcgcctgtagtcccagctattcgggaggctgaggcaggagaatggcgtgaacctgggaggtggagcttgcagtgagccgagattgtgccagtgtactccagcctgggtgacagagcgagactccgtctcaaaataataataaaaaatgaatttaggccgggcgcaatggctcacgcctgtaatctcagcactttggaaagctgaggtgccggatcacctgagcttaggagttcgagaccagcctgggcaacatggtgaaaccccgtctctactaaaaatacaaaaattagccgggcgtggtgatgggcacctgtaatcccagctacttgggaggctgaggcacgagaatcgtttgaacccgggaggtggaggttgcagtgagctggataccgccgctgcactcctgcctgggtgacagagtgagaccctgtctcaaaaaataaaattaaaaaaaaaacaaacctgatacctcccagtgttgtcagttggcacatactatgtctcaataaaatgcttgctgttaccctctattttgagacgaagagggaccctgtgtatgacaaccccagattgacctcatttgcattttaagtatttagaatgtgggtaacagttttcagtggaggaaactgccacatagggactaaagcagtcccagggtccactccaggagctgccaggcgcgctcggccacaggtgagccatccattcgcccaaccggtgctccaggaaggcaggaagcgggatgcagggcttcagcctcacttctcgcagcttcagcacctgggtcagaggagaggcgggcggggcgatgaagggaccggaagtcggccttttttccgtccgcttgaccagcgtcgactgcagccaatgaaatcagggatggcgagtgttcagccagtggtgaggctgcatccgggtgtgggtgccgaaaaggcagctgggggcgggacgtcgaggtgcggcacgagcggcgggcgcaccggccaataggcggcggggttcgtttcccgggggtgggcactggcgggtgcggtgacgtcggcgcaggcgcgtcgcggcggcaggggcgcggggcttctggaggcggcggcggtggccagcgcggcggcgccggccgtattctccgggctgcggagggtaaagagcgggctcgggccgaggctggagggctgggtggggccagagcggcgcttcgggggcccgcggaggacgagggagggagagaatctgaggagctggtaggtt

SEQ ID NO: 20400 - DNA, 2300 bp, Homo sapien
gccatccttgcttgaggatgacagcgccgccctgtcccccgtgtccccaggcgtgtgcgtgcagacggagacagtgctgcggcaggccattgccgagcgcatcaagcctgtgctgatgatgaacaagatggaccgcgccctgctggagctgcagctggagcccgaggagctctaccagactttccagcgcatcgtggagaacgtgaacgtcatcatctccacctacggcgagggcgagagcggccccatgggcaacatcatggtacggccctccctagctgggtggtgggcttgccgcagcgggatctgcaggagccggtggggagtggagttgagctgagggggactggaagtgtgtttttgccaggaatgttgggtgacagagaagggggctggaatgttttcatccgacttgacccagcccttgatctttgggcagctggaagagacgagctcagggaacgctgccctgggtggtggaggggctggcccccctattcgtgatgactgatcatttcttcactttgaccagatgtctactgaagaaagcctgcgtctgaggcccatgcccaaggcgcccagcccgtagcttcaggctctgcgcaggggccctcacggctgcttctcgtttctcacacttccagatcgatcctgtcctcggtaccgtgggctttgggtctggcctccacgggtgggccttcaccctgaagcagtttgccgagatgtatgtggccaagttcgccgccaagggggagggccagttggggcctgccgagcgggccaagaaagtagaggacatgatgaagaagctgtggggtgacaggtgagccccgcgggatatggtgggggattcctgacacctgggggtagtggcagcgacgtaggggcgtggtgtgctattcacagcgtggctcaagcccaccaggtcttgcccaagcatgtccccttggcgaccaccctccccaagtcatcccctggagaccctaacttgatttggcttggcctctccttgccaggtactttgacccagccaacggcaagttcagcaagtcagccaccagccccgaagggaagaagctgccacgcaccttctgccagctgatcctggaccccatcttcaaggtgagtgagggctgcgccaggcaccccgccgatgcgactattggccctcggccctgtgggctccggccggtagcctgtcggctgactgggcccgtctccttgtggggcagatgcgagatgggaggaggcacagctcctaactgaggtggagtcagggctcctctcttaagatctggactgcatagccagagccttgggacctctcctgcattgagggggttgaataacttgtggctttggcggttcagtgcttgtaagtcagaacttgggtccttgtctgagtcagagtgggctttttcctctgctccaccacgaggtttcctccagctcccgatccgctcagctggctgggcccgtggtaggcaggccaggcctgctcctgctcccgtgctgcgtccccctgcgctgacctgagtcttccaagcaggaagcagtgccaggcttcctcctgctgttcccaaatgggctttcttgtttcttggtggggaatgtaggtgtttgatgcgatcatgaatttcaagaaagaggagacagcaaaactgatagagaaactggacatcaaactggacagcgaggacaaggacaaagaaggcaaacccctgctgaaggtgcggcctgggcccagccctcggggtggagggaacacaggctgctgtttccggatgctctgacagcccaggcctgggggctgaagtcctcagctgggcagggacagctgctgcccctttcgctttagactctgggtgctgctggagacacatcccagcagccagccccatccgggacaggtgtgggtgagggccttggcaggagtgtgcatggcctttgccgccttccagaagggactgtgctttggagaacgttagtcctgactttggcttccttggcttcaagagaggaagcgtgtacggggtggggccatcctgggctccccaggtgtctcatgcaccgctctctgcccccgcaggctgtgatgcgccgctggctgcctgccggagacgccttgttgcagatgatcaccatccacctgccctcccctgtgacggcccagaagtaccgctgcgagctcctgtacgaggggcccccggacgacgaggctgccatgggtacgtggtcccggtggccgggccctgagatgcagccggatgacttcctgttgcccaaggttgtgggttgca

SEQ ID NO: 20401 - DNA, 2300 bp, Homo sapien
tttttttttttttgagacagagtcttactctcagtcgcacaggctggagtgcatgcagtgccgtgatctcggctcactgcaacctctgcctctcgggttcaagcggttctcctgcctcagcctccaaagtagctgggatttcaggcgttcactaccacgccgggctaatttttttatttttagtaaagacggggtttctccatattgggtaggctggtctcgaactcctgacttcaggtgatttgcctgcctcggcctcccaaagtgctgggattacaggcgtgatccaccgcaagcagcctaacccctctttaatttttaaaatttttaaaaatttttttgagacggaatctcgctctgtcgccaggctggagagcagtggcgcgatctcggctaactgcaacctccgcctctcgcctgacacctcttttaatgaaaacctttccattacatctctgaaatgctcccactttgcacggaaaaaacggctgcgaagcccccaataggaaacgcaacacgtagcaggtgctcagtgcatttaaaaattttgaagaattttattattaataatgcgaaactgactacccctctgctaaaaactcatgccccaaatggcgcatgcgcttgacttgcaacttaactaaacgcgtcacaggtacaggtgtaggtggttagggaccccgggcgctcccatctgctccctgccgcgccctctgcctttcagagcctcaatcctttcggaagatacttttcagttttccactgggttaaatggtgataggaagagcaatcatccgttaaatgaaacccaaggttgagacagcgctttgtaaagcaaagtgcccgaagcattcgtgagggggaggagtgtacaggtttattttagagtccaggctggaatttgcattgctttttgtggatccacacctccccctctcccagcccaggaaaagcactgcagtggctctcctgtttcacaaagtgagtttaaggaaagatgtaccgcagggggttcatttgcactgtgagaacatcattcatgcaagaaatgctgagtacctactatgtgctaaacagcgggttgggcttttcataagggatagagttacacaattgaatgccaattcatgagatatgaaatacattcaactgtttcttagggtcagattaggacacaaatgctaaacagtcttcctgcgcctccccctggagaggaaatgaaatagaaaatgaaattgtgccagtaaaccgcttagccgggtgcctgggacatggcaaaccagtcctgaaataaataactgttttattaatagcaatcttagctaattaaaatagatagcgtttattgagcgttgggtatcaggcacggtcctaattcttttagatgtctttagttcgtttcactctcccccaaacaatagggtggtattgatcacctccgagcaggtgaaattgaggcacagagaaatcctagtagctggtagaagaacacgcagtgtggtcaagctagcaaggtgtttggtccactgctatatctacaaaacccctaacaatgcctggtgtatagatgctcagtatgcatttgtgggatcagtgattccgatgcctgcttcttataaagtttttatttagaaataattacaggtaaggagttgcaaaaacagtatagtggtcgcgagtgtcctttttccctcggcttctcccaggggtatcgtcttacgtaacaatgtccaaacagggaaattgacttgggtataatccacagactctattcaccttgtaaattggttttaatagaagtactggacaacttgtaagctaatatcgttgctatggttctcgttctcagctaaaacggcgctctttactttgtgcacctgaacactgcacaccgagggcgaccaccgcccccgagatgcccagcttctattctagagcgccgcgccggcgccgaatgggttaacgggcggggggacacgcctccgtgcgcttgcgcggcgtcccttcgccccgccttcgcagcgcagtcacatgacccgcccaaccggcgtccgcctataaaaagctgagtgttgacgtcagcgttctcttccgccgtcgtcgccgccatcctcggcgcgactcgcttctttcggttctacctgggagaatccaccgccatccgccaccatggtgagtaaccctgcctcgctggtgccccggagcggcggcggggcctccgcggggcctacgctgcctagcctgggacgctggggccccccgtgccaggaggagacgtagcggcggcggggccggaggac

SEQ ID NO: 20402 - DNA, 2300 bp, Homo sapien
agaaagagagaaaataaaataaaagagaaaatgggctgatagggctccctcctggttttcccaaaggtcagataacaacttagcttcgtcattgtgacttagaatctgagtgtgactagctgcattttgtttattcctgtgtcttggtgcctagcacaagagtttagtctaaaacaaccgcctcctataattttgtcgcccaggctggagtgtagtggcatgatcaaagctcactgcagcctccaactcctgggctcaagcgatcctcctgcctcagcctcctaagtagctgggaccacaggcgcacactcctacgtctggctctttacttaaaattttggtatttcaggccgggtgcggtggctaacacccatgatcccagcactttgcgaggccgaggccggtggatcacctgaggtcaggagttcatagaccaacctgaccaacacagtgaaactccatctctactaaaaatacaaaaatcagctgagcgtggtggtgcccacctgtagtcccagctactcgggaggctgaggcaggagaatcacttgaacccgggaggcagaggatgcactgagccgaaattgcgccactgcactccagcctggcgccactgcactccagcctggtgacaaagcaagactccgtctaaaaaaaaaaaaattagctgggtatggtggtgcatacctgtaatcccagctactcgggaggctgaggcaggggaatcgcttgaacccaggaggcagaggttgcagtgagtggagatcgctccattgcactccagcctgggcaacacagcaaggctctcaaaaaaaaaaaaaaaaaaggctgggcatgatggctcatgcctgtaatcctagtactttgggaggttgaagcgggcagatcacttgaggtcaggggttgcagaaaagcctggccaaaaaaaaaattagctgggcgtggtggcagtcgcctgtaatcccacctacttgggaggctgaggcaggagaatcccttgaacccgggagatggaggttgcagtgagctgagatcgcgccattgcactccagcctgggcaacaagagtaaaactccgtctcgaaaataaataaataaataacaatttggtatttcatccatcatggactcttttgcactgatttttttatgtttaaagtgttggactagccaggtgtggtgactcgcgcctgtaatcccagcactgtgggaggcccagacagaaggatcatttaagcccagacattcgagaccaccctggataacataatgagatcctcgtctctacaaaaataaaaataaaaaataaattgcactaaaatacttgattattgaagtttgaaatccacttctacgggcacgaagccacttagctccaaagccaaggagcgctttggagaagaggtcccaactggtgcagatccaaggtttcccatgggtggggaggcaggatggggggggcgcctgcaaagaggtgagggctgtacgatctccaaggaatttgggagcaggggtcccgcttttctccgccgggcgcccccagccagctggttgccgagcccacgccccatctgcacaccaggacccggatgtgcagcgcgcggggtgtctgggcccgtggagcctgcaccgcgctgcgctgcaaggcgcctcactgtacgcactggcggccgttgcggcggagcaaccatcccctgcccgacgccgccgggagtctggagacgcacctggcggccgccgcgcgcaggaagccacggcacctagctgcattgttgtcgctgccaccgccccctctcgccttccctccctagaggaaaccgagcacccgtccccacctgcgcagggctagtaccactttaaggagtcaggcgccgccggggtaggcgtggtcgccgcgagcgggggggggggcgctggtgtaggacggacctgattggccggaggcccgggcggtggccgcgcgcgcctgcgcaggaggcagcagcgcgcaccggcggcgggaggagcgcgcgcgggtgctaattggcccgggcggcggccccgcccgcgagtggtgagcggtcacgtgacgcgacggctgggggctcccggcgcgggggacgctggtgaccaagatggcggcggagctggtggaggccaaagtgagtgagcggtggcggcgccggccggggcaagtgggcgagagggcgggggccgggccgcaggtcgaggtctgcgccttctgtccggggccccacagcgcggccggcccgcggctcgccgtcccggcccccagaccccgacccccggtctcagggtgag

SEQ ID NO: 20403 - DNA, 2300 bp, Homo sapien
agccaccctgcccatcccacatttctttttcttatgtcgagatatgatttgcataccatagaatatacagtttttaagggtgtcatcgagtgggttctcgtggatcagtaggtatcgcagctcccaccactgcctagtctcagggcagtcatgtccatccccagcagctgccacccttcatccactggcccccacgcatcccctcctgtctgtaaatgggtctgtcctggacatttcatagaagtggaatcacatactatgtggctttcgtttattattattatttaagacagaatctcactctgtcgcccaggctggagtgcagtgtcgcgatctcagttcactgcaatctccgcctcccaggttcaagtgattctcttgccccagacttctgactagctaggattacaggcgtgcaccaccacactcagctaatatttgtattttttttgagacagagtcacactccgaggcccaggctggagtgcagtggcacgatcttggctcactgcaagctctgcctcctgggttcacgccattctcctgcctcagcctcccaagtagctgggactacaggcacccgccaccacgcctggctgatttttttttttgtatttttagtagagacggggtttcaccatgatagccaggagggtctcgatctcctgaccttgttatccgcccgcctcggcctcccaaagtgctgggattacaggcgtgagccactgcacctggcctaatttttgtatttttagtagagacgaggtttcaccatattgcccaggcttgtctcgaactcctgacctcaagtgacccacccacctccgcctcccaaagtgccagggttactggcgtgagccacctgccttgtgtgtcctttcgtgtctggcgtctctcactgggtgggacatcctcacggtgcacctgtgctgaggcctgggtctgagcctggctcctttccatggctgggtcgcgtcccgtgcgtgttggtccttcggtctacggaaggacactcaggatgctgctagtttgtggctgttgtggtcagttctgctgtgaacatccacggatgcgtctttgggtagatagactttttcctcttcttctgggggcgtttcttgttaaagtttatcctcaggtgttactggtttttgtttttttttttttggagagtgtttctctttgttacccaggctggagtgcagtggtgcaatcatagcttgcagcctgtgcctccatgggttcagacgatccccctgcctcagcctccaagcagctgggaccacaggtgtgcaccaccacgcctgggtaattttttgtggagacagtttcaccatgttgcgcaggctcgtctcaaattcctgggctcaagagctccgccagccttgacctcccaaactgggtgttttcttgccattgtgagccagctgctagattcccgcatgcacgttttagctatgtttcttcgcagggagaggcacctggctgccctctctggttcagggttttgctgtggattctgttgcattttccagggaggccagcccctctcctgacctcacagccactcctctcacccagcccgtacaaaagagtcctgggcctcagtttcccagctctgggggagggagccttgtggtgtggcggtctccaccttgtcgggtgggctggggtcacgccctcctcactcagctctcctttcctttcctctggtttgctccacacccacagggaactgcagcccggagttaaagccgtgcaggtcgtcctgaggtatgcccaggtgtgcccgcgaccccagggctggacccccagccacccgcccctccccgccccccagtcctggcccaggcccttctcagtctcccctgctaacagcagagcccagctctcctcacctgctgtctatccctgtctggggatacatcaccatccgacccccactcaggccacacccgggggccctgataccccccgtgtcacattctccggtgcccccatcactgccgcctggctaccactcgtgtacccccgcagcagcctagtccctcctgtgcgccccctccccgccccatggtccctgttgtcgttgcagaatctgttactcagacaccagctgccctcaggaggaccagtacccgcccaacatcgctgtgaaggtcaaccacagctactgctccgtcccggtgagcatgccccgcccccgcgtcggctgcacgggtttggggggcgtggagggagggtgggggccgtcggatttcccagccgctcttggctcgaggctgagcggcccatctgct

SEQ ID NO: 20404 - DNA, 2300 bp, Homo sapien
gcgggagggcaggttggtggtttcatttagggacccgggagccccgcggacccgggctgtccttggcaaggccaccccccggggtccctggcgcggcaagtcccactgaggcccggggaggcccagggcctggccttgcggggggatccccaccgcctcacccccaacccacccccggcagcccaggccgcgcgacccacacgcccgcgtcgctcctcgctgtgcgcaccgcgctccccgcccccgctgccatcctgccacgccccgggcgtcgggggcacagcccgcgcccccccgcaccccgcccctgcgcagaggctgggggcctgtttatctggaggcccccaccccccctccaccccggggggcccgctccccccgcgccccggggagctctggggccagataagctggcaagctggcacggcgccgcgcggcggggcggagaggtcagaggcgggggggcgcgccggggcgggccggacccccccccccgacttgacaaaacctaataacagcccggtctccccggcgcagcgggcgaagccccacgggagggcagagacgtggcaagaggggacctgccgagcctgttctggcctccgaggccaggctggggggggcgggctgggcgtgggggggccggcggctgcggcacctttaagacaagggaggacccctcttgccctcggagaaaccaggaagggagtcgcgagcatcatacggggctttggctgtactgtacagttactgtaggggcagtgacgccgccgccgccgcgcgagggagcgaccagggcagcgcgacgcgggcagagcgagcgccgcggaccccggaggcgagcggccgagggagcccagtcccaacttcgggccccggccccgcgcgccccggcccggccccgcgaggtaagtcagcgcccggcgcggcccccggcacggggtgcagggcggggacgggcgggggtcgctgcggccaccgctgccccctcgggaaggggagatccggggagccggggacgttcccccaagtttcagaggaaggggtggttggcagctgcccggaggctggaggcgccctggatcccgagcgcggggagggggcgccgcccgggaaggggggattgggggctaagtgcatgagcttgtgcgccagccccccccaacccgggtgcatggcttttcggggctcccaggcgcgcggggagcgggggaggggaagcagggctgcattgagggtggggggagccggcgtggggagataggggggcgcgtcgcctgctaagtttccagctgaagacgaggggcgctctcgccccccgggggcctattcggtgctgcgtgcatacgttggagttggccaggattgagctccatgggggatgggggggagggggctgaaaaaacagggaggggggcttcggaaaggagggggaaggggtggggtgtccgggtgggcgggcagggccgcagggacctctgggcttcgtagtccctccgccgtttgcagccggcaggtggcaagcggcttggactacaagtcccagggtgccccgcgccgacagcccgccgcggcctgcgggtaggggcggtgcggaggaggggcggtgagcggcgggccggagagccaatgggcgcgggccgatcgcgcggcgcggcgcgggggcggggccagcccgccagggggcggggcctggagccgggctcccctcgccgggggccggtggcggtcccggcttccggctgcgcggcccgcgggccggccccctccccgccccggggcccctccccgcctggttgtgtaaccgtccccagcccccctcccctcggccccccgcccgtggggggggggtcaccctccccgcgctccccggggagggcggcggcccgggcggccgcgcggtgcaggcgagcccggggatgcgcggcctagcgcaggccgggcccgggcgtgggggaggcgggcgggcggacccagatccggggtaatttgcatcgccctccccccagcccgggtggggattggccgccggcggcggggggtggcgcggggccaggctcactgccgcctcccggcccctcggagggagccagcccagccgcagccgccgccaccgccgccgccggggccgggccccctcgccgctgccccgggaaggaggtaggagccccccgcgcgggcgaggcggcgggggaccgcgggccgggcgggggccgcgcgctgcggccggggcgggggagggggccgcttcctgcccccgcccgggcctgactcagccccgggtggggggcctggcctgg

SEQ ID NO: 20405 - DNA, 2300 bp, Homo sapien
ggttggatcacctgaagtcaagagtttgagaccaggcttgccaacatggcaaaactctgtatctactaaaaatacaaaaaaaaaaaaaaaaattagccgggcgtggtggcaggtgcctgtaatcccagctactcaggaggctgaggcaggggaatcgcttgaacccgggaggcggagattgcagtaagccaagatcgtgccattgcactccaggctgggcgacagagcaagtctgtctaaaacaaaaaacaaaaaaacaaaacaaaaaaaaacgtctgggcatcatttgcagaaatccaaacacaacagtgggatctgggaagaatcgtgcttcagcgtggcctcctggtcccgaggctgatggccggtggttgaaggaagaaggatttctatcccaggcagggtccttggagcaaagtccctggatgacaccctcgccctagatccacgcggcccctccctgggtcccttcccacctacccggctggtttcaggctgcgagtcctgagacagtccacttcccctccggggggccctcccgggtttcccctcgtagccagattattattacaaaagccaatccaacccgtttgggtgttgaaaggcgcttttaataaattgtgcgaagaagccataaactgtgtctctcgcaggagaggctttgaagtcagaggacaggctgggtacactacacccaggccggtggtggttcccgctgtcaggtggtgttggtactaagaatgccagataataataaaacataataatgaccctgggattaggtgttagaatgaaggcacagtgagccccggaacagggtcacccactggataagcgctcactaaacggcagctaaagcagctgtcagtactctctctgtctggaggaatgaggaaggggaaactgagtcctggagccctcccccccccccccaggcgcgcggtcgcaccagccagccctccccgggccgggccaggacgttctcaccactcgtgccctgctcccccttccctgtcccccgccggacctctcccacgaccggggaggaagtgggagaaacggacaggggaaaaaaaaaagtcgcgctgaaccaacgcctccccactccccacctccgcccctcgcgagccatgcagacccccttgtgccaaggagcggcccgcgcggaccaggcgtccagggcccggtccccgtcccgccccgcggcccgcagccgggtgggggaactcgcgaagccgggaaaacaaccgccctccccgcccctcgccaaccccttcccccgctgacgcccctagcgcagcggggtggaggcgactcctttatataatcgcgggagggcaggttggtggtttcatttagggacccgggagccccgcggacccgggctgtccttggcaaggccaccccccggggtccctggcgcggcaagtcccactgaggcccggggaggcccagggcctggccttgcggggggatccccaccgcctcacccccaacccacccccggcagcccaggccgcgcgacccacacgcccgcgtcgctcctcgctgtgcgcaccgcgctccccgcccccgctgccatcctgccacgccccgggcgtcgggggcacagcccgcgcccccccgcaccccgcccctgcgcagaggctgggggcctgtttatctggaggcccccaccccccctccaccccggggggcccgctccccccgcgccccggggagctctggggccagataagctggcaagctggcacggcgccgcgcggcggggcggagaggtcagaggcgggggggcgcgccggggcgggccggacccccccccccgacttgacaaaacctaataacagcccggtctccccggcgcagcgggcgaagccccacgggagggcagagacgtggcaagaggggacctgccgagcctgttctggcctccgaggccaggctggggggggcgggctgggcgtgggggggccggcggctgcggcacctttaagacaagggaggacccctcttgccctcggagaaaccaggaagggagtcgcgagcatcatacggggctttggctgtactgtacagttactgtaggggcagtgacgccgccgccgccgcgcgagggagcgaccagggcagcgcgacgcgggcagagcgagcgccgcggaccccggaggcgagcggccgagggagcccagtcccaacttcgggccccggccccgcgcgccccggcccggccccgcgaggtaagtcagcgcccggcgcggcccccggcacggggtgcagggcggggacgggcgggggtcgct

SEQ ID NO: 20406 - DNA, 2300 bp, Homo sapien
gggatggatagccggcctgccatggccatctttgaactcctggactatattgtgaacgaggtttgtgcttgatgccttttggcttttcttttccttttctttcttctttctttttttttttttttttttttttaggcagagtctctctctgaccagagcaagagtcaccaaggctggagtacagtggtgccttctcggctcactgaaacctccactttccaagctcatgtgattctcgtgcctcagcctcccgagtagctgggattacaggtgcgcaccaccacacccagctaatttttttttttttttttgagacattgtctagctttgtagtgcagtggcttgatctcagctcactgcaacctccgcctcccaggttcaagcaattcttgaaccaattccacgtgtgtcgcgtctcccatcttctactgtgctgcacaagcccagctccttcccaagggcattgtttttttatgaagacgaacccagaattcccaccgcagcctctcaccctgagtccagagggaggtgtgtgccagcagccctgggctcaggccgaggagccagcctgccccttgagcagtggcccagtgtctctgcatcagagcgtcctggcgcccgtgggcgtggactcataaatcaccccgcttccacggagaaaggtacaggaatggcccttgcctcttggaaggaggcccagagagcctagaaggacctgtaggtcccggggtggctcctgctccgtcagtccccataacaacccagtgagccacagtatgagggtttccaccgcccagatgagtaaaacaaggcacaaggagggacgcggcctccttccaggcctgcagctgtcagggaggcacaggactgcaccccaaggtcctgttggccacgtgaccaggccgggccacctccctgggccttctgtgggtttctgtgtctttggtggccctttggagctggggcagagaaacgggcatttgagctgcctgcagactgggctaggcctggggttgggtggcgagatgatgacggagccaggtggggtggccctggtgacccagctctccctgcacctagcagccacacccatgcccagtgagcacatcccccgacctctcccccgcctcttcccgcccctgcccctgcgcgggaaaggcctgcccctgccctgctggcaccgcttacacggccactcccgctccggggacgtgtgtcaggccaggctccccagtgcttgggcttaaaactgtggacccagtttggccgggcacggtggctcaggtgtgtaattccagcactttgggaggccacagtgggtggatcacctgaggtcaggagttcgagaccagcctggccaacctggtgaaataccgtctctactaaaaatataaaaattagccaggcgcagtggtgggcacctgtcatcccagctactcaggaggctgaggctggagaatcccttgaaccccggaggtggaggctgcagtgagccaagatcacgccattgcactccagcctgggcaacagagcgagactgtctcaaaacaaaataactttggatccagatgtccctctgtggggcccagtcccaaagctcatccttcagccagtgacactggggaaggaagcaagtgacgacactcgagaggttgtcctgttgataaaagggggacgcaccccactctttccctctaagcagccgtgactctcaaacgagagctttcgggagaaggccacctctgacagggtgcagcccagttggcatgtggtgtcggccaggcctgcagggtgggtgaccggacaggacagtgaggggtagagagggctgcagccgagggtccctgacgatgcccagggctgaccccaccctctgttctcctccacagccacctcctaagctgcccaacggtgtgttcacccccgacttccaggagtttgtcaataaatggtaggtggagccgggctgcccacacccctggccgggacccagatgtgccactccttccgggtcctgggtggggcccgtggcccagcctgcccatccagaatcccagtgcagcgttaggcaggactcagcccaacgggaagccagattccttttcccagagctgtggggctgcagctcccggctgccatgccatcctgtccgtgagcccaggggtgaagcaggattgcaggccctgtgcacatgacggtgtccccagctcactgtctgcagcaggagaagcctctgtctggtccccggacccctggtgtgctgactgtgggctccccgggatccgcccgcaggttctggg

SEQ ID NO: 20407 - DNA, 2300 bp, Homo sapien
gcccccggccgcggcttgggctggcccggagcagagcctctgccgtggcgacctcaggagggccgagtcacgcaactgattcgaggatgggacgggaggcgggggaaccctgggccctgttccttccccaccttgtgggtgggtgttcagacccaaaggcagaactgtcagaagacgccctgcccttggcccgtgggtggagttgggctccggcccctgcttcccgtcaggaggcagaccaccccctcgccgggagtggggggacgcatccgtggcttcccggccacctgcgcagagcctgcactcactccttgtgtgccctctaggacggcggctccctggaccaggtgctgaaagaggccaagaggattcccgaggagatcctggggaaagtcagcatcgcggtgagtccaccgcagacccacatcgcgcccccaccgcactctgcacggacctcttccacacggccagggttccgggagccactcacagtgtggtgggggttagggtggcccctgcagaaagagagtggccaaggctgtgcccacctgctgtggagcttgaacaagtgacgtcccttttggggcctgaggtcaccatctgccaagtgaagacgttataggtccctcttcactcttagtatcctctgtttgccacactggtcccctctgcccctcgtggcagggggatgttggcagctggcacgttgcaggggacaggagcttgttgaaagggagactctggggtgggatgtgggacgccaggacctccagacacactcaccattgctgttagaaatgtcaccggggccaagggcgtctctgctgcccggtctccagcacagctgctccgtagagccgtgtggtttcagcagaccgtgcgtgttgcttcttggagcttgcaccttgtccatagcaggggccgagtcccgcctgcccataccagtgttggattaagacacaggacgcatgctgccagacacgcgtttccgagttgaaagctgccgtcacactgcctgtgctgcttgcttcacttctcgggatgctgcttccagggcgggcctgggggaaacatcgtccttcccaggcacccttagcccgtcccatctgggggcccttagcacagtccctgggaccccagatgctgcctttcaggctgatgtgggcaaactcggcagcccagcctactcccgggccatgggccaccatctcagcttccctggggctaagccgtgtgctctgaatcaaaggcagtagtggcatcggcggcactgcggccatgggaaccggggttgacttgcacacgccagcacagggctgtcagcactgtctcgtctctggcctcgcttgctccaccccagcgagctcctcacagcctgaaatggttcctgccgcagctccctcgctccagctctgactgctcagctctgacccccgggctcggtcaggagctaagccctggtggccttgtcccgtgactccctccgcgctcccctgcaggttctccggggcttggcgtacctccgagagaagcaccagatcatgcaccgaggtaaggcccagcccgccctccccagagccccgggggccggcaggcaactgttgggcgcccctcacccgcagcctgccgcctccagatgtgaagccctccaacatcctcgtgaactctagaggggagatcaagctgtgtgacttcggggtgagcggccagctcatcgactccatggccaactccttcgtgggcacgcgctcctacatggctgtgagtccccgctggctctcccctccagctctcctccctgctgctctcccccaagctctccccacccagctctgccagccagctctccccctcagctctcacccccatgtctcctgcgcagctgtccctcccagttctcctgcgcagctctccccgcctcccacgaggctttcccaactatttcgtgggcacacactcctacatggctgttagcacccccgggacagtcccaccccagctgcaccctccccttcatcagctctccccacttgccacaaggcacgtctaaagctggtgcctcctgggagcctgcttttcggattccccttgctctttattttttatttgttaatttactaatcttttgtagacacggggtctcgctgtattgcccaggctgctcatgaactcctggactcaagtgaccttctttcctcagcctcccaaagtgctgggattccactagcagtgagcctgagccaccacgcccggccagatctccccttcctgttggaattctctcttaggtttttgtctct

SEQ ID NO: 20408 - DNA, 2300 bp, Homo sapien
agagcgagactccgcctcaggaaaaaaaaaaaaagaaagaaaaatgtgttcacctactacctacgtaacaaaattacagttacaagaccattttaaacatcacacacacacacacacacacacacacacacacacacacacacacacacggtagacgtgtatggtcatgcacagagtgagatttggggtcagcagtacacagctgcaataccccctgcaccacatcctgtctctgtgactcagacaaattgcttaccctgccagactttggtctttatagctggagatcagcccttctcaaccaggggcagttctccctcccaggagacacctggcactgtctggggatgtgtgtggttgtcacaactgggggatgctcctggcgtggagtggatggaggccagggacgctactcagcgccctgcagtgcccaggtcggccccaccccagagagtgacctggccccgatgtcacagtggagaaaggcggctgcagagagagcgatgctcctgtgaggcgtcttccaccagctcctgaggctgcagcacagcgctccgcccgccctcatctccggggagaggctctttgaattttctcactaaacaaacattgattgcggccccaggagaaacgaagacggaaggagctgtgctggggagcaggggttttagggttgcgtttggtgcgtctgtttggttttcgccaccctgcctctttcgagtcgttggtctctttctggtttttgtttttttgagacagggtcttgctctgtcacccaggctggagtgcagtggtgtgatctcggctcactgcaaccttgacctcccaggttcaagggatcctcccacctcagccttctgagtagctgggactacaggcgtgcaccaccacgcccggctgattttggtatggggtctcactgtgtggctcgggatggtctcaaactcctcagctcaagcattctttttgctttggcctcccaaagtggtaggattataggtgtgcgccaccacgtgcggctttttttttttttttttttaattgaggagtcttgctctctcgcccaggcgagagagaagtggcacgatctcgactcacagcaacctctgcctcccaggttcaagtgatcttcctgcctcagcctcccgagtagctgagattacaggcatccaccaccacgcccagctaattttttttatttttagtggagatggggttttaccatattggccaggctggtctcaaactcctgacctcaagtgatccgcctgcctcagcctcccaaagtcctggcattacaggcgtgagtcaccgctcccagcccatgtccggcctcattttaagtaattcttttaaggtagattgataaaaactgagaatagaagcagcttccacctggccctggctcactggagctcccgtcctggcacctcctcctgggctgtctgagccctggccatacctgccctctcaccctgtgtgtctgcgtcttcagcctggagctggtggatggagtcacgtgtatgctttagaggtctcaaagcgtgttgggttttctagaactgccttcggcctttctctccaagcctagctgggcagaagtggccagagagcggcaacccgggcacccctgagtcccaggatttctcccccggctcctcccacccatgtgaatgaaagccatcccagggaaggctgggcttttgcaggagtcctggagcagcatggtggggaaatccaggctccccagccagcctctccaggctcctccagcccgccctctctagcctcagttccactttcctctctgctgagcacagaagagacgcacgccagacggtggcagtgggaacttggcctgtcacccctgctgtcctgggggtggcctggcaggtgtgtccggagcctctgcctctgaagaggcaccttgggtggctcccagtgcctggggttttggcatttgggggttttggtccccaggtttgttgccaggcagccttgggcaagacatggaatttctgtttcatcatttatgacatggatgtggggccacacccggggaccagcctacccatgatgactcgtttccaggccctccgcaggatgcccggcacagtggcgaggagaccacaggctgtggggaggggccgaggttaccgtcacctgggctggcgtcactgggatccctcctgcagtccatgcaccccctggcccctggtcctactcggcctggcctttctgccctaggtggcagggacaggcgcagggcagacgcccagcagtggagccgcagggcttgg

SEQ ID NO: 20409 - DNA, 2300 bp, Homo sapien
gggtcctgggattacaggtgtgagccacggcacctggcaaaaaattaaatttttttttgttctgttttattggagacggagtcttactttgtcgcccaggctggagggcagtggtgcaatcttggctcactgcaacgtctgccccccgggttcaagcgattctcctgcctcagccgcctgagtagctgagactataggcacacaccgccaggcctggctaatttttgtattttatttatttatttgtttgtttgtttgtttgtttgatttttttgagacgaagtctcgctcttgtctcccaagctggagtgcaatggcgtgatcttggctcactgcaacctctgcctcccgggttcaagcaattcttctgcctcaacctcgcgagtagctgggattacaggcacgcgccaccatgcccggctaatttttgtatttttttgttttagtagagacggggtttcaccatgttggccagactcgtcttcaactcctgacctcaggtgatccacccgcctcgacctcccaaagtgctgggattacaggcgtgagccaccgcgcccagcctatgacctttcttataaagtggtacggctattgtattaaatagtaaggtggtgcttcaaaaagttcaacatagaattaccatataatccagtaattcctcttcagaacatatacccaaaagaactcaaggcaaggactcaaacagatatttgtacatctgtgttcatagcggcacgattcaccgaagtgtctagtggcagataaatggataagcaaaatatagtccatgcacacaatagaatattattcagccttaaaaaggaggaaaatcctgactgggtgcggtggctcacgcctgtaatcccagcactttgggagatcgaggcgggtggatcacgaggtcaggagatggagaccatcctggctaacacggtgaaaccccgtctctactaaaaatacaaaaaaattagccgggcatggtggtgggcacctgtagtcccagctactcgggaggctgaggcaggagaatggcgtgaacccgggaggcagagtttgcagtgggccgagatcgcaccactgcactccagcctgggtgacagagcgagactccgtctcaaaaaaaaaaaaagggaaatttttctttttttttttttttctgctcttttttggagcagggctacccgattggaagtatgcccggagtagtcaagtgggtaaattctaacacaggttacaacgtggatctaacacagctacaacaggcaccttgaggacgtggccctcagtgaaatatgccagccacaaagggacaaaacctgtgtgatcctactcatatgaagtccctagaatcatcagattcacaggaagtacgacgttgggttccaggggctggggagggggatagggagtgaggtttcataggggacagtgtttcagtttcggaagatgagaaaattctggagatggtggtggtggtggttgcttaatgccgctgagctgtgcatttagaaatggttaaaatgacaagttttatgttatgtgtattttataataaaaatgtttcaacatgcgcatagtaatatatgcaattttatttgtcaattaaaataaattttaaaaatgttttagagtggccttgttctgatgaaggagggggagtaactgacactctaaggcggtgggggctaggggcgtgtgtccacgcttgccaaaaagattaaatggactctgggtgggtctcgtccactgttctggggtcttacgggttctctcagccccagcctggggcaccacaggctctcaggagtctggctaccctgcccacctgtgcacgaccatcaccccagccttcatccctccgtctcctcccctgctcccgcgcctcatgccccaagcgcttgggcacacgcgccgtggtaaggcaagcgagggcgcccggtcccggcaccgcctcgcgtcggtctccgcccctttcccctccgaaaggcggccttgtgctgctgcgcaggcgcggcggctgggggtggggtccatcgcggctcccgatcccgttatcgcgagaagccggtccgcgatcttgtggccgcccctcccctccccctgcctctcggactcgggctgcggcgtcagccttcttcgggcctcggcagcggtagcggctcgctcgcctcagccccagcgcccctcggctaccctcggcccaggcccgcagcgccgcccgccctcggccgccccgacgccggcctgggccgcggccgcagccccgggctcgcgtaggcgccgaccgctcccggccc

SEQ ID NO: 20410 - DNA, 2300 bp, Homo sapien
gggcacataaattacccctctcaacctagcacatggcacagtgtccagcaaacagaaagcttgatttagtctcctatttgctaaacttccaacagtgccctgctgtttagcacaaaccaaactccttgccacaacacacagggctttgcacgacctgccccgtcccctccctgccttcccctcctccctgccttcccctcctccctgtcttcctctcctgcctgtcttcctctcctcactctgctccagccacaggggtctcattgctgttcctccaatgcgctaggcacggacctgcctcagggcctttgcacaaactgtgcctctgcctgggacacctttccccagaccttcccagggccagttccatctcatccttcaggactgcactgaacatgtcattttttttttttttgagacagagtctcactgtcgcccaggttggagtgcagtggtgtgatctcagctcactgcaacctccgcctcctgggttcaagtgattctcctgcttcggcctcccgagtactggtattgcaggcatgtgctaccacacccatctaatttttatatttttagtacagatggggtttcaccatgttggccaggttggtctcaaactcttgacctcaggtgatccacccacctcggcctcccaaagtgctggcattacagatgtgagccaccacgcttggtctaatatgtcatctgctaaagggggactttgcctgggcacagtggctcatgcctgtaaatccagcactttgggaggctgaagcaggtggatcatttgagcccaggagtttgagaccatactggccaacacagtaagaccccatctctataaaaaaaaaaaaacaaaattagccaggtgtggtggtgcacgcctgcagtcctagctacttgggaggctgagacgggaggatcacttgaacccaggagttggaggctgcagtgagctatgatcctgccactgcactccagcctgggcaatagagtgagaccctgtcctccaccaacaccaaaaaaaaaaacaaaaaaacaaaacagggctcctctctcttggtagggggtggaggggaggtcagagacacctctcagccacccgggctgattcacaaatatcgaacattcactaaaatgtcaatacagtgacctagagccagaggggaagagggagggtacaagaggagagttccaggcagaggggcgagcaggtgagtaggtgcaaaggccctaagcaggaaccagtttggctccataaatatttgttgactcaatgaacgatagaagattctagagagaattgattgcacagaatcacccatggggactcagaggcggagtccaagctggtttcggagggggctgggggccggaggttggcaggtggggtgaaggatgggagccgctagctgctggcaggaaaactggcttcagtgaagatctggtctggtcctcttggtttgtttctgtccagggagtggacaggacccatgtaagggccctgggctatcccagaacccatctgggaattctgaagagaaaaagtcctgtaactggccgggtgcggtggctcacgcctgtaatccccgcactttgggagactgaggggccgatcacgaggtcaggagttcgagaccagcctggaaaacatgatgaaacctcgtctctactaaaaatacaaaagttagccgggcatggtgatggggacctgtagtcccagctactcgggaggctgaggcaggagaatcacttgaacccaagaggcagaggttgcagtgagccgaaatgagatggcaccactgcactccagcttgggccacagagcgagactccgtctcaaaaaagaaagaaaaaaagaaaaagtcctcataagtagggcagaggtcacggcagagtggaggtaccccagacttcgacctttgctcactgagggctggaaaaccacaaaacacccagataacggtcttccctcccctgctcctgcctgccccagtgtcactggccctcaaccctgtctctccaccctgtccaccaatcagcacctggaggtgggctgggagctgcctgtgaccgcttcagcatcttttgggagtggtgacagagccacagagggctgtgagcttgcccggccccaggtaacgctggcggtgggtgggcctccagcttggagcagagaccccccgaggcatctgcagacagaactggatggacccatgaatacggatttagctgctggaaaggtgagccctactaggtccccagggagagcgggagtctaggctgggaaagcctaccca

SEQ ID NO: 20411 - DNA, 2300 bp, Homo sapien
caagggctcaggggcctggggccataaggggatcctccgtcctgggcctctcccacctccttcctcccctacctcctgcagctccagtgccccgagctcccggccacagtgcccactgccggctccggttacccactcccagctgggccacgagcagctccagccgctccactctgacacctgatcggctctgagcaggcggccgccccagggggccggggatgagccgagggaggagacaggctggcagcggactgcctgttggccaactggctctggcgggaagacacccacgatcttccctatcatcactggactgatttcagtttctggaaggagccatgctcttcctctttctcagcctttgcacttgctgttccccccaccaggaacattctttctgtacttcatgtcaccccaaccggctctacctgactcatgcactctttatttatttatttatttatttttgagacggagtttcatgcttgttgcccaggctggagtgcaatggcgcgatctccggctcaccgcaatctccgcctcctgggttcaagcaattctcctgcctcagcctcccgagcagctgcgattacaggccaccacacccagctaattttgtatttttagtagagacggggtttctccatgttggtcagggtggtctcgaactcccaatctcaggtgatccacctgccttggcctcccaaagtgctgggattacaggtgtgagccactgcgcccggctcactcactttttagatctttgctgcaacatcccctcctccaggaagccctcccggatgcccccagcctgggtcaggtgcctcctgtgagccccctcactgccctgtgccctctgcatcacccattgcaccccaaccacaccatgtcaccattacctggtcacatgtttgtgtccacccgcagccaccagggcatagatggtaccacctttgctctccagtgtgcccagtacaaagtaggtactcaacacatgattcttaaatgagtcctccaggccaccagccccattgaccttgagcaggacctgtcctgcagaatgcagaacctccagttggatgatactcagataacttggccggacgcagtggctcacgcctgtaatcccagcactttgggaggccgaggcggtcagatcacctgaggtcaggagttcgggaccagcctgaccaacatggagaaaccccgtctctactaaaaaatacaaaaatttgctgggtgtggtggcgggcgcctgtaatcccagctactagggaggctgaggcaggagaatcgcttgaacccaagaggcggaggttgcagtgaaccgagattgcgccactgcactccagcctgggcaacagagcgaggctccgtcacacacacacacacacacacacacacacacacaaatgagatattcaggtaactctgcgtggcattcaaaacccttaggctggggtccctgctgtccggctctgtccttacggaatttactaatccgtaaaaggggttgtggggacatggatagcctgtgtcccgcattttagaggtgactggagaactctcacgtaggcggccgccccaatttcccgcccgggtcatcggggagccccttcccaagccccgcaaacacctgcatgcaaagaggcaggcttccttctgacagcagataacatgtcgcctgcggcgtcagcaagaggcgcatgcgccttgccgtgggaggccgggtgcgcaggactggaacgcggttcctccttcttccccgccccgccccgcttccggcggaagcggcctcaacaagggaaactttattgttcccgtggggcagtcgaggatgtcggtgaattacgcggcggggctgtcgccgtacgcggacaagggcaagtgcggcctcccggaggtgagcgcgtctgagggtcccgagcatcgcgccccagggccgcgggctgggagcggccggatggcaggggggcattgtgggaatatcagggggcactgaggctagacaatgggagggacttcccagtgaggaaggggcgggaagtgacgcccctgcgcgccgggggacgccaacacgcccaactctgtggtcaccctgtcggggctgatcggggagagaggggatgtagttccaggaagaggggacgacaggcgcaaagggaggtgggaataaacacacctggagaacgattaggcctgggaggtttccagagccgggccaggacggggctcaaatgccaggctggggagttggcactttatcctgagggtgatggggaagggttttgccctgg

SEQ ID NO: 20412 - DNA, 2300 bp, Homo sapien
attcaatcacacccaaagcagggggtaataagacacccaacagaggagttcacaggctgcttgggagaagacaatccgtgggcttgggggagggagaaacgcctgctaaatttaggaagctgcttgctggaagaggtgatggtaaataagaagggcctgatggccgggtgggatgttgagcacctgccttggaggaagctaggcagggcacaggccggcaagtgggaagtgcgtgggtgaacgagtgcatgtgtgtgtcagggtacctgggtagctccgcagcctggctaggactcagcacggcttctttctcccacatacaagggctcaggggcctggggccataaggggatcctccgtcctgggcctctcccacctccttcctcccctacctcctgcagctccagtgccccgagctcccggccacagtgcccactgccggctccggttacccactcccagctgggccacgagcagctccagccgctccactctgacacctgatcggctctgagcaggcggccgccccagggggccggggatgagccgagggaggagacaggctggcagcggactgcctgttggccaactggctctggcgggaagacacccacgatcttccctatcatcactggactgatttcagtttctggaaggagccatgctcttcctctttctcagcctttgcacttgctgttccccccaccaggaacattctttctgtacttcatgtcaccccaaccggctctacctgactcatgcactctttatttatttatttatttatttttgagacggagtttcatgcttgttgcccaggctggagtgcaatggcgcgatctccggctcaccgcaatctccgcctcctgggttcaagcaattctcctgcctcagcctcccgagcagctgcgattacaggccaccacacccagctaattttgtatttttagtagagacggggtttctccatgttggtcagggtggtctcgaactcccaatctcaggtgatccacctgccttggcctcccaaagtgctgggattacaggtgtgagccactgcgcccggctcactcactttttagatctttgctgcaacatcccctcctccaggaagccctcccggatgcccccagcctgggtcaggtgcctcctgtgagccccctcactgccctgtgccctctgcatcacccattgcaccccaaccacaccatgtcaccattacctggtcacatgtttgtgtccacccgcagccaccagggcatagatggtaccacctttgctctccagtgtgcccagtacaaagtaggtactcaacacatgattcttaaatgagtcctccaggccaccagccccattgaccttgagcaggacctgtcctgcagaatgcagaacctccagttggatgatactcagataacttggccggacgcagtggctcacgcctgtaatcccagcactttgggaggccgaggcggtcagatcacctgaggtcaggagttcgggaccagcctgaccaacatggagaaaccccgtctctactaaaaaatacaaaaatttgctgggtgtggtggcgggcgcctgtaatcccagctactagggaggctgaggcaggagaatcgcttgaacccaagaggcggaggttgcagtgaaccgagattgcgccactgcactccagcctgggcaacagagcgaggctccgtcacacacacacacacacacacacacacacacacaaatgagatattcaggtaactctgcgtggcattcaaaacccttaggctggggtccctgctgtccggctctgtccttacggaatttactaatccgtaaaaggggttgtggggacatggatagcctgtgtcccgcattttagaggtgactggagaactctcacgtaggcggccgccccaatttcccgcccgggtcatcggggagccccttcccaagccccgcaaacacctgcatgcaaagaggcaggcttccttctgacagcagataacatgtcgcctgcggcgtcagcaagaggcgcatgcgccttgccgtgggaggccgggtgcgcaggactggaacgcggttcctccttcttccccgccccgccccgcttccggcggaagcggcctcaacaagggaaactttattgttcccgtggggcagtcgaggatgtcggtgaattacgcggcggggctgtcgccgtacgcggacaagggcaagtgcggcctcccggaggtgagcgcgtctgagggtcccgagcatcgcgccccagggccgcgggctgggagcggccggatggcaggggggca

SEQ ID NO: 20413 - DNA, 2300 bp, Homo sapien
gaggtgggagaggcccaggacggaggatccccttatggccccaggcccctgagcccttgtatgtgggagaaagaagccgtgctgagtcctagccaggctgcggagctacccaggtaccctgacacacacatgcactcgttcacccacgcacttcccacttgccggcctgtgccctgcctagcttcctccaaggcaggtgctcaacatcccacccggccatcaggcccttcttatttaccatcacctcttccagcaagcagcttcctaaatttagcaggcgtttctccctcccccaagcccacggattgtcttctcccaagcagcctgtgaactcctctgttgggtgtcttattaccccctgctttgggtgtgattgaatcctccagtcagaggtagaagaaaaaagggtaggtagtgagtgaatgggcaccggtggaggggtagatgaatggatgggtgggtggatggatggggggcgaataggtggattggtggtttggtagatgggtgaatgggtagatgtatggatggatgggtggatggatgaatgggtgggtgattgggcaaatggatggagggatggataagtggatggatggatggatggaaggatccatggatggactggtgggtgggtggatggatgcactggtgggtgggtgggtggatggatggattggtggttgggtgggtggatggagggatggataagtggatggatgagtggatgggtgggtgggtggatgggtggatgggtgtgtgattgggtgggcagatgggtggatggatggatgcttgggcagatggatggatgggtggttgggtggatggatgaagggatggataagtggatggatgggtggatgagtggatggatgaatggtgggagttggtaggtgtttgggtgggtggatggatgtgtgggtgaaatctgattaaagggtgatgaagaaccatgagaacatgaattgggtgggtgggtttgtgggtggtggccagtgggtggttatacagtgcttaggtgggaggatggatgtccaggtgagtgcataggtggtaaatgcgtggaagggtggcttggagaattcacgagtagataggtggacaggtagaggccatgccaacccctactccttggtaagaggcaaatacagattctccatcacagaaatccctttcacacatagggcctcacagtcacacccctcaaaaaacacaccccctcaagataggcctgcctgacctccgtgcctgcccatgcggaacgtagaacaggcccaggtggacagaagtgcacgtgtgcacacgccccacactcaacgtcacacacatgcatgcagccattgccccagacctccacccactatgggtgaattgctgtcacatggaggttccctctgactatgtagcaaacatgcctctgtgctgagagccgtcagccctggcttcagtccccagggagcccctgactgttgaaaaggacagaatcagcccagacccttccagcccatggagccaggggtgaggcagaggcagagacccagccagggtaggcgggaacccaatttggggagttagatctctgcttgggaacaagaggcaaagctgataagagcaagggattttggaactgggctttgaaggatgagtaggagttcagagaagaaaaaagaaaccattctaggcagaaataactgcacaggtaaaagttaggagaccagaaaaggcttgatctgtttggaccgcaggaaataccagtgagatgcatttatgaagcccctcatgtttggccaggctctgtgtagggaccatgctgaaaactgaccatgagttggtcaagaaaggatcatttctgtcactgtatagatgagggaagtaaaacagagagggcaagtaaactgccaaaggacacacagcaggtaggagatagagcaggtctgtgtcttgctctaggggccaggactggtcaggaaggaggaagcggtccttttgaggagggcgaggcaacggaccctgccgcccaccaggactggtgtccctcaccttacccccacccttgccctcctcaggtggcctgtggagaggagaaacacagggcaccaactatgaagactctcagggcgcgatttaagaagacagaggtgagtgtgaggccctagatgcccgatacacccctgcaacttcagccttctgtctcctggggcttggctgaagatccaccctttcattccagtacccacctcttctcctttcctctctgctgccccctagcgtcatgacctccccactgctccccgtac

SEQ ID NO: 20414 - DNA, 2300 bp, Homo sapien
tttgttgttgttgttgttgttttagtttgtttgtttttgttgttgtttatttgttttgcagtggagtctcgctctgtcacccaggctggagtgcagtgacgcgatctcggcttactgcaacctctgcctccagggttcaagcgattctcctgcctcacttcctgagtagctgagattacaggcgcccgctaccacacctggctaatttttgcatttttagtagagacgaagtttcactatgttggccaagctgttctcgaactcctgacctcaggtgatctgcccgcctcggcctcccaaagttttgggattacaggcgtgagccaccgcgcctggcctccagggctccttctaaaatgccaattacctgcaagggtcttggctgtgccccagagtctccaggcctgcgaatgctgcgtggcatccagtgggcgctcaataaatgcttactgcttgaaggagcatctcccccaagtgttcatctgatgcatgtttgtggagcacctgccatgggccaggcactggggacgctacagtgacagaaaggaacccaaggcccctcctctaccggaggagccgtgggtcccaggagtggcggaaattgaccggaaatggctagagaatgtcagagctgcgccgggaccagctagctctttctgtgaggaacgagtcacagttttatggtgcgcttactgtatgctaggcactggtcgactgagtgctgccaggtagtaccttggcatcctcccggtaaccctccgcagtaggaactatttattatgaaacccattttacggaggaggaaggagaagtccaaaataggtaagtctgttggccctgtcatataggtaggaaaggctggggcaggggcggggtgctggattcaaattcaggtgtgtaggattgcagctccccagtggcgaatgaatgaatgaatgaacgaatgactgattgaatgaatgaatggatgaggcaatgagtgaatgaatgaacgaatgggcgtgccaatgaatgagcaaatgagtgtgggaatgaatgaatgaatgaatggtgcgggaatgaacaaatgaatgaatgggtggtgaacaaatgaatgggtgagtgaactaatgaatggatgaatgggtgagccaacaaatggatgaacaaatgagtgagttaatgaatgcaggaatgagtgaatgcaggaaggaatggtgtgggaatgaataagtgaatgggtcatataagaatgaatgaatgaacaaatgggtgagaccaatgaatgaatgaaagagtgagcaaataaatgggtgaacgaatgaacgagtaaatgaacgaatgaatgaatgaatgaatgggtgagcccgtgaatgggtgaacaaatgaatgagtgaatgaatgaaagggtgagcgaataaacaaatgggtgaaggaatgaacgagtgaatgaacgaatgaacaagcgaatgaatgaataagtgaatgaacgaatgggtgagtgaattaatgcatgaaagggtgagcgaataaacaaatgagtgaaggaatgaacgagtgggtgaacgaatgaacgagtgagtgaatgaatgaacgagtgaatgaacgaatgggtgagtgaacgaatgaatgaatgggcgggccggtgaatgaatgaacgaatgggcgaacgaatgaatgagtgaatgaatgaaagtgtgagtggcgagagccctgccggccgcgtggaggtgcgaggctgcggacgtcgcgggcccggaggcacctgcgcgcccttggccgactcggaggaggtggagatggacgcccgcgggtcccctggagatgcagccggcggcctgcgctggtgagggagccgggcccccggcgccgcgtcctcctcatcctccaggcgacaaggtcaggaggggccggggcggcgccccttccctcagcccccagcccccagccccctacctgggtcttcccattccatcccgtgggggagggggctggcgaggagggcaagggggagggggcggcaccagggagggcgggaccgggcgggcgggcggggcggggagctccggcagcgcccagccccgccctccggccgctccccgcggtccctccagaccctctggccgccgcctcctcttggaaccccgtgcgccccccgcgccccgcgccccggacgccatgaagcagctgtgtctgtgcgcagccgcctccttcgcggtagggcccggggagggggcgcaggagcgggcggggcgcgggtacctcctctcccctcccttccccgtccccggctgacctggaccacccccccattccagacc

SEQ ID NO: 20415 - DNA, 2300 bp, Homo sapien
tttctgtcttcctgtcttctttctgtctctcttttgtctctctttctccatctctgtcattgccccatcagtctttttgttgttgttgttgttctttttgagatggagtctcactctgtcacccaggctggagtgcagtggtgtaatcttggttcactgcaacctctgcctcccaggtttaagtgattctccttcctcagcctccagagtagctgggattacaggtgcctgccaccacgcccagctaatttttgtatttttagtagagacagggtttcaccattttggtcaggctggtctcgaactcccaacctcaggtgatccatctgccttggcctcccaaggtgctgggattacagccgtgagccaccgtgccccaccatctctctatctctgtctatcctactctctcatctctgtctctctgtctctgtctctcatcttcccatctgtgtctctctttctctgtcttcctcccttatctctgtctctgtgtctctctcatttccctatctctgtcttcctctcttatctctgtccctctgtctctcttcctctgtctgtctgctctctgtgtttctctttctgtttccatcatctccctgtctctctctgtctctgtgtcctcctcctctcatctctgtctctgtctctctcattcccctgtctctctctgtctctatcatctccctatctatctctgtgtcctcctcctctcatctctgtctctctctgtgtttctgtctctgtcatccccctttctctgtctctgtcatctccctgtctctctatctctgtgtcctcctcctctcgtctctgtctctctgcctctctcatctgtatctctctctgtctctgtcatctccctgtctctgtctctctctatctctgtgtcctcctctcatttgtctctctgcctctctcatctgtatctctgtcactttctctgtcatctccctgtctctctatccctctatctctgtgtcctcctctcatctgtctctctgcctctctcatctgtagctctctctgtctctgtcatctccctgtctctctatccctctatctctgtgtcctcctctcatctgtctctctgactctctcatctttgtctctgtctctgtctctgtcatctccctgtctatctccgtgtcctcctcctctcatctctgcctttctcatctctgtgtctctctctgtgtttctgtctctgtcatgcccctttctctgtctgtcatctccctgtctctatctatctctgtgtcctcctcctctcatctctgtctctctcatctgtatctctctctgtctctgtcgtctccctgtctctctatctctttgtcctcttcctcttgtctttctctctgcctctctcatctgtgtctctctctgtctctgtctctgtcatctccctgtctctgtctctctctctctgtgtcctcctcctctcgtctctttctctctgcctctttcatctgtgtctctgtgtctctctgtcatctccctgtctatctctgtgtcctcctcctctcgtctctgtctctctgcctctttcatctgtgtctctctgtctctgtctctgtcatctccctgtctctgtatccctctatctctgtgtcctcctcttcttgtctctgtctctctgcctctctcatctgtgtctctctctgtgtctctgtctctgtcatctccctgtctctctgtgtcttccttctgtcttctctgtctctctgcctctctcccccatctctgcctctgtctccctccatgtccctgagcccctgcctgcctgcctggggtttcccccgcttcagggcagcggaaggaaggccagcaggacatgctgtgctgggaaaagccagcaggtctccacttctccctttcacagcctcctcccccgcccccaccctcggggccttccgagcaggggtggcctgtgctccccagggggctggggctcctccacaccctaattcatctccctagcggccccacgagccccaccagtgagtcagacctgaaggaagtcggggagggggcgggccttgaccctgggctgggctttcccctgggcaggtcccaagtcctcacctcccctctcaagtctcccacgacgttcccacccactcctgagagcagagctggccgcagccatgaccccgcagcttctcctggcccttgtcctctgggccagctgcccgccctgcagtggaaggaaaggtatgtggggcccctgggggactggggggcccaggcagacggacatgacacgaggactggcctcggatcatgtctggggt

SEQ ID NO: 20416 - DNA, 2300 bp, Homo sapien
tggagtttcactcttgtcacccaggctggagtgcaatggcgccatatcgactcaccgcaacctctgcctcccaggttcaagtgattctcctgcctcagcctcccaagcagctgggattacaggcatgcaccaccatgcccggctaattttgtatttttagtagagacaagatttcttcatgttggtctggttggtcttgaactctcgacctgcaccaccgcacctggctaattttgcatttttagtagagacggggtttctccgtgttggtctgattggtcttgaactcctgacctcaggtgattcgcccacgtcggcctcccaaagtgctgggattacaggcgtaagccaccatgcccggtatctttttcttttttttctctttttttttttttttgagatggagtctcactctgtcgcccaggccacagggcagcggcacaatctcgatctcagttcactgcaacctcagcctcctgggttcatgcaattctcctgcctcagcctcccaagtagctgggattacaggttcccgccaccacgcccggctaatttttgtatttttagtagagatggggttccaccatggtggccatggtgaccaggctggtctcgaactcctgacctcaggtgatccaccctccttggcctcccaaagtgctgggattacaggcatgagccaccgcgcctggcgactataacgatcttaaaagcatacattgctatgcaatatcaggacatctggaccttccattgttgtagtagtgtgtcctcctaggcatttgtaagacgttttctcaattgtaaacatcttatgaccctggctcgtgactggcagcgaatgtgccttgttaattttaagatggagttgatttttggccaggtgcagtggctcatgcctgtaatcccagcactttgggaggcagaggcgagcagatcacctgaggtcaggagttcgagacctgcctggccaaaatggtgaaaccccatctctactaaaactacaaaaattaggcaggtgtggtggtgcgtgcctgtaatcccagctactcgggaggttgagacaggagaatcacttgaatcctgaggtggaggttgcagtgagccaagatcgcaccactggaggcagaggttgcagtgagccaagatcgcaccactgcccgtcagcctgggcaacagagcaagactcctcaaaagataaataaataaacaaacaattgccacagcaacatcaagaagttaccctatatggtctaaaaaagggaggtatgaataatccaccccttgtttagcatatcatcaataaatcaccataaacatgggcaaccaccagcccttggggctgctttgtctgtgaagtagccattcttttattcatctactttctaaataaacttgtttttgctttgcactgtggactcgccctgaattccttcttgcacgagatccaagaaccctctcctggggtctggatccggacccctttcctggaacaatctgacacagaggaaacgtccatgaaaggtggggaggaggctggggaaggaggctggggaaggaatgggatgggaagtcctcgttaaggggaaggcacaggtgggcaatggagggacatttgggagacactgcgtatgtttaggaagttggtttggagcctgatctttaagtcaatgtctgtgactcaagagtcgtccagggtcctcttaagtcaccctatgtgtggccccaaccccatgtgagagttgcgggcccaggaacgatgtgtggattcccagagcccagaatacaaggcaggcgcataatacatatttgctgaataaaagaatgaagaacaagaggtcacgttacaaaattttaacgagccgctgcccgcttctagggggcgcagcgcactatacaaaattctccaattccacatggctcccggaatccttatttcgcgctactcaggttgcaactccggagggaagacgctgggacttccagcttgataggcggggattggaaccaatgaaagaggtctgctgtgtatgctgcagccaataatagcggccgaaggaagtgacgtttgcggaagtaaggcttccgtcggaaaagctcgataattacccagcctaaccatttctcaggtgcttgcgaggtgatcagaaggcaaagatgtcggagcgaaaagtattaaacgtaagtgttgggcgactggggcttttcaatcggagcaggacatcccggaactccgggagagggaggagcttcctgagatctcttctttggaacccttctttcccagcggccttccgcga

SEQ ID NO: 20417 - DNA, 2300 bp, Homo sapien
ctttagcctgggcgacagagcaagactcggcctcaaaaaaaaaaagcggccggactcggtggctcacgcctgtaatcccagcactttgggaggctgaggcgggaggatcacaaggtcaggagatcgagaccatcctggctaacagtgaaaccccatctctactaaaaatacaaaaaagtagccgggcatggtggcgggtgcctgtagtcccagctactcgggaggctgaggcaggagaatggtgtgaacccgggaggcggagcttgcagtgagccgagatcgcaccactgcactccaggcccgggcaacaaagtgagactctgcgtaagaaaaaaaaaaaagcaaaaaaaaagccgggttttgtggtatgcacctgtggtcctagctaccaggaggctgagatgggaggatcatttgagcccaggatgttgaatgtgaggctgcagtgagctgtgattgcatctccagcctgggcaacagagcgagagaccctgtctcaaaaaaaaaaaaaaaagggagaaaagaaaaatccaaatctcacaaggttacgtggctgattcaaggtcacaggggaaggtgactggacccctagcctggatctctttctcttctacctaatcctcctgcctctccctgccagcctctccccactcccctccttggggtagggtcggggtgcagccccaggagaagccagctccaaagcacaggaaagtcaaatgccgtttgattccggccccggggcctctaattgctattcctgacacagattgtaattagaaggcccctttcaaatatttatacctcagacatctagttttatccggcagggagacgacttggatttgatgagatctgtcaacagctcatccccgtggcccggaattgccttgcggctgacagaaagcaggacaattacccgctgtgctccctggccgcccccagggacgcagccttgtcgctgatctgaaagggtggggggaagcgggggtggccatgcacttcaggagggaggaaggagttcaacaggtctgtgttgggggacacagccagtgcagggaaggggaggaacagaagggtctagacgcctgcatccttcaggggctttgccttgttggctccaggcctcagttttcccatctggataatggagctcatcgtggagaggagttgcagaaccgattccatgaagagcattttgggaggccgaggccggcagatcacctgaggtcaggagttccagaccagcctggccaatgtggtgaaaccccatctctactaaaaatataaaattatataaaaattagctgggcgtggtggcagtaatcccagctactcaggaggctgaggcaggagaattggttggacctgggaggtggaggtttcagtgagctgagatcgcaacacggcactccagcctggaggacagagcaaggctccgtctcaaaaaaataaaaagagagactccagtgccaccctaggccaggccccacggcgatgtgcaggcagaatcagctgtggagtggctctgaacaagtccctcccatctctgtgcctcggtttccccatccataaaatgaggaagccaggtgatagctcggtccctcctggaatccttcctagagctgtctgggatttcctgttagaaaccacatctttcaaataaggaaaaccaagactcagggagtgacagaccctgccctcagccccgccgggctgccaggaggccccagtcatagcagtgttggttctgacttctgtcttgtcctccaactgtgctctccaagctatgacctgtgcctgaccagggggctggccacaagaggagagaatctggggtcccatccttcctgaccacccctctctcactcccctcattaggaggaactgggcaagcccccttatggggaaagaaaaaaaacggttctgcactggaaaattggccagtggctcccttttcctctcccaccccccaaacctctcagtgccctcaccctcagacaacgacagctgacaacaggcagccagttcaggccagacccctctcacttctgcccctcttcccgccaccgctcccccccaccccgcccccagaagccacaaaaggacagatgcagaggacaggcgccaggcacagataccatctcccttccccaagccagctgcccccaaccctccccctgcccgcaattagtcctctggggcgggagcggggcacagagcagagccctcttgggggaggggaagcccgatccgcacccacccttcctttgcccccctcttccttctgctgctccaat

SEQ ID NO: 20418 - DNA, 2300 bp, Homo sapien
aggggaggaacagaagggtctagacgcctgcatccttcaggggctttgccttgttggctccaggcctcagttttcccatctggataatggagctcatcgtggagaggagttgcagaaccgattccatgaagagcattttgggaggccgaggccggcagatcacctgaggtcaggagttccagaccagcctggccaatgtggtgaaaccccatctctactaaaaatataaaattatataaaaattagctgggcgtggtggcagtaatcccagctactcaggaggctgaggcaggagaattggttggacctgggaggtggaggtttcagtgagctgagatcgcaacacggcactccagcctggaggacagagcaaggctccgtctcaaaaaaataaaaagagagactccagtgccaccctaggccaggccccacggcgatgtgcaggcagaatcagctgtggagtggctctgaacaagtccctcccatctctgtgcctcggtttccccatccataaaatgaggaagccaggtgatagctcggtccctcctggaatccttcctagagctgtctgggatttcctgttagaaaccacatctttcaaataaggaaaaccaagactcagggagtgacagaccctgccctcagccccgccgggctgccaggaggccccagtcatagcagtgttggttctgacttctgtcttgtcctccaactgtgctctccaagctatgacctgtgcctgaccagggggctggccacaagaggagagaatctggggtcccatccttcctgaccacccctctctcactcccctcattaggaggaactgggcaagcccccttatggggaaagaaaaaaaacggttctgcactggaaaattggccagtggctcccttttcctctcccaccccccaaacctctcagtgccctcaccctcagacaacgacagctgacaacaggcagccagttcaggccagacccctctcacttctgcccctcttcccgccaccgctcccccccaccccgcccccagaagccacaaaaggacagatgcagaggacaggcgccaggcacagataccatctcccttccccaagccagctgcccccaaccctccccctgcccgcaattagtcctctggggcgggagcggggcacagagcagagccctcttgggggaggggaagcccgatccgcacccacccttcctttgcccccctcttccttctgctgctccaatatcaatttcagccagtgacctctccaccaatttgcacatccccactctcccggtccgtttcaccgccagacatcggttccatttcgaccctcactggcggtcattcccaccccctctgctggtcaatttcaccccttttggcggtcaagtgcagtcccccatttcccgggcaatttccccctcccctccttctccctctcccctcccctccccagcagtgtcactcccagctgctccccacctcccgcgctccgcgctcgctgcggccagtctcgggcgtcccggtcagtgtccagctgccgcggcctcggccccggcgactcccgcccccagccccccttccctccgcgggcagcggctccctccctccccagaacagctgaaggtctcagtcacctccgaggggagcgcagggggaggggaggggcgggggacgcggcggaggggaggtgggggagccttgacgctgctgcccgggacgcggcccggggctggtgggaacaggggcgtcctcctgcgcgcccccctccccagcgtcccacctcccggcggcggcggggaaagtctctccgaaagcgtgaagggggattggaggaggtttttatttccctttgtgcgggtggctggggccggatcgaggcggcgggggccgcgggactgggggctccccgctgagccgagaggagcgcgacaaaggatgcgtcccgccggggtcacagtctccgcggcccaactttgcgcgcggcgcccgcgcccctggggagcccgcccgctgcgctgagaacccaggcgtccgggctgggagaggggccgggagcgtccgcaggtggcgctggcccggatctcccgaccccaggaagggatcccggagcttcctggaggcggcgggcggccgtgtcgctccagggaaccgcgctgcccgcggaaactccgcgcgcctccgcggatgcccctcgccctagcccccagcgcgcggggttcggggccctgcgaggtccccccttcccccgcggtgcttcccaagctgggctaaggcgggcttctcttcctccctcctctgt

SEQ ID NO: 20419 - DNA, 2300 bp, Homo sapien
atccagcgcctggggctcactgggcggtgttggtggtgatatgtgagctggagagagccttggatgagaagacaaggggctcgacccctggccctgccgtgggacctcagaatcatctctaatgctcccgtgcctcagtttccccacttgttcactcacacaggttatccgttgctactcaaattgtctagcccgcctggcatttactgaaaatctaaggcttttgcccaagagggtgtttagcctccagtgccttctttccatttgtccctatgtcacaactgaactcctatacaccccacaaagccccaggctccaacagctcctccagaagtctccgtgccagcccaggtgcggaagctaagaatgtctgggtccagctttggaaggacctgggggctaatctatccagggtccctcagcagacggtggggggaagggtggagcttcagaatgttctggggaggggaaggagtgggtaggggaggctgggcgggtgtacgtgtctgcaggggaggtgcaggcatagccaccgcagaacctccctgtggtggaggggaacgctgtgtacgatgcaggccttctaggtccgagtgagaaaggaggtcactctgcagttgggtctgagacattgaggtctgtgggttcgccacctcctcccagaatgcactacagaatcaggggtgagggatgcagggctgggaggaactcgagagcccatgaacctcctccacgggacccccaagcaggtcatgtaataggacccaaagttatcaacagaaatctatttctctgaacctcaaaggaagattttttaaattattattattatttttttttagagacggactcactctgttgcccaggctggagtaacggggcgcaatcatggcttactgcagcctccaactcctgggctcaagcggttctcctgcctcagcctcccgagtggctgggactataggcatgcaccatcaccctgggttggttttgtatctttttttttttttttgagacacagtctcactctgtcgcccaggctggagtgcagtggcaggatctcggctccctgtaatctccatctccccagttctggcgattctcctgcctcaaccccactgagtagctgggactacaggcgcccaccactaggcccagctaatttttgtatttttagtagagaccgggttttgccatgttggctaggctggtcttgaactcctgacctcaggtgatccacccgccttggcctcccaaagtgctgggattacaggcctgggccaccatgcccagcctgtatctttttttttttttttttttttttaatagagattggatctcgctgtgttaccccaggttgatcttaaactcggctcaagtgatcctcccacctcagcctcacaaagtgctgggattacaggtgtgagctacagcgcccagcaaaagaaagacattttgggagcaaaataattgaggcagggaccctgtcatttaactcactgctcaggcctatgtcgcctgcccctcccccacggagccacctgctctcgcactgtgtcttcctgtacctagatgtgtttatgtagagccttccagaaagctcacaggggtggattcctcccactcacttgcatacactgcctttcttttctttttttctgagacggagtttcactcttgtcgcccaggctggagtgcagtggcgtgatcttggctcactgcaacctccgcctcccgggtttaagccattctcctgcctcagcctcccaagtagctgggattataggcgcccatcaccatgtccagctaatttctgtatttttagtagaaattagtaggggtttcatcatgttggccaagctggtctcgaactcctgacctcaggtgatccacctgcctcggcctcccaaagtgctgggattacagacatgagccatgttgcctggtccgtacactgcctttcagatagaaaatgcattggggaaactgaggcacgaggtggcaggaagtggagcccccagcaggctggaacaccggacgtctgttgtctggccctgggtgttgcatctgcttctgcagcgggaggcggagattgtggcaggaagtctgtcaactgggagggggagaggggggtgatgggccaggaatggggtccccgggcatggtgctgggcctcctggtgcagatctggggtgagtatctgggcctccctcccctctgaaccccactcttgctgtcatccccagctgcctgccccccagctcagggcccctctaaacttcagtctctctactgtcaga

SEQ ID NO: 20420 - DNA, 2300 bp, Homo sapien
tctatctgaaaggcagtgtacggaccaggcaacatggctcatgtctgtaatcccagcactttgggaggccgaggcaggtggatcacctgaggtcaggagttcgagaccagcttggccaacatgatgaaacccctactaatttctactaaaaatacagaaattagctggacatggtgatgggcgcctataatcccagctacttgggaggctgaggcaggagaatggcttaaacccgggaggcggaggttgcagtgagccaagatcacgccactgcactccagcctgggcgacaagagtgaaactccgtctcagaaaaaaagaaaagaaaggcagtgtatgcaagtgagtgggaggaatccacccctgtgagctttctggaaggctctacataaacacatctaggtacaggaagacacagtgcgagagcaggtggctccgtgggggaggggcaggcgacataggcctgagcagtgagttaaatgacagggtccctgcctcaattattttgctcccaaaatgtctttcttttgctgggcgctgtagctcacacctgtaatcccagcactttgtgaggctgaggtgggaggatcacttgagccgagtttaagatcaacctggggtaacacagcgagatccaatctctattaaaaaaaaaaaaaaaaaaaaaaagatacaggctgggcatggtggcccaggcctgtaatcccagcactttgggaggccaaggcgggtggatcacctgaggtcaggagttcaagaccagcctagccaacatggcaaaacccggtctctactaaaaatacaaaaattagctgggcctagtggtgggcgcctgtagtcccagctactcagtggggttgaggcaggagaatcgccagaactggggagatggagattacagggagccgagatcctgccactgcactccagcctgggcgacagagtgagactgtgtctcaaaaaaaaaaaaaaagatacaaaaccaacccagggtgatggtgcatgcctatagtcccagccactcgggaggctgaggcaggagaaccgcttgagcccaggagttggaggctgcagtaagccatgattgcgccccgttactccagcctgggcaacagagtgagtccgtctctaaaaaaaaataataataataatttaaaaaatcttcctttgaggttcagagaaatagatttctgttgataactttgggtcctattacatgacctgcttgggggtcccgtggaggaggttcatgggctctcgagttcctcccagccctgcatccctcacccctgattctgtagtgcattctgggaggaggtggcgaacccacagacctcaatgtctcagacccaactgcagagtgacctcctttctcactcggacctagaaggcctgcatcgtacacagcgttcccctccaccacagggaggttctgcggtggctatgcctgcacctcccctgcagacacgtacacccgcccagcctcccctacccactccttcccctccccagaacattctgaagctccacccttccccccaccgtctgctgagggaccctggatagattagcccccaggtccttccaaagctggacccagacattcttagcttccgcacctgggctggcacggagacttctggaggagctgttggagcctggggctttgtggggtgtataggagttcagttgtgacatagggacaaatggaaagaaggcactggaggctaaacaccctcttgggcaaaagccttagattttcagtaaatgccaggcgggctagacaatttgagtagcaacggataacctgtgtgagtgaacaagtggggaaactgaggcacgggagcattagagatgattctgaggtcccacggcagggccaggggtcgagccccttgtcttctcatccaaggctctctccagctcacatatcaccaccaacaccgcccagtgagccccaggcgctggatgtgagggctctgggcgaggccagcgcggaactacatttcccaggcggccgcggcgggtgcgcctgcgcaatgcgcgcggtgatggagcgctaaccgggggcgcggcggcggcgagggctcggcgggccattggctaccggccgcggcaaaggcagcttggggacccagcgtgcgcggggcccgcgggccgggccggggtgacctgggctgcagccatggaagaacagagggtaggacggggtggggcagggcgggcccgcaggggcgtcgggggcggggaaggggaccaggtgttgccgcagcgcccccactccctccccgcctccaccc

SEQ ID NO: 20421 - DNA, 2300 bp, Homo sapien
ctgtcttggccatcctctgtcttcagggcacagtccagaagtgcagggacactttggcaaataccttcctcgagaggcctcagtcttcatgtctgtagagtggctttatgatttggtagaaacaaatctttgggccgggcgcagtggctcacgcctgtaatcccagcactttgggaggctgaggcgggccgatcatgaggtcaggagatcaagacaagcctggctaatacagtgaaaccctatctctgctaaaaatacaaaaaattagctgggtgtggtggcgggcgcctgtagtcccagctactcgggaggctgaggcaggagaatggcgtgaacccgggaggcggagcttgcagtgagccgagatcgtgccactgcactccagcctgaacgacagagcaagactccatctcaaaaaaaaaaaaacacaaaaaatgaaacaaatctttgggccaggcacggtggctcatgcctgtaatcccagcactctgggaggctgaggcaggcggatcacctgaggtcaggagtttgagaccagtgtggccaacatggcaaaaccccatctctctaaaaatacaaaaaattggccgggtgtggtggtgggtgcttgtaatcccagctactcaggaggctgaggcagaattgcttgaacccaggaggtggaggttgcagtgagccgagatctctccactgcaatccagcctgggcaacagagcaagactccgtctcaaaaacaaaaaaagaaatctttgaatgttgttctgttcctctctctaggctgccaagcaaatcaaagatgggtaagacactggggtctggcccccaccccactaccctgcccctggtgtgaagacaggggccacctggtgagggtgtctcatctcagagccctggacgggagccctggggaggggccccctcgcgccacggatgaccaggcctggtcccccacgcaacgcctgccacctccttcctgcagagtgaccatggcccctgccttccggctatcattgaaagcgaaggtcagtgacaacatgagtcacctcatggtggacttcgcgcaagagcggcagatgctacaggcactcaagttcctgcctggtgagaggggcacgcactagagggccaggacttccggggaatgacctgggaggctaggaggccctgaaacaggacctggagtatggtggacgacccggtgtctgaattccgcctgggggaggtggagctctgagaattccacgccctgtggggggtggagttctcatggagccccgcccctgggtggagccatgggaagaccccacccactgtgtagtgacatcctgggaaaactctgtacccaggggtggaactgtgagaataccatgtcctgtggggttggttgagtcctcatgaggccccgccctggggtggagccatgagaaggtcaaactcaccaggtgggaaaatcctgtccccaggggtggagccctgagaatagcacgtcctgtgggggtggggtattcatcaagtcccgcccatgggtggagccatcagaaagccccacccaccagggggtgaggtcctgggaaaactctgtccacaggggtggagccctgagaataccatgtcgttgggggagtggagtcctcccgagacctcctccctggatagagccacgagaagggcctgcccaccacatggtagctcctgggaaaaccctgtttccaggggtggagccctgagaaggccacgtccccgaggagaaatggactgagaacccagcctgtctatgatgcagccccaaagaaagccgcatccctcattggcagagattttggaataattctgcctgtaaatgatggaatcccaagaaagctcagccctcccccaacccactgatggaaccttagcgtctccatggccgggcgcggtgactcacgcctggaatcccagcactttgggaggccgaggcgggtggatcacttgaggtcaggagttcaagaccagcctggccaacatggagaaaccctgtctctactaaaaatataaaaaattagccgggccatggtggctcacgactgtaatcccagctactcaggaggctgaggcaggagaatcgcttgaaccagggagtcggaggttgcagtgagccaagatcgtgccactgcactccagcctgggtgacaagagcaagactctgtctctaaaaaaaaaaaagtctccaccctgccaaacatggaacccctttgtggccatgcccccaaaattgtccaacatgtggttgggcagccctgcagcaagccccctgccccctg

SEQ ID NO: 20422 - DNA, 2300 bp, Homo sapien
atgtatacaaagtctagccctggtaactactaaggaaattgaatttgtaatttaaaaactcccaaaaaagcaatctccagacccagatggtttcactaaggaattctgccaaaggttcaaagaagaattaacaccaatttcacatcatctcttccagaaaattgaaggggacacttccctgttcattttatggaactatgaccctgataccaaaaccagataaagacggtacaaagaaagcaagctacaccccatatccctcatgaagacgtgcaaaaatccttaacaaaatattacaaagtagaatttaacaatatataaagtgaattatacaccatgacaagtggggtttactccagggacccaagactgattcagtattcaaaattaatcaattgtccaccatattaaacaggctgtggtaggcagaataatggtctcttaaagatatccacgccctaattcccagaatctgtgaatacgttaggatacgtggcaaagggatttgaagattaaagatagacgccaggcacagtggcacacacctgtaaccccagcactttgggaggcctagactggaggatcacttgcacccaggagttcaagactagcctgagggccgggcacggtggcttatgcctgtaatcccagcactttgggaggtcgaggcaggtggatcacaaggtcaggagattaagaccatcctggctaacacagtgaaactccatctctactaaaataaaaatacaaacaaattagctgggcatggtggcacgtgcctataatcccagctactcgggaggctgaggcaggagaattgcttgaacctgggaggcagaggttgcagtaagccgagatcgctccactgcactccagcctgggtgacagagtaagactctgtctcaaaaaaaaaaaaaaaaaaagaccagcctgggcaacatagcaagaacctgtctctagtaagtgtaaaaattagctgggcgtggtggcaggcacctgtaatcccagctacttgggaggctgagccaggcgaatggcatgaacctgggaggcggagcttgcagtgagccgagatcacgccactgcactccagcctgggctacagagcgagagtctgtctcaaaaaaaagaaaaaaaaaaattagccaggtgtggtggcatgcaactgtagtaccacctactctggaggctgaggctggaggatcacttgagcctgtaaggtcgaggctacagtgagtcatgatcgccccactgtactccagcctaggcaacatagtgagaactcatccttaaaaaaggaaaataaattagctgggtgtggtggtgcccacctatagtcccagctcttcgggtggctgaggcaggaggaccgcttgagattgggaggtcagggctgcagtgaactatgatcgtgccactgcactccagcatcgacaacagaatgagacaccgtctaaaaaagaaaaattgcagatgaaattaaagttgctagtcagctgactttaaaatagggagagtagcgtggattatccaggtgggcccaatgtaatcattagggtccatcaaagtaagagaaagggccaggtgtggtggctcatgcctgtaatctcagcactttgggaggctgaggcgggcagaaaacttggggtcaggagttcgagaccagcctgggccaacatggggaaacctcgtctctactacaaatacaaaaattagccaggcgtggtggcggtcacctgcaatccacgctagtcaggagactgagcttggactcagtctctgaacccgggaggcagcgcagtctcttgaacccgggaggcagaggtcgcagtgagccaagatcataccactttactccagcctgggcaacagagtgaaactctgtctcaaaataggaaaaatagataaataaataaataaagagacagaccatgtctctgtctttgcagatatagcgaagattattctcccattcaagtagacttatacattctctctgttctcagttccacaccggagaggcggggatttccctaggatcactggacctgctgggatcagcctctgcccagccctggcaggggagggagttgacgggctgacacaggaaactcccctgaaacctgtttctcagcttcccggcccagctggggcacccactggaaggagaggccaggcggaagaccctggctccgtcatggcctctgccctgaggccaccccgtgtccccaagcctaagggtgtcctgccttcacactactatgagagctttctagagaagaaggggccctgtgaccggg

SEQ ID NO: 20423 - DNA, 2300 bp, Homo sapien
gtggctcacgcctgtaatccaaacactttgggagcccaagtgggaagattgcttaaggccaggacttggagaccagcatgggcaacatagtgagatccccttcttttacaagaaaattaaaaattagccaggcatgctggtcacgcctgttgtctcagctactctggaggctgaggcaagaggatcatttgagtccaggaggccaaggctgcagtgagccatgattacaccaatgcactccagcctgggagatagagcaaggccctgtctcgaaaagaaaagaaaataggctgggcgcagtggctcacacctgtaatcccagcactttgggaggctgaggcaggtggatcacctgaggttgggagttcgagaccagcctggcaaacatggtgaaaccccttctctactaaaaatacaaaaattagctgggtgtggtgatgtgcatctgcagtcccagctaattgggaggctgaggcaggagaatcgcttgaacctggtaggcagaggttgtagcgagccaagatcttgccactacactccggcctgggtgacagagcgagactccgtctcaaaaaaaaaaaaaaaaaaaaaaaaaaaaaaagaaaaaagaaaagaaaagaaaacaaaataataatatgggagggaggtggtaataggtgcattttagaaagagccctctggggcaatggtggaagaccgacagggtggggcatgagtttggaggcctgagactcactgcgatggccaggatttgggtgcaagaggctggaggtgtggctcagggttttggaaggcaggggacggaaaaaaagccaaagagaaagtgcgtaaggagttggggaaataaactgaggccggtttgggctatgctgagtctgcaggccttggggatgcccgttgttggctggacagtcagggtggggcccctaaagggtgcctgggctggacaacaatagttcacatgtacccagctcttgctctatgtcaagtcttcttcctgagaacattcccgagcaccctggagagcctcccccgcacccctactgtccagttcccacttcccgactgcggtctgggcaaagccacccgcacttgagcccatcccacggcgtcccggagctttaggaagtccccatcccggactttcaaccctgccagggactgagggaaatcccagagcctgggctccgggacgaaggtcccaggacagggtcggggatgtagttgcagaaacagggtaggggacaaaggccggggctgcactgatcaggcgcgcaacgagcccggccctgcctcctgctccgcccaagggtatggagggccggactcggctggccttatacccggagctgattggctggtgagtccagtccctgcctctgatggtttgcgctcataactaagggtttctactgattggtttacatggacgtctgcccattggtcaaatccgagttggtgtaatcagatagttgacacggattggttggtgcgggaatccagtagcttgctatcgattggttgagggtgaaataaatgggactcttatcattggctggcgggctccgcaacggtccaatcatgtaatcagtcgagggccgcccgggagggtgggagttaattctttagcgactgaggccggcttgggctctttggctccacctgtgtctgcgcgaggctgttccctattggagtccgcattgttcccctggacctgagtttctcccctggtcctaaaggccgaggcctctgagttcctcaagtgcggtgaccgcaggtctcaccttctcctctccttgcagcaggctgagccactcgcgcacccgccccaggcttccaccttgcaacctctatccctggacagcgaggcctcagtttccccattcgcaccaatgagctcccggtcaacaccccgtcacgcctcagtttcccgaatgttcccagagggctgagttcccgatctctctcccgcgtgggcatccccgaggcctcagtttctccgcccaccccagcgcgccgagcccttcccccgaccccggcgacggccaatggttggggcgcccctcccctccccggggcggggccgcgtgacgtgccgggaagccggagtctagagctccgggcgcggggaggcgcggccatggcaggtacggcgggcccagcggggcggaggcgcggggcgcggggctgcaggggcgcggggctgcagagccgtggggcgagcggcctccctgcagcctctcgctgtccgcagctccggagccgctgtccccggcgggcggtgcgggcgaggaggcgcc

SEQ ID NO: 20424 - DNA, 2300 bp, Homo sapien
cgcatacctgtagtcccagctactcgggaggctgaggcagaaaatcgcttgaaccgggaggcagaggttgcagtgagccgagatcgagcaactgcattccagcctgggcaaaaaagcgagactctgtctcaaaaaaaaaaaaaaaaaaaaagtactaatacctaccacagataaagtgcttaccatgtggcaggcgcctgctgagggctttattcatttaaccatcccctaattttcccatggtggggaaatattccatttcacggctgggaaaccacaggaaggccggggtgttgcccatctgaccctgcgcgggtggtggctcctctctgagcctcagcttctcctttgtgggatggggtgtttggtaatctacgtcctccccaccagaaggacccatctgtgcctcagattcctctctccacatggggcttgtcccgtaaaaagagctccgggcctcagtgtcccctccacgggagctcctcctgcaggaaaggagctctgggcctcagtttcccctccccacactggggcttgtcctaaagcaagggagctctccaggcctcagtctcccttcctcacaccggggctcttcctgccgccaagggagctccgggcctcagtctcccctcttcatgtcggggctcttcctgcagccaagagagctccgagcctcagtttcccctcctcacactggagctcttcctgcagtcaacggagccccgggcctcagtttcccctcgccacaccggggctcgtctctcagcaagggagctccgggcctcagtgtcccctccctacactgaagcttgtcctgcagcaagggaactccaggcctcagtttccccttcctgcccgagccgcgatgggacgagggaggcggggtgctcaccaggtagtagatggacagcaccccggcgccaggctccagcagcgcgtctttgaggagcacccgcagtgtgaccgcgcgcctggtgagcgcgcccccgggcccgccgcagccccccgccccggccccgccgccgccgcctcctccgctgacgctactgccgccgccgccactgcgtccaccgcccgctcccgcattcggccgctcagggtcctcggcctccgcttcgtcctcgtcctcctccggcgcctcctcgcccgcaccgcccgccggggacagcggctccggagctgcggacagcgagaggctgcagggaggccgctcgccccacggctctgcagccccgcgcccctgcagccccgcgccccgcgcctccgccccgctgggcccgccgtacctgccatggccgcgcctccccgcgcccggagctctagactccggcttcccggcacgtcacgcggccccgccccggggaggggaggggcgccccaaccattggccgtcgccggggtcgggggaagggctcggcgcgctggggtgggcggagaaactgaggcctcggggatgcccacgcgggagagagatcgggaactcagccctctgggaacattcgggaaactgaggcgtgacggggtgttgaccgggagctcattggtgcgaatggggaaactgaggcctcgctgtccagggatagaggttgcaaggtggaagcctggggcgggtgcgcgagtggctcagcctgctgcaaggagaggagaaggtgagacctgcggtcaccgcacttgaggaactcagaggcctcggcctttaggaccaggggagaaactcaggtccaggggaacaatgcggactccaatagggaacagcctcgcgcagacacaggtggagccaaagagcccaagccggcctcagtcgctaaagaattaactcccaccctcccgggcggccctcgactgattacatgattggaccgttgcggagcccgccagccaatgataagagtcccatttatttcaccctcaaccaatcgatagcaagctactggattcccgcaccaaccaatccgtgtcaactatctgattacaccaactcggatttgaccaatgggcagacgtccatgtaaaccaatcagtagaaacccttagttatgagcgcaaaccatcagaggcagggactggactcaccagccaatcagctccgggtataaggccagccgagtccggccctccatacccttgggcggagcaggaggcagggccgggctcgttgcgcgcctgatcagtgcagccccggcctttgtcccctaccctgtttctgcaactacatccccgaccctgtcctgggaccttcgtcccggagcccaggctctgggatttccctcagtccctggcagggttgaaagtccgggatg

SEQ ID NO: 20425 - DNA, 2300 bp, Homo sapien
aaaaaacaaaacaaaacaaaacaaaacaaaaaccgggtgcggtggctcacgcctgtaatcccaacactttgggaggccgaggcgggcggatcacaaggtcaggagttcgagaccggtgtggtctatatggtgaaaccccgtctctattaaaaatacaaaaattagctggatgtggtggcaggcccctgtaatcccccttactcaggaggctgagacaggagaattgcttgaacctgggaggcagaggttgcagtgagctgagatcatgccactgcactgcagcctgggcaacagcgagacttcatctcaaagaagttggaaaggatccaggtgtgggggtgaacgcctgtggtcccggctacttgggaggctgaggtgccagcatggcttgagcccagtttgaggcctgcagtgagctggtacagcgccactgcgttccagcctgtgaaacgctatttcaaaaacaaaggctgaggagtgtctcagtctagtggtcccaggcccggtatgatggcttcccccaccacttctccacaggtgacgcattgctggatgccggcgagtccatgaagcgcctggcagaggtgaaggactccctggacatcgaggtcaagcagaacttcattgaccccctccagaacctgtgcgagaaagacctgaaggagatccaggtgctgctcctgcgccagcctggggcctgtcccttccccctgccggatggggcagccccattcctgccaccctcacctccagcctcggcactgccctctgggtctcaggcaggcaggatccccagtggtgcagggacagtgggtcaaagccatgcgtggggcggccctctggccgctactggtgtgacccatgtcccccacgtctccagcaccacctgaagaaactggagggccgccgcctggactttgactacaagaagaagcggcagggcaagatccccgatgaggagctacgccaggcgctggagaagttcgaggagtccaaggaggtggcagaaaccagcatgcacaacctcctggagactgacgtgagtagctcggggtgtcacatcctgagaagacctatgcccttgggaggccggggtggtgcctcaagggagctggaggacagatcggcacctacctggccgctgcagcaggggaggtggagggtatgggccccagtcccctgtcccctctcagcccccttgcctcctgtggcttcacctcgggagtcagggaaggcacaggacagtggcactggcaggagcccctgagccctactgtccccacagatcgagcaggtgagtcagctctcggccctggtggatgcacagctggactaccaccggcaggccgtgcagatcctggacgagctggcggagaagctcaagcgcaggtgagcccagggccttggtctctccagagtctgggctgccatgcgccctctgccagcgcaagtgggcagcacacctcgctgtggggtgagcacatggcagagcagcatcctggattcttcctggggactgagtggaaaggcctggggggccgcgaggtcagaggagctggggctctgagaactctgagtcaacacccagccctgccccgatgcaggccccggggactccctccctggctgcacgttgctgctgccacaggaacacccaggctcccctccctgaatgcagaggccagacctgcttcaggggccttggcgtatgtggggcgccgtccgtggtggggaattgggggaggaggcaggggatgcgactgggggtgttgtaggtagatgctgtggcaggccccagctgcttggcaatctctgggatgcctccaaggtgggggtccaggctggaggccctctgggtagacatcccagtctagctgtgtcccagggtccatgtgtcacaaccccactgacggcctcttcctgcagtcccaggccaggtcattaggcagcagcataaatacaagagtggggctgcctcggccgtgacacgggctcggtccactcacgcctctcccttcacaggatgcgggaagcttcctcacgccctaagcgggagtataagcccaagccccgggagccctttgaccttggagagcctgagcagtccaacgggggcttcccctgcaccacagcccccaagatcgcaggtaatggggcatggagccctcttgcggaggcaaatgccagcgggtgggagtggccaagggctggccctgtcctgggtctctgagcgccagactcctgggtgcagctctcagccgtgctccatctggaccgccaaggcagacgggaagggctgg

SEQ ID NO: 20426 - DNA, 2300 bp, Homo sapien
cgcctcgggaattgaggggcgccgggggcatcctcgcgagatccgtgacttccattcctcccagggctcgcccattgacatatccgcgagggactgggcttcccctcggaggcctgtcattggctgggaggagctgccctgcgattggaggaaggaggtgtcaagctcattgctctgcgctgcgactggctgatcgcgtgggatagtccctaagaggagggaggcccaggctcttacgtcaccagaacattttacgcaaggcgcagatgacaacttgaaagtgggatttagatgaggaacctggagttttgagtttatcctaatgggacatcggctaaatatagcaacagcaattaaaattataaattgctttctacaagaacaataaaacgaagtctggggagcgcttcggaagtatttgacattcagtaaataacatgtagaatgagtgaacgaaatggacgaaatggatcgtttctggtttaatcctcaggaaattggcacatgctgttttctctgcctagaacaatcttttcgcagctcttttcctggctaatttatacttttcagatcttagatcgtcaccccaggaagccttttcttccccaaccctgacaatatcaagtgcctacaacactgttcttttccttaaagcaattacagctgtgtctatttattagtttgttatttgactaatgaattaatttctgccttttgtcattagttctggcgagggtaggactcattcctcactggaaccccaggacctgttagtaactgatcatatttaccaggtcaataaatgtttgagtgaatgtataaatatttgattgaactgtgtagatcaagcagattaaaagcctcacacaaaacagagaacttcagtgtcagcctgtgagtgtagaaacaggttttctttctttctttcttccttccttccttccttccttccttccttccttcctttctttctttcttttttcttgagacggagtccctagtagctgggaccacaggcgcccgccaccacgtccggctaattttttctattttttagtagagacagggtttcaccgtgttagccaggatggtctcaatctcctgacctcgtgatccgcccacctaggcctcccaaagtgctgggattacaggcgtgagccaccgcccctggccctgaattgcattctagaagcatctttctggctgccatgacaaggaagaattggaggggaggactggtggaaagtatggtcaaggcatgaagacagacctagatgtctagatgtgtcacgtgggcaactgaatggatgaacacaggacagagagagagaggaagagaggtggccgggcacggtggctcatacctgtgagaccagtactttgggaggctggatttggtgggggggttgggggttggatcacctgaggtcaggagttcgagaccagcctggccaacatggcgaaacactgtctctactaaaaatacaaaaattagcctagcatggtggtgcgcgcctgtaatctcagctacttgggaggctgaggcaggagaatcgcttgaacccgggaggcggaggttgcagtgagccgagatcacgccactgcactccagcctgggagacaaagcaagactccgtctcaaaaaaaaaataaataaataaataaaaatgggagggggctgaacacttagacgaactggatttagctaagatgagtaaacaggaatctgaagaatcgtaagcaggggccccttctacttcccaacctccctggccaggtttaaactaagcgcgttttccaagacgttagggtcacctccacgactccagggggcgctgcaactgctacggcccctctaggctcgccccgctcaactcactgacagaggcggcctctcccgcggtagacaatgtgcacgtgcgctcttcagccggcagagggcgcgcgtgcgcagacggggccgggggcgcgcgcgggggccgggggcgcgcgcgggggccggcaccggaagcgtgcggttgccatgtaatatcctggccgcgcgggcgcgcgagcggctgaggcggcgccggggcgggcgcggagctggcaagcgggtggcggaggcggcgccgacggggactgctgaggcgcgcagagggtcggcggcgcccgggagcctgtcgctggcgcggtccgggcgggaggctcggcggcgggcggcagcatgtcggtggcggggctgaagaagcagttctacaaggcgagccaggtgagcgcaggcccaggcgggagccgagtaccgggccccgggctgcccg

SEQ ID NO: 20427 - DNA, 2300 bp, Homo sapien
cgcttccggtgccggcccccgcgcgcgcccccggcccccgcgcgcgcccccggccccgtctgcgcacgcgcgccctctgccggctgaagagcgcacgtgcacattgtctaccgcgggagaggccgcctctgtcagtgagttgagcggggcgagcctagaggggccgtagcagttgcagcgccccctggagtcgtggaggtgaccctaacgtcttggaaaacgcgcttagtttaaacctggccagggaggttgggaagtagaaggggcccctgcttacgattcttcagattcctgtttactcatcttagctaaatccagttcgtctaagtgttcagccccctcccatttttatttatttatttattttttttttgagacggagtcttgctttgtctcccaggctggagtgcagtggcgtgatctcggctcactgcaacctccgcctcccgggttcaagcgattctcctgcctcagcctcccaagtagctgagattacaggcgcgcaccaccatgctaggctaatttttgtatttttagtagagacagtgtttcgccatgttggccaggctggtctcgaactcctgacctcaggtgatccaacccccaacccccccaccaaatccagcctcccaaagtactggtctcacaggtatgagccaccgtgcccggccacctctcttcctctctctctctgtcctgtgttcatccattcagttgcccacgtgacacatctagacatctaggtctgtcttcatgccttgaccatactttccaccagtcctcccctccaattcttccttgtcatggcagccagaaagatgcttctagaatgcaattcagggccaggggcggtggctcacgcctgtaatcccagcactttgggaggcctaggtgggcggatcacgaggtcaggagattgagaccatcctggctaacacggtgaaaccctgtctctactaaaaaatagaaaaaattagccggacgtggtggcgggcgcctgtggtcccagctactagggactccgtctcaagaaaaaagaaagaaagaaaggaaggaaggaaggaaggaaggaaggaaggaaggaagaaagaaagaaagaaaacctgtttctacactcacaggctgacactgaagttctctgttttgtgtgaggcttttaatctgcttgatctacacagttcaatcaaatatttatacattcactcaaacatttattgacctggtaaatatgatcagttactaacaggtcctggggttccagtgaggaatgagtcctaccctcgccagaactaatgacaaaaggcagaaattaattcattagtcaaataacaaactaataaatagacacagctgtaattgctttaaggaaaagaacagtgttgtaggcacttgatattgtcagggttggggaagaaaaggcttcctggggtgacgatctaagatctgaaaagtataaattagccaggaaaagagctgcgaaaagattgttctaggcagagaaaacagcatgtgccaatttcctgaggattaaaccagaaacgatccatttcgtccatttcgttcactcattctacatgttatttactgaatgtcaaatacttccgaagcgctccccagacttcgttttattgttcttgtagaaagcaatttataattttaattgctgttgctatatttagccgatgtcccattaggataaactcaaaactccaggttcctcatctaaatcccactttcaagttgtcatctgcgccttgcgtaaaatgttctggtgacgtaagagcctgggcctccctcctcttagggactatcccacgcgatcagccagtcgcagcgcagagcaatgagcttgacacctccttcctccaatcgcagggcagctcctcccagccaatgacaggcctccgaggggaagcccagtccctcgcggatatgtcaatgggcgagccctgggaggaatggaagtcacggatctcgcgaggatgcccccggcgcccctcaattcccgaggcgggccgtcacgtgacccgggctcgcccaattggcgcgcggactgcgggggtcgccgcggttcccgccaaatacgagcgcggcggccgcggcggcagcagcggcgcgggcgggagggcgaagagcagcggccgcctgaggggagcccgcgcctccgccgcctgagaggaggtcgagctgccgccggggcgatgctggaggagctggagtgcggggcgcccggcgccaggggagccgccacaggtcggttcgggcccgcgccgaggggaagggggggcgcggcgcgcggc

SEQ ID NO: 20428 - DNA, 2300 bp, Homo sapien
tggtggcgggaggttctgtaagtggcggtggccttgatggatctcagcactgaggtcgagttctaaagccagagtgtgaggcacagttctgtcgcgtcacactggcttccaagtcccatggatctagccttgagaaggcggaaggggagacttgagttctgctgggtcttggctgcgtcgcctctgccctggggcgtgggcagggctgcggtcttggagggtctctcttttcctttctgtgatgagcgcacagctggggccgctccaagccgctgttctgccttccttttcctgcccctgttacctgggcagcggagggccgtgcggcccgggctctcagtgagtggctttccctgcttccctcctcccagcacttctccaccgacccagtggccgcctccatcatgaagatctacacgttcaacaaagaccaggaccgggtgaagctgggtgtggacaccattgccaagtgagcgtgtggcccctttgccctgcctggcccctccagctcatcccagcacccctcccactggggctgtcaccccctctggccccctcattacctgctgaggtgggttgggaaggagcataggccgagagtgaggcagctccacccagaggcctcaggcaaagggctgggcctccttgggcctcagtttacccgtgtgcaaaatgaaggtgttgaaggaatcaggggtttcccaccctggcttccttggggaacatgtggaggaggcagggtcccaccccactccccgggtctcaggatcgggggcaggcctggaggtccacgctgcccgccaacgccgagggagcaccccgcaggagccccctgctggcactgcggcccttcagctctggctctccactcttccggcactgtggcttccccaccgctgtggttaattgtgcccttccagggctggtgggacggtgaggggttccgtggggctcctgctggcaccaggggtgggctccatggggtgtccgaggtgtgccttccacccggagatggtctgctgccctcgcgtcactgggccgcttcttccctctgactagaggccaagtgtggctgagctgctgttacctggagcaggaggcacagaggggccgggtgggcagcctgggctgtgccccactcaccttctccacctaccccaggtacctggacaacatccacctgcaccccgaggaggagaagtaccggaagatcaagctgcagaacaaggtgtttcaggtgggcgtgccttctggcccccggggcccaggctgggggtgggggcagctggcctgcaggagccggtggtggcccacaccaggcggtgggctccctggaggagctagcgagagttgagccacaagcagtgaagggttcggccagtagaaggtagcaggacaagatggagagcaagacttttatgcaccggtcaccccaaatcaacaaattctgcctctcctcacctgcatccttttcctcctcttcagctgggcttgtttgggaacatgtcgactctggggaggtttctcatgcaaaccagatgtctggttcttctgggggaaagggcagggactggggtcctgggcggtgttagcctcgcatcaggccccagcagtgtctggctcctcagcctcactcttcgtgcctggttgtgactctttcctctgtgcagagctgttggagactccacagcccccaccgtagaaaagcaggtttgcatccagcactgaggcacccccagggctgggccccatccaggggtcgacagctgctcccaatagcgagagccgggcccctggactgggtggggtgtggccaggccatggaggaagccaggggcccccagtgacgcccatctccacccccaggagcgcattaactgcctggaagggacccacgagttttttgaggccattgggttccagaaggtgttgcttcccgcccaggatcagggtaagtggacagggcctggctgagtagggaatggggacgaggggcctcggggcaggagggcccggcttgggggtctctccattgcacagtgacacccatgtcctgccacgctgtagaggaccccgaggagttctacgtgctgagcgagaccaccttggcccagccccagagcctggagaggcacaaggaacagctgctggctgcggagcccgtgcgcgccaagctggacaggcagcgccgcgtcttccagccctcgcccctggcctcgcagttcgaactgcctggggacttcttcaacctcacagcagaggagatcaagcgggagcagaggctcaggtgggcctgacgt

SEQ ID NO: 20429 - DNA, 2300 bp, Homo sapien
gtgctgggattacaggcgggagccaccgtgcccggcagcactctttacatattaggcaatttaggcttttgcctatgatatgagttgcacatgtttccctctagttgcttctatgttggctctgcttatggtcactttgctgtgtaggattttttgatctctgtataattaaatgtgtcagttttagttcatggcttttgggtttggggtcattcttagaaatgccttccccatttccatgctgagagaattcttttgtggcctctccagtgctttttttttttttttttttgagacagagtcttgctgtcaccaggctggagtgcagtggtgcaatctcagctcactgcaacctctgcttcccgggttcaagcaattcacctgcctcagcctcccaagtagctgggactacaggtgcacgccaccacacccgggctaacttttgtattttagagatgaggtttcaccatgttggccgggatggtctcgctctcctaatctcgtgatccgaccgcctcggcctcccaaagtgctgggattccaggcatgagccaccgtgcccggcctccagagcttttcttctggcttctccttgactgcttgcttgtttccatggttgaagctttgatccagctggagcatgttattatgtaacatggtgggatggagctgatgtaattttttttttagatcttggctcagctttcttctcagccccacctgtcgagagcacctgtcttttgcttacagctgtgaaatcccacctttctcacaaagtacattcctgtatggatttggaccccttcctggctgctgttccttcgtcccttgtctgtgcatgtacccagctcctgacctaagcctggcagccagtcgcccaaaacgcccgaggcccgcttttggagctgacacgcttcccttggctggtgtgctgtcccgggcgctctgatcccaaggaagctgttgtcttggggacatgcccatctggcagctctgcctctctgcatccacgtgctctgtcccgctccccacatcatctcagcaactaaaccggcagactgggccgggtcccaattttcagttggcatgagccccggctcagtgtgtaggtcattggtccgtgtgacgcagggggctgctgagggaccctgctgtgcagttgagggtggggggtggtgggtggagctctgggctgcctgggcaggtggcccgaatcctgacacatggccctgggctgcccttctgttcacccgccctcgtctgggcagcccagggaggtgcgggtggcagccctgcttcccaggccatgggtggctctctgggtgtggccgtgtgtgatggctgtgccgagcgtggatttgtgccccaatcttttccaggtcttagggtacgtactgttctcagcctctccatgctgggacgctgttcgcagtcagcagggctggttctgggaaacccccagagttccagctatgacttctcccctcccccggtaacataggtggataggtgggacctcggggaggggcaggggctgggggtatccgtcttccagctattgagtttcagacattgagggttgcagactcatttgtgtcctctctgccacctgccatccctgtgaccctggacgatgggcctctcggtctctttgtaaacatgaggcccgggagtggttccagaacgtccatcatggggctgcgagagcaggagggatggggcgtccatggtggcgggaggttctgtaagtggcggtggccttgatggatctcagcactgaggtcgagttctaaagccagagtgtgaggcacagttctgtcgcgtcacactggcttccaagtcccatggatctagccttgagaaggcggaaggggagacttgagttctgctgggtcttggctgcgtcgcctctgccctggggcgtgggcagggctgcggtcttggagggtctctcttttcctttctgtgatgagcgcacagctggggccgctccaagccgctgttctgccttccttttcctgcccctgttacctgggcagcggagggccgtgcggcccgggctctcagtgagtggctttccctgcttccctcctcccagcacttctccaccgacccagtggccgcctccatcatgaagatctacacgttcaacaaagaccaggaccgggtgaagctgggtgtggacaccattgccaagtgagcgtgtggcccctttgccctgcctggcccctccagctcatcccagcacccctcccactggggctgtcaccccctctggccccctcattacctgctgaggt

SEQ ID NO: 20430 - DNA, 2300 bp, Homo sapien
gggcgggtatgacccgggggcgcggcgggggaggcgaggggaggggaactagcgcagggggcggggcgggaggggaggtctcgggggcggggccgcaggagggtccgatgcagtggcgggggattagggcgacggggctgtaggcagttgggggtcagtggaacgacctttggggaaaaacgggatcatgagtcctgagccgggtggtgagggagagctctgtctggggacccggctggccgaagaggccgggatgatttggggcaatctaggtgaccatggatgggagctgagcttggaggaggacgcacagctgtggggtggggtggtgaagagttgttttgaggtatccatgggaagaggggttctggatttggtatctggagcacgtgggaggctgatgggagactagaaagagtctggaaggccagggaggccggggtgggcagcgtcgtcagtgacctgggatgtcctggcgaattgagagggaggggctgaggaaggtgtgtgaggagagtggaggtgagggattctgacagatggactcttacccgggaggggcctgagaggagaagacgggtgagacagacgcgtcttagcaggctgggagaaagagcttctctgcgaggcttctctgccacgtcactgtgccaagtggattatggaagtgggagaggaggggaaaggagatagatgccgggcaggcttccggattgtctagggaggacttggagagaagggcctgagcagggctgagccagctgggagggccggggaagaagtggagctagggaaggtgcaaggctgagggctgttgggttgagaaaagggaaactggagagctggggccgctgcagggagctggctggccagagggtggtggggactgatggagagggactgaggaagtcagccaggcagccaggacacgggtctgtaagcaatagtggaagggattgtgagggagtgggggctgggagaggcagggaggtggcaggaagtgggggtcaggaatcacggggcagtggggtggtgatggaggtaggggcatagtgaggacgtcagggttcctgggggagagcaggagagcaaaggctgagtgagggagggagaggggtcagggagagaagggggcaaatcgggggagcccttcattgattcaaccaatagtgggtggggggtgctggggccactgggactgggcatgataggaaggatgcagggtatcggggtgatggctggatcagcccagagcctgggcggagaggggaaggttggaggggaaggttgggaaaggaagcggtgcggaggtcccttgtggagcgagactgcatatccagggtgtgtggggtgggtgggcaccaagtcctgttttaggctgcagtggtggacaggagaaggcctctgctgtcccagggctcaccttctagagggagccgatggacaaataaaccaacagaccttggatgagcgctcaggcgatgagtgcttggatgagtgcccagggcctccaaggagggtgagcaggggccgtcaggtggtttgggaaggcctctcccaggacacagtgagactcagctgtggggaaatctgcccctccttctctccctgcggcagctctagccctttccagacccccatcctcctcccactcccccggagaacattctgggcagaaggtgcagacagtgcaggggcctgcagtggggagcagctggggtgtgggaagaactgcggggagcccaggggagacaggccacgggagggcagtgggccaggctgggaagggctctctggccaagggaagctttaggattttgcagtgggagggcgttgtgcagtggagtgatgctgacgctccctggctgaggttccagaagggtccctgtggctgcccaggggggcagggtccatggctggttggggtgaggtgccctgggaaatggcattttgttggaaagacccagatatcggatgaggccggggtgggtcttcatgagtcatctcctcttccacccaagatgctcagctgtgggaggactagataggcaggggtgggacgaggagggagggctgcccgggtatgtaagcagagccagaggagtatagggcttgaactgagagcctggcctcccagaaggttttaatagacctacggcacagaaattgacacagcccgtaagttcatgggaggggcctgagaggagacgggtgagacagacgcgtccgagcaggttgggagaaagggcttctctgcgaggcttctctgccaggtcactgtgccacgtgggttacggaac

SEQ ID NO: 20431 - DNA, 2300 bp, Homo sapien
ggtgtgagccaccgcacctggcccaattcttttccttttttttttttttttgaaacggagtcttgctctgttgcccaggctggagcacagtggcatgatctcggctcactgtaagctctgcctcctgggttcacgccattctcctgcctcagcctcccaagtagctgggactacaggcgcccgccaccaaggctggctaatttttttaaaaattattttcagtaaagacagggtttcaccgtattagccgggatggtctcaatctcctgacctcgtgatccacccgcctcggccttccaaagggctgggattacaggcatgagccaccgtgcctggcctttttttctttttttaataagacagggtctggctctgttgcccaggctggagtgcagtggcgtgatcctagcttactgcagcctccaattcctgggctaaagcaatcctcccaccttggcctcccaaaatgttgggactgcaggcctgagccacccgtccaacccatgatatttcaatttcagtcttggggtgggctgtttcctcacctggaggcttctcctccatcagtctctgtgtatctcattccaactccttcttttttgaggcagagtctccctctgttgcccaggctgaagtgcaatggcgagatctcggctcactgcaacctccacctgccgggttcaagcgattctcctgcctcagcctcccgagtagctgggattaccggtgcccatagagacaggctttcaccatgttggccaggctggtctcaaactcctgacctcaagtgatccgccggcctcggcctcccaaagtgctgggattagaggcatgagccaccacgtctgacccccaactcccattttttgaggcttgttttaactgtcactttgtgtatcttctttgtggattgcacagaccaaagtacgccactattaactggtgtccaccaaagtggatccccaatccccaggtcccaattgggtgcattgggtgcatcctctttttttttttttttttttttttttgagacggagtctcgctctgtcgcccaggctggagtgcagtggtgagatctcggctcactgcaagctccgcctcgcgggttcacgccattctcctgcctcagcctcccgagtagctgtgagtacagacgcctgccaccatgcccggctaattttttgtatttttagtagagacggggtatcaccgtgttagccaggatggtctcgatctcctgaccttgtgatccgcccgcttcggcctcccaaagtgctgggattacaggcatgagccaccgcgcccggcccaggtgcatcctcttaaacagctcctacctagggtacgtggtgatggtggcgggggggtgcttcaggcaccaaaacaggccagatcgtgggggcctccaatacccaacattgaattgggattttatcacgtaagctctggggagacagagaaggttggaattttttttgttttgcttgagacagggtctctctctgtcgcccaggctggaatgcagtggcttgatcacagctcactgcagcctcgacctcttgggttcaagcgatcctcccgcctctgcctcccaagtagctgagaggcgcgcgccaccaccctcggctaatttattttattttattttttttttttttatagagacgaggttttgccatgttgccaggctggtctccaacttctgggatcaagcaatccttccgcttgagcctccaaagtgctgtgattgcaggcgtgagccaccgcgcctagtttaggttgagcagcgaaagggatagggcccagtgctttctctgcgaggttcagttggcctgtccctgtcctatcaccgtttgtcaccgtttggggagcgccacggaatgccctgtctccaatcgagaggtgcactcgtcgccctggcaacggagtccggaagaaccacagagacgcggctccagcgtacagagcggccgccctgggccagcaaggcaccgagcgctagagaggcacgtctagtcgattgtcacgtggcaggccaggggaaggcgggacttccggcggcgaggtaaattttttttttttttttttttttttttttaattttcttccggtggctggtctccggcggccccgtccccgactgggccccgtgcccccccgcccccgcggccccccgccgccgggccagccgccaccatgaagaaattctttcaggagttcaaggccgacatcaagttcaagagcgcgggacccggtcagaagctcaaagagtccgtggggtgcgtgaggaacgcaggggc

SEQ ID NO: 20432 - DNA, 2300 bp, Homo sapien
cggtctcgtttgttttttgcaacggagtctcgctctgtcacccaggttgtagtgtaacggcgtgatctcggctcactgcaccctccgcctcccaggttcaagtgattatcctgcctcagcctcccaagtagctaggagtataggcgcccaccaccacgcccggctaatttttgtattttttctagagatgggatttcaccatgttggccaggctggtctcgtactcctgaccttaagtgaggatcagacgcttgtttttgctcttccctctgctcctcatgccctcccagggctcgcctcactatcatgtccaacttctattcattctcccagtgtctggttaaactcacttcatccagtaaccctctgtgatcccccaggagagaagaagtcgtctccattattcagctttttttcctcaagcaccctggttcattttagttcttaccatggatcctaattacaaaaaacaaaacaaaacacagcaacatcaacaaattttaaaacttaacatttcttggccctgttatacttgattcctggaaggtagagttttgttttttgtttttgttttttttttgagacagagtctcgcgctgtcgcccaggctggagtgcagtggcacgatctcggctcactgcaagctccgcctcccggggtcaggccattctcctgcctcagcctccctagtagctgggactacaggcgcctgccaccacgcctagctattttttttgtatttttagtcgagacggggtttcactatgttagccaggatggtctcgatctcctgacctcgtgatccacccacctcggcctcccaaagtgctgggattacaggcgtgagccaccacgccctgccggaaggtagagttatagcttttttttttctgctctgtcacccagtctggagtgcagtggcgcgatctcggcttactgcaaccccccgctcctgggttcgagtgattctcctgcctcagcttcctgagtagctggtataggtgcgtgccaccacgcccagctaatttttgtatttttagtagagacggggtttcaccatgttggccaggcttggtctcaaactcctgacctcgtgatccgcccgcttcgtcctctcaaagtgccggggttacagccgtgagccatcgcgtccggccgagttatagcttctaatacttcctgtatttcctgttgccgggctcagtctagagcagggtcctcacaatcattatgggccccatcttccaagtgcagagagcgaagcccaggacaatcaagtgactcggccccacggtattcagtacatttttcttgaatgaatgaataggtctgtgtggcgttttggggccctggcatatagtaggtactcagttaagtttttaactaagtgaagaaataactattttgtgcattttgtggctgtttatactaagagctcccccggagcctgccccttcctctaagtcccgcctcctcgagctggcaatcgcccgtccctgttttatgttgtatcgctcttctttcgatagccaatggccgacgttcccgctgaagccccgcctcttgtgatggccaatgcctgctccctaccttgaggcgcttctcttgtggtatccaatggcttgcatatctactttaagcctctcctcctgagcgggagaggctgtcaatgacccgcccattgcgttaagtgattggccttcttttctgcggtatccaatgttctgccctccttatatccccttctcttgtggaggtctatgtcctgcctctttcccttaagctccaccccttcactcccttagagcgtctgttcgtctcctcccacctttccctttcacctcccataacctcccattagagtctctgggttacgccccttgggtctgtccgttatccaatcccgttaactgctgtgctccaacctctgttcttattggtcgcctcccttctctgtcccctgcacgtggtcctgatcgacggctttgccggcccgtgacggccggagggctgaacttccgttggcgcaacgcccaataagcgcgcgtcggcaggctgcccagacagcctcccccgccccctcggcgtcccgctcccgcccccggcttcgcctcccgctgccgccgccgccgccgccgcagccgctaccgccgctgcagccgctttccgcggcctgggcctctcgccgtcagcatgccacacgccttcaagcccggggacttggtgttcgctaagatgaagggctaccctcactggcctgccagggtgaggccgcgcgggagatggggccggtggggggg

SEQ ID NO: 20433 - DNA, 2300 bp, Homo sapien
gtcctgggagtccatagacgctgagcttggccccaccccctggttgcttcagagggccggatctggctttgctcaggtggagcacctgccctggggccagctccgtccctggggtagggggagagctctctgggtggggcacagctttgcagtgaagggtacacagaagaatgcagcttcccatcgggaaggggctgctgcttcctgggttgaaggctcccctcctcccagcgtgatttgccccaagtaacttggctgatttctcggtgatttcctgggtcagtgggtaaagccaccccctcactggcctctcactgcagatcgacgacatcgcggatggcgccgtgaagcccccacccaacaagtaccccatctttttctttggcacacacgaaacgtaagtgtccccttctggggcttggttttctcctctggtgcctcccggggtggcctcactcacctgggactggcccccgtttcccttctccagagccttcctgggacccaaggacctgttcccctacgacaaatgtaaagacaagtacgggaagcccaacaagaggaaaggcttcaatgaagggctgtgggagatccagaacaacccccacgccagctacagcgcccctccggtgagtacccggggtggagagccagtgtgaagcgcgctactgatgcaagaaggggcctccagttagggtctctcccctgggcactgtggacacatggggctcgatcgttccctgtggtggggcattctgggccctgcaggtgctgagcagtgtccctggcctccacctactcagtgccaaggccacccccaccccattcatggtgatgacagatgtccccagtcattgcccagtgtcccctgggtggaggggaacgggatagaatcagccctggcgagaacccctgctgtagaatcagtccaagtttcttttttttttttttttgagacagagtctcgctctgttgtccaggatggagtgcagtggcgcgatctcggctcactgcaagctccgcctcctgtattcccgccattctcctgcctcagcctcctgagtagctgggactacaggtgcccgccaccacacccggctaatttttttgtatttttaatagagacagggtttcactgtgttagccaggatggtctcaatctcctgacttcgtgatccacccgcctcagcctcccaaagtgctgggattacaggcatgagccactgtgcccagccttttttttttttttttttttttgagacagagtcttgctctgttgcccaggctggagtgcaatggcgtgatctcagctcactgcaacctctgcctccgggtccaactgactctgctgcctcagacgcccgagttgctgggattacaggtgcccaccaccacacccagctaatttttgtatttttggtagagacagggtttcaccatgttggccaggctggtctcgaactcctgaactcagatgatccacccgcctcggcctcccaaagtgttggggttgcaggggtgagccactgcgcttggccagcccgaatttctaacagagtgttatcatagctctcataaaaccttttattttcttaggaaaagacgtttttttcttttgagaagagccccctctttcactgttactgccagattttagaggagtgaaaagtctgtagtgtgtagatgtgagcgttctcagtcaggtggaaaaaaacaccaagaatcagatgacatctcattggcaaatgagtgtctggaaatagtcagggaaaggaaggaatttagaaaagcggaaggcaaatggctaaaaggcagtggaaggatgggagaaaggtgccttactctgagtattctggggtgaggtggggagtgggggaactgggctggggttctttcctctgctttaaccacactgcttttgaggtttctgtgacaggctgggggccggggttagtagcccaggcttagctgggggggcatgaatttggcggggaggcccagggaactgaccacaagctagggaaaacttggccattaaggaagaaaagcacatccgaggtggtctgagtggagcaaggcaggaggggcccagcctttggcttttgcgagtggaggatgcagtctctttgtggttcctggtcctgtttgagaacctggggtcttgaggtggcctgtctgtgcctctcctttgtttcggcctgggctgggtggtgcttgtgagcatttgctccaggatccgcagacgtttcggtggtgacacctgccacgcacacgtgccgcactggggaccaggaacaggg

SEQ ID NO: 20434 - DNA, 2300 bp, Homo sapien
ctttgggaggctgaggcgggtggatcacgaggtcaagagattgagatcatcctggtcaacatggtgaaaccctgtctctactaaaaatacaaaaaatacacctggcgctcatacattttcctcccacaagcatgagccacccacggcctaactcttcatcctcctcttcaccatctccacccgcttctctgtgccccatatgggtatatgtcagcttcttctggttcccaaggggaccttcactggtgccattcctgctctctggaacgccgctagctcctaccccttcccatgcttctgacaactcctctgtaaaaatgtcacatcctccgaggggcctcctcgatcacccagtgctaaacactctcctctctctctctttttttttttgagacggagtctcgctctgtcacccaggcaggagtgcagtggtgtgatctcggctcactgcaacctctgcttcctgggttcaagcaattctctgcctcagcctcccgagtagctgggattacaggcgcccgccaccacgcctggctaattttttttgtatttttagtagagacagggtttcaccatcttggccaggcaggtcttaaactcctgacctcgtgttccacccaccgcggcctcccaaagtgctggaatgacaggcgtgagccaccgcacccgggttctctcttacaaacggggtcttgctctatcactcagtctggagtgcagtggtgtgatcatagctcactgaaacctctgcctcctaggctcaagcgatcctcctgcctcagccccttaagcagctgggaccgcaggcccacaccgccacaccttgctaatatgtgcatcttttgtagagagggggtttcgccatgttgcccaggctggtcttgaactcctgggctcaagtgatccttctgccttggcctcgcaaagtgctgggattacaggcgtgagccaccagccctactcccctctgaatccttacaaccatacgcccgtgttttcttcctgcctgtcaccacgatttggaattgtctgtgtttaaatggcaatgttcagggtctcccgctagaaaaccagctcccaggggcaagggagatgccacggtcacttctgtgttcttgatgcccccggcccagtgcccgacactcatgactgctcagcaaacgttggctcagtgtgtgacccggtcacgtgcctggcacataagaagcatcagataggtgtttgtgatttctgtggctgtcactgcctgagcgggcattttgagtgtaggagaaatagcagtgcctggatggtagaagcccagaggtcttgtcctagcttggcttcttcctcctgataattgaatgacttaaaaaaaaaaaaaaggaaccatttcttttctttttttatttttttgagacagagtctcactctgttgcccaggctggagtgcagtggcgtgatctcggctcactgcaacctccacctcgtgggttcaagtgattctcctgcctcggcctcctgagtagctgggattacaggcgcccaccaccacacccatctaatttttgtatttttagtagagacagggttttgccatgttggccaggttggtctcgaacacctgacctcaggtgatctgcctgctgcagcctcccaaagtgctgggattataggcgtgagcctccgcgcccggccagggcagccatttctggacctcttgacatggtctcggcactgtcttaggtgctccacctcccacttccatgctttcctggtcacaggcctctgaggtcaaaactgagccatccccattgcccagaagtggtcactgaagcacagagggttgaagtcatttgccccaggtttaaccctgaagcccgcggcccgaccctagtgcccaccatacacgaatccatctcactctcctgccttcgttcttcggctcttctgggcctcggtttccccatttgtaaagccaggagacaacacgcctgacattcaggatcccgcatgtggttgccgtcctctgggtcatagtcctgatggggaaatccacccacgactggtggtgacgcgcgttctctgccccgactcccacagccagtgagctcctccgacagcgaggcccccgaggccaaccccgccgacggcagtgacgctgacgaggacgatgaggaccggggggtcatggccgtcacagcggtaaccgccacagctgccagcgacaggatggagagcgactcagactcagacaagagtagcgacaacagtggcctgaagaggaagacgcctgcgctaaaggtaggggaggaccaagg

SEQ ID NO: 20435 - DNA, 2300 bp, Homo sapien
tcttcccactgctccagcgcgcccttcctgactgctataggccaagaaatcagcgaagaagccgcagtcctcaagcacagagcccgccaggaaacctggccagaaggagaagagagtgcggcccgaggagaagcaacaagccaagtgagccctgctctgcccctccacaccctgggggccccgcaccccgcatcaccccacaaccctcacccctcacaggggcagccccacctctgagttcagccttggagccggacccggttgaagttcctggtccttgggttgtgtgggctgcgtaggaatcgctgctgcgggagtgggatctttgcccagcccaggggtctcctccagggcgatcccgcctccagagacacggccacgtccggggacatctgtggttgtcatgactggggggtgctcctggcatggagcgggtggaggctggggacgctgctgagggccctgtagtgcccaggatgacccatcccagagaacagtccatccccaatgtccacaagcagaggaggagggagaaactgcaccccggcctaggggtttgcatcttggtccccctgtggtgggcagacagagcctgtctcccagctcacttttttttttttttttgagatggagtcttgttcttgctcttttgcacaggctggagtgcaatggcgtgatctcagctcactgcaacctccgcctcccgggttcaagcgattctcctgcctcagccctcccgagtagctgggattacaggcacccgccaccacgcctggctaatttttgttgctttagtagacacggggtttcatcatgttggccaggctggtctcgatctcctgaccccgtgatctgcccgcctcagcctcccaaagtgctgggattacaagtgtgagccaccgtgcctggctgcagcccacgtttttgtttttgtttttgtttttttttgagacagagtcttgggcttgctctgtggcccaggctggagtgcagtggcgccatctcagctcactgcaacctctgcctcctgggttcaagcgattttcctagctcagcctccaaagtagctgggactacaggtgtgtgccaccacacccggctaattttttgtatttttagtagagacggggcttcaccgtgttggccaggatggtctctatctcctaaactcatgatccccccgcctcggcctcccaaagtgctgggattacaggcgtgagccaccgtgcttggtcccccagcccactttctaaatggccttgagtgggcaaacctgcccatgagaattcggcaggccggtatggcagtggcggggtacagagcagcacatggcaccgagcctcagcaatgggcctctctcctgcacgcgtgtcacccttgagggccttttcctagctcgctgactctggtagacaaagccagcccttggccatgtgaacgaggaaaagaatcctgggatttcatgagaactcgggaaaaggcttgtatctttgggcagctcgagcctgtggctgccctggtctgccctaggcctaggctgtggcagggcctccccgcctcccgtttcccggcttagctcccagggcctcccaaaggtttcctttgcagtgggtttgggtccaccccttcaggcgccagcccctcagtggcagagtgccggtgacggggcccgactgaggggagcacttctccacaggcccgtgaaggtggagcggacccggaagcggtccgagggcttctcgatggacaggaaggtagagaagaagaaaggtgaggcctggctgcccagcactgcccacactgagttcactgaggggaacggggacagccgtggcgtggctggcctgtcccgcctgtccctagagagggtgctcagcacatcctcggccggcctggccggcggtgcctccaggggtgggggctgagcctgcagacctggggcccccatgacaaatcctccagaggctctcaggctcctgcccttgaacagctggccccctgtggccctgcctgggcccacacggtgctctctctcctggcccagagccctccgtggaggagaagctgcagaagctgcacagtgagatcaagtttgccctaaaggtcgacagcccggtaagaccctcagggcctgtgagccaagcagtccccgctgccacctccctgccaggctcccttagatgtctcgggaaactgaggcaaagccggggtcctgcagttgggtgggccaggagtctgttccggttgctagtgagcgcatggggtctcctggccaagggccctgggggagctggtcctga

SEQ ID NO: 20436 - DNA, 2300 bp, Homo sapien
ccgggcttctcaacctcagtactgtggatatttggggttggatcattctctggggtggggccatcctgggcactgcagggtgccgagcagcatccctggtctccacctactccatgccaggagcctccccaagttgtgacaactacagatgtctccagacatcacccagtgccccctgggggcagaatcacccagttgaaaactactgaattaaaatagcaccttggccgggcacggtggttcacacctgtaatcccaacactttgggaggctgaggcaggcagatcagttgagctcaggagtttgagaccagcctggccaacatggtgaaacctcatctctactaaaaatacaaaaattagctgggcatggtggtgcacgcctgtaataccagctactcaggaggctgaggcagaaaaattactgaacccaggaggcggagactgcagtgagccgagatctcgccactgcactccagtctgggtgacagagtgagactctgtttcaaaaaacaaacaaacaaaaaaagtagcacctcacaggtacacccgagagttagaactcctaggccatcatcatcttcattcatttttgtgttttttaatttttttttatcttttgagacagtctcgctctgtcacccaggctggagggcaatggcacgatctcggctcactgcaatctctgcctcctgggttcaagcgattctcctgcctcagcctccagagtagctgggattacaggtgcctgccaccatgcctggctaatttttgtatttttagtagagacagggtttcgccatgttggtcaggctggtctcgaactcttgacctcaggtgatccacctgcctcggcctcccaaagtgctgggattacaggcgtgagccaccgtgcccggcctgtttttttttttaaagatggggtctcaccgttgcccaggctgctcttaaactcgtgggctcaagcaatcctcctgccttagccacccatagtgctgggattataggcatgagccactgtgcccagcctgaatatattattattattatcattatcattattatttgagacagagtttcgctctttcacccaggctggagtgcagtggcgcgatctcggctcactgcaagctccgccttcccgggttcatgccattctcctgcctcagcctcccgagtagctgggactacaggcgcccaccaccacacccggctaattttttgtatttttttagtagagacagggtttcactgtgttagccaggatggtctcgatctcctgacctcgtgatctgcccgcctcggcctcccaaagtgctgggattacaggcgtatatcattatttttgagacagaatctcatgttgttgcccaggctggagtacagtggtacgatcatatctcactattgcctcaacctcctgggctcaagcaatcctcccacctcagcctcccaaatagctgggactacaggtgtgccccccgcccagccagttgttaaaattttgtagagactgggtcttgtttggttgcccaggttgatcttaaactcctgggctcaagtgatcctcccaccttggcctcccaacatgctaggattgcaggcatcagccatcacacccagcctggatataatgattttaataagcaatttagtctccctggtgtccctgggacgccaggctcaacatttgccatgaatggagaataagcaagaggaacagaaatgtaactgtaggacctgcgttgagtccaggcctggggaccctggctgagtccaagcctaggacatgctgtcatggacgaggcctgcctgcagccgggaaagggggtgcgtgagaatggaagaggctggcgctgtgagctcatgaggacttcatcccggagagccagggtgccacaccacagcccgatgaatgtctggctgaccggggtcggggtgaggaggaagcagcttgctttttgaggaggtggggcctctgggtgcctgcagttccttgccccaaagcacactagggggctgggctggcagacatcggggtggagtacacctctcagtccttctcttgatccacctgtgtcctttctcagcagatggtgtccggggccaaagacctggtgtgttccaagatgtccagggccaaggatgccgtgtcctccggggtggccagcgtggtggacgtggctaagggagtggtccagggaggcctggacaccactcggtctgcacttacgggcaccaaggaggtggtgtccagcggggtcacaggggccatggacatggctaagggggccgtccaag

SEQ ID NO: 20437 - DNA, 2300 bp, Homo sapien
ctgagtgcagggtctgatgctgagtcccacttagcttggggtcagaaccaaggggtttaataaataacccttgaaaactggatcggatgaattggctttcattgtgttcctagcatcttctcaaatcaacttcccaggactccagggtgaaggaggaaaagaggcatggcccaggccctggggtgtgggatatggtctccctaggggatgacagttgggatcaatggcctgtgacttctcctctcccttcccccatcctgggacctaactggaaataaaaccttgactgttgcccgggtgtcattttaccagtggatttctgccagggcttgtgtcctaggagaaggtttaagttaaaccagattgcccaggtctccaaacgatttgtcatgctgacctgagatcatcgaagggggcacctgcccccgggcaaggttgcaggggcaggatggggctgaagggatgagcagggtcccgggcccacctgctgatacagcattggccatgtgggggctgcaatcggatttggaagaccctggggcttgggggcatgtccagttttcccagctccctaaaaaatgaccatgcagcctggcgccgtggctcatgcctgtaatccaaacactttgggaggctgaggcaggcagatcaccggaggtcaggagttcgagaccagactggccaacatggcaaaaccctgtctctactaaaaatacaaaaattagccaggcacagtggcacgtgcctgtaataccagctacttgggagggtcaggcaggagaatcacttgaacctgggaggcggaggttgcagtgagccaagatcacgccactgcactccaggctgggcgacagagtgaaactgtgtctcaaaaataaaaataaaaataaaaagaccatgcctacatctgtggtcattccaggcaaggcaatgaaaaggcagggttctgaggtccagcagggctgggtttgaataggatccctggccgggcacggtggctcatgcctgtaatcctagtactttgggaggccaaggcaggcaaatcacgaggtcaggagtccaagaccagcctgacgaatatggtgacaccccgtctctactaaaaatacaaaaattagctaggtgtggtggcaggcgcctgtaatcccagctactccggaggccgaggcaggagaatcacttgaacccagggggcggaggttgcagtgtgtcaagatcgcgccactgcactccagcctgggcgacagagtcagactctgtctcaaaaaaaaaaaaagaaaaaaaaggaataggatccctcacttgctgtggtatgcggggcaagtgttttatgatctctgagcctcagcttgctcatctgtgaaatggggatcctagggaaagggaaggcctggcttctggcttagttaaggggcagattaagaaataaaaagaggctgggtgcaatggctcacacctgtaatcccagcaatttggaaggctgaggtggaaggatcacttggggctcaggggttgaagacaagcctggtcaacacagggacatctcgtctctacaaaaagtttaaaaagttagctgggggtggtggtgtgtgcctgtggtcccagctacttaggagactgaggcgggaggatcacctcagcctgggagggcaaggctgcagtgagctatgatcacaccactgcactctagccctgggcaaccgagcaagacccagtctcaaaaatcgataaataataataattaataagaaaagtcatcagcgagttggccaaggtcactcagcagggctatgggggctgtgatcgcatggactgtctctatggcaacagcagtgaggatgacaggtggccaaacttggtccgggaacgtataatagctcaatcttttgaatctagcgctcccgaattactatggcaaccgtagggcactgggccagctcaaggagagggcgagggaagcctggagccacgccccctgggcacgcccccgcacggcctctccccattggtcagttccggaggcccccactgcgcgagcagctataagaagggcgggcgggaccggcgggggtgtggagactcgagcctggggtcggcggagacagctggtgtctgaagccgctcgcgcccaggtgagtgccctgagggcggcgtccgggagcgcccccccgggcttaggagaggagctccagatagggtggttgggcgaaggtccggcggcgtgggacgggtatgaccggccagagcaggtggctgggacccttggcccggttggccccagctcaggacccagttgggcg

SEQ ID NO: 20438 - DNA, 2300 bp, Homo sapien
tggaaacatggagacttcggggtccccatcttcatctgcataggagccagtttctttttctttttctttttctttttttgagacagagtctcactttgtcacccaggctggagtatagtggcgcgatctcggctcactgcaacctatgcctcctgggtgcaagcaattctcctgtctcagcctctccagtagctgggactacaggcacccgccaccacgccccgctaatttttgtatttttagtacagacggggtttcatcatattggtcaggctggtctcgaactcctgaactcaggtgatccgcttgcctcggcctcccaaaatgctgggattacaggcgtgagccactgcgcctggccagccttatgaattttgttttaagtgggacaagaagccatcagagagttttaagcagggatgtgatctcatttcattttaatggatcgttttgttactgtgtcactacatttcacaagccttccttcctctcagtccatgttgattaagaccaactaacggctgggctccggagactgggcagggcacaagactgacggagtgcagtggctcacgtctataaccccagcactttgagagactgagaagattccttgagcccaggagtttgagaccagcctaggtaacatacaaaagaattttttaaattagccaggcatggtagcatgtgcctgtattcccagctactcgggaggctgaggcaggagaatcgtttgaacccaggaggtggagcttgcagtgagccgaaattgcatcactgcactccagcatgggtggcagagggagactccatctcaaaaaaaattagccaggcatggtggcacgtgcccgtagtcccagctacttgggaggccttggacccatggtcaaagctacagttagctatgattgcaccacactgctccaagctgggtaacagagcaaaatgctgtctcaaaaaaaaaaaaaaatgacggggcatggtggctcacacctgtaattttagcagtttaggaggccgaggccagtggatcacatgagctcaggagttcaagaccagcctgggccacatggcaaaatcctgtctctattaaaaatataaaaattaaccaggcacgctggtgcatgcctgtagtcccagctactcgggaggctgaggtgggagaatggcgtgaacccgggaggcggagcttgcagtgagtggagatcacgccactgcactccagcctaggcaacagtgcaagactctgtctcaaaaaaaaaaagaaaaaaaaaatagtcatagctgcagataaaggtgacaccatcatacctaaatatttagaactcaacaagaatgcaagcactctgcagccaagtccatgagatgcagccaaagctgttctcaaagggaaatttgtagcctccaaacgcatttaataggaaatgaggaagaatggaaacaatagcatggatgtcagattcagatgaagagaaaaaagggcagaaggagcccttggagatttgagttcagcttcatagatggggaaactgaggccaagaaaagttaagtcacttgccaaaggtcacaaagcaaaggtgttcatgacagagctggaattcagaaccaggtttggttcctcccaagccactgtctaaggaccgtagagacgtttggcattactcactattggactgtatttttaaaatgacttcttttaaaaaaagcaatatcaacataccatgaaatcaagacgagtttttttgttcttttcagtgagcttctgggttgctcaagtttatggtaaatccctcctcttgctcagagagctgtccctgtctccaggaatagtgccttgcaaaccttgacccttgaactccgggttgggggaagtgaggatgcaactagagagactcttggatgccccccaaaaatcaggaagcaaggaaagaaaaacctgtgttctagaagcagggtcaaaaaggggttgaacaggaaacaatttccaggaagcaattttgtaatcctgacccctccccttcccctgcctggcttaggctcagcccctatcaggaactggacgggggtggggacttccccagggttggttcccctgcccccagtccaggcaggtataaggccacctccgcaggccaggacaacccagaagcaaaagagcagagctaccatgtcctcttggagcagacagcgaccaaaaaggtaggtccccacactacctgtcctaggcaggtttgaacgccagaccatgcggagatacaggacattccagctaacccatagaagtcacagggagcagatac

SEQ ID NO: 20439 - DNA, 2300 bp, Homo sapien
tggcacgtggctgtggtctcaggtacttgggaagttgaggcgggaggatcgcttgagcctgggaggcagagattgctgtgaaccaagatcatgccactgcactccagcctgggtgacagagcgagactccatctcaaaaaaataataagaatgaaggaggctgggcatggtggctcacacctgtaatcccagcagtttgggaggccgaggtgggtggatagcatgaggtcaggagttcaaaaccagtttgaccaacatggtgaaacgccatgtgtactaaaaatacaaaaaaatttagccgggcatggtggcatgcacctggagtcccagctacctgggaggctgagaagaatcgcttgaacccgggagggggaggttgcagtgagctgagatggcaccactgcactccagcctgggcgacagagcaagactctgtctcaaataataatactactaataatagttaaatgaaaatggttaagatgacagcttttatgttatatatattttagccatttttttttaaaggcacagggcagacagggctcttagttaggttctggggtagggggctagaaaggcccgtggcatgaggggagggtaggccgaagtggggtctgaggtcaggggccttgaatcccagggagaggctggggcctggactcaggggtccctgggagccacaggaggctgtagagcaggggaggagccagggaaggaaattctgaaggaaacagggccgtgccctgaacacacgtggaatccgggtgttcgctgagtcacaaatcctggaagctcagggtcgtgaagaggaagtccagccgcgctatgcgaggtcttcctgtttttggagggggcaggcaccccagggccgattgtcgcgaatcaccttcacctctgggggctcagaatccctgagccagaaggccagggcagggctgggggatacccctgctgctcagacaggaaaatgggctcggagcttgcccaatacttcccagaaggacgaggctgctgaacttctcattcggggctccgggacctggactgtacccctttctggtagggggtgctctgaactgggaccttcagcatggagggcgggggttcagagggtgaattccgctgctatgtcattacctggatgggagagtgtctccactccacacacctagaagtttctgcaaagttaccttgaatgggagtgggaagcagtcccccgtgagaggtagtgaggtgcctgtcatggaggtgtgcaagcggagaatgaaaaggctggatttgggaaggaggtcagatctaccagggtcacagaggcccttggcatggggaatattctgtgattctgtggttatgtagtactgtcattcccagcttgtggctttttttttttttttttggatggagtcttgctctgttgcccaggctggagtgcagtggtgcgatcttggctcactgcaacctccacctcctgggttcaagggattctcctgcctcagctctccagtagcagggattacgggcacaggccaccatacctggctaatttttgtatttttttgtagagacagggtttcgctatgttaggcaggccggtcttgaactcctgacctcagatgatcctcccatctcggcctcccaaaatgttgggattacaggcgtgagccaccacacacagccagcttgtggcttataaaattccaagagcctttgactctttttttttttagcctttgagtttaatatttttgtgttttaattctaagtatttttatgcatgtattttgcgattgcatttttaaatatatgttttaggatatttgtatctattattataataattattattagttttaaattaccgaatgcagttttgtttgaagtcgtttcctgggctttcacgcacacgtggccataaagttgttctgataattaaatcagtgctgtgtattattattattattgccattattgtttttattaattattatccccgtgaggaatttttctgggatttgaaggagcgtctgctgctctcgcccgccgtcttgtggccacgagcgggactgcaggccgctcacctcgccgccccttgcccgcaggcgtcacctcctcctgtcgcctggccctcgccatgcagaccccgcgagcgtcccctccccgcccggccctgctgcttctgctgctgctactggggggcgcccacggcctctttcctgaggagccgccgccgcttagcgtggcccccagggactgtgagtctgggggtgtctttgggcgggggtggagtcccgtgggag

SEQ ID NO: 20440 - DNA, 2300 bp, Homo sapien
acacaccacaccaaagtcagacctaatcaggtcctaatcccatctctgcctcatctggctgtgtggcctggaacctatcccttcctccctctggggttccatttcgtcatctgtgaaatgggacagtcactcctgactctaccaccttgtgcctgtgtgacctcaggcaagttacttcctctctctgggcctcagtctcctcctccaaaatgaaataagaaggtgttttgttttgtttcttgaaacagagtctcgctctgtcgtccaggctggagtgcagtggcgcgatctcggctcactgcaacctctgcctcctgggttcaagtgattctcgtgccttagtctcccaagtagctgggactacaggcgtgcaccaccactcctggctaattttttcatatttttgctttattttttattttttgagatggactcttgctttgtagcccaggctggagtgcagtgccgcgatctcggctcactgcaatctctgcctctggggttcaagcaattctagcacctcagcctcccgagtagctgggactacaggcgtgcaccaccacgaccagctaattttttttttttgtatgttttattttttgagatggaattttgctctgtcgccccggctggagtgcagtggcccgatcttggctcactgcaacctctgcctccagagttcaagcgattcccctgcctcagcctcctgagtagctgggattacaggcatgtgccaccacacccggctaatttttgtatttttagtagagacggggttccacgatgttgtccaggctggtctcaaactcctgacctcaggtgatccgcccacctcggcctcccaaagtgctgggattacaggggtgagccaccgggcccagccaatgagatatttaacttacttttgcctcctgaggcctgtgcctcggtcttcctgaatcccgtgtgcaggtcaggacacacaacaggccctcaacaatttgttgtctggcttcctggaggaagaagcagcgaggttgctatgggctccctaggccctagctgcaaccgggacccagagttgggctgcagggcggaaatggtgctgcaggggacctgggagcagctccagggcctggttcccaggactcacagctgcatcctccccgggggaccccagctggcgctgcgcagccgggaggctcctgtgtgtcctgcaggctcattcctacggaaatcgaggctggacctggggatcctctgatgaggtctccaggagccctccacctcaccccaaagattcatctatagccccacaaccctgggttagattcatcccttcttgtggcacagaactctgtatttttaaaattttaacttattttgatcttcttctttttctttctttctttttttttttttttttgtagagacagggtctccctaggttgcccaggctggtttcaaactcctgggctcaagggatcctcctgccttggcctcccaaagtgctgggattccaggcgtgaggcaccacacctagttggaatctgcattttaaaatggactctcagatctttctgacgcgaagggttccccgaggccgtactttgagaaacacgcttctgccgaaattcctattacccaggcgggtaaactagccccagaaggaggaaggggcccgtgcagaaccacgtggttggtctgttttgccttttggctctctggtctcttcctgttggtgtctctgtgcctccctccccaggttctctgtctgtctcgtactcttatctcttcccttttctgtggccggcacccccacgacggcctcgcccccgcatccgggccccttcgcgattccggaggaatcccccagagccgcctgaccccgcccccaggctccgccccttccccccacttcccccccgtcgcagtgccctgctcccattggccttttcgtacattgcccgccctgtcattggctaatccggagcgctcggcccgccccccaggcctggcaactctccggtcccttccgcgcgggcggggcgagtggagggcgtggcctgccgaggggcgaggcgagtggagggcggggccgcgctgcccgccccgccccggccccggccccggctccggcgctgctcccaccgccgcggcaacggccccggcccacggaggcggctggacggacccccgacggttggacgtacggactctgcttcgagagtaggtgagcgagcagtgccggggcgccccccatttcagcgcatctcgggggccacctggccgccctctgtctctcccgccccttaatgctt

SEQ ID NO: 20441 - DNA, 2300 bp, Homo sapien
aaataatcttaaaatatctttaaatatatatatatataagtatatatatgaatatatgaatatatataagtatatatgtgaatatatgaatatatataagtatatatatgaatatatgaatatatataagtatatatatgaatatatgaatataagtatatatatgaatatatgaatataagtatatatatgaatatatgaatataagtatatatatatgaatatattaatatatatattcatatatatgaatatatattcatatatatgaatatatgaatatatataagtatatatgaatatatgaatatatatataagtatatatgaatatatgaatatatattcatatatatgaatatatgaatatatattcatatatatgaatatataagtatatatgaatatatgaatatataagtatatatgaatatatgaatatatattcacatatgtgaatatatgaatatatattcacatatgtgaatatatgaatatatatattcacatatgtgaatatatgaatatatatattcacatatgtgaatatatgaatatatatattcacatatgtgaatatatgaatatatatattcacatatgtgaatatatgaatatatatataggaatggggtctcactatgttgcccagaatggtctagaactcctgaggtcaagcaatccacccaccttggcctcccgaagggttggaattacaggcatgaagtatcacgcccggccaataaatttcctaacgcaagcaggtatcccaatttagaacaggctgccactgcagaaaggcaactggcttggacttctgtcattggcagaggagtcagcctccacggggatccttctcacctccctggggctcaccaccctccgtagctatggagtagagtgatttaattcctcaaagggtgaattataacccatcttaggagtcatctatgacgttttctctctggattctgttttttgccagttgggaaggactagaaacaccagcttaattattgaccccccaggcctggccactggtgttttcttgaaatgttaagccatttgtaaccaaagaatgacttccttctctagttgaaaacctgggatctaatgatagcaatagctacaatatataattctcagttcattcgtcccggtgtgggaacttaattccctcacttactcctcccaacaactccttgaggtagggattattttctttttaactttttattttgaaataatttttgcctcccagaaaatctgcagaaactgtagggtttcctaatacgcttcatccaactccccctaatgtgaacatcgtctgtaacccctaggacaagccaggttatcaaagccaggaagtgaacacccacataatcctattaacaaatacacagactgatcgagcgtgatgactcacacctgtaatcccagcactttggaaggccgaggcaggcggatcacttggggtcaggagctcaagaccagcctggccaacatggtgaaaacctgtctctactaaaaatacaaaaattagccaggggtggtggtgaacacctgtagtcccagctactcgggaggctgaggcaggtgcatcacttgaacctgggaggcggagagtgcagtgagccgagatcgcgccactgccctccagcctgggcaacaagagggaaacaaaagcaagcatcctgcttctcatcctactttccctctgctaattttgaatatcgatgcacacacatcttggctgcaacgattatgagaagttcgcctaatggtgaccttcgatttccctcactccctgtacatctcctaactgaaagagctgcagtcagtcacacggctggtgagggaccctgagaccccaaaacgaactccattaccacctgagggaccctccaaggatcgccgggctacgcagggtccctagggtacgaggccgccccctcggcggccccgccccctcggcggccccgccccctcggcaaaagtcccgccccctcgacaaagtcccgcccccaagatggtggccccgggcggtggacagggcggggcgtgccgggtcacgtggacagccgacgccgacgtggcctccggcggacgctccacgtgtccctcgccgcgccccgtctacccgcccctgccctgaggaccctagtccaacatggcggcgcccagcggagggtggaacggcgtcggcgcgagcttgtgggccgcgctgctcctaggggccgtggcgctgaggccggcggaggcggtgtccgagcccacgacggtggcgtttgacgtgcggcc

SEQ ID NO: 20442 - DNA, 2300 bp, Homo sapien
ggaactccccaggctcctgagacctggaccagccaacgccaggcctgggggtggatccacacggggatgcaggtcctgcctctggccacgaaggagggctctcgaggcactgacggacaacccctatagctccccactgccccctaggggttggtaggaccaaggcatgaaaataaccctacgttctccacaaagaaccccggggctggccggcagcaggggcaggtggcccatctacgccacctcctgccagtgagatgggtttctgaatcatcccctcctctccaggctcctggtccccactgttgcccatcaccctgggaatgcaccaagccacccactggtttcccctcctctactcttgccttctttaatccatccctggatgaatcacgagtttgatgacaccgtccccagcctagacctctgcaaggacttgccagtctgacatcaagaccagcttccaggtcctgctgccccaggcacttcaagggcccactccttccccagcccgggcagtggcactccctggggcagactctgctgcccttgacaccagccatatgcacatgttgtgcccatgcctttatgccactctgggtcccagctgcctggttactttttcctcttggctaagagggcagatagagggtctgtctggctccccaatgagcttccagaccaagcccaaggcccggcatgtgacaaatgtgatttgtgtataaagagggcctggggccgccagctgcctggcccagatgttttggggtctttgaaacagaaggagaggtgcactctatctgtcccacacaatgccatgttcccaccccacagcctatctcatctcacgttctacttcctgtggggaggcagtgagacaggaccctgggcccaccctgtgtgctgaatgcttttcttttttctttcttttcttttttttttttcttttgagacggagtctccctctgccgcccaggctggagtgcagtggcacaatctcggttcactggaacctccgcctcccaggttcaagcgattctcctgcctcagcctcccgagtagctgggactacaggcgtgtgccaccacactcggctaatttttgtatttttagtagagacggagctttgccatgttagccaggctggtctcaaactcctggcctcaagtgatccacccgcctcagcctcccaaagtgctggggttacaggcgtgagccaccacgcccggcctgaatgcttttctgaagaccttgtttggccccagcagccttcaaggaggccgagttatcatgaccgtttcaaagacggagaaacgaggtgcaagggtgaatgctgtcccagctacctggcccctgggaaggcagtgggctcgggtctcaggctgggaagagacatctgaagttccattccagccctgcctgatatcactccctgggctgcttgggatgtggggtgtcggtggggggcaccgccaagagatcagctcatcaccgcacaaggtggctctgcctccctcctgctctgcggccccatttccctgctctgttgaaaggcaacaggacgctccccacaggacagagcatgccgaggcgcccaggaagcagaaattgtctgcagtccacaggtaataaaacctggccctcttgcctccaagatacctcctgaatctcccgccggtacaactatggaccacgtcccactgtcccccacaggccatccacaaagcagccagagaaatgtgggtcaaatggcaagccgcccaactctatgctctgctcacaagcccgagtcacctcccaccaccctcagttgaaaatccagccgaagccccgcccccgctgaggccccacccctctatagcagaagctccaccctgcttactgagggccccccctcctctacagcagaagccccaccctcctcaccgctgaggcgctgctcccacaccgagccccaccctctccactaccgaggcccttccccacaccgaggccaaccatttactgcggaagccccacccaccgtaacactgaagccccgtccctctgcagaagtcccaccctcctcgccattgaggccccgcccataaccatgcccaccccttagcgcagaagccccgcccacctagactgagccccacgttgctgccaaggctccacccactcccccactctcctcccgctcggtcccccaagcctggctggctccactcactctagcacccttcactgctgcctcctcagggaatgcttggccccagcgccttaggaaggagcctgctagggccttcagcactcag

SEQ ID NO: 20443 - DNA, 2300 bp, Homo sapien
taccctttactcaccttcctataaattgccccaccaaaatttacctacatacatttatttaaagaaaaaactttgggccaggtgcagtgcctcacgcctgtaatcccagcacattgggaggccaaggtgtgcgggtcacccaaggtcaggagttcgatggctgggtgtggtggctcacgtctgtaatcccagcactttgggagacataggtgggtggatcacctaaggacaggagttcgagaccagcctggccaatatggtgaaaccccatctctactaaaagtacaaaaattagccaaatgtggtggcgcgcacctgtaatcccagctacttgggaagatgaggcaggagaattgctcaaacccaggaggtgcaagttgccgtgaaccaagatcgtgccactgcattgcagcctgggtgacagagtgagactccgtctcaaaaaaaaaaaaaaaaaaatacagttcgagacaagtttggccaacatggtgaaaccccgtctctactaaaaatacaaaaacattagccgggcgtggtgccgtgcacctataatcctagctactcaggaggctgaggcaggataatcgcttgaacccaggaaggcggaggttgcagtgagccaagatcacaagactttgtcttgaaaaaaaaaaagaagaaaaagaaaaaaaacagaaaaacccccaccatcctaattggacaacaactgttgctttgcaaaaatagcagtgaccctacacaggaggccgaggtgggaggatcgcttgaggccaggaagtcgagaccagcctgggcaacagggagacaagaccccatctctacaaaaactgtacaaatcttatttaatgaaaaaaaaacgtttttttcaattatcaactctcgggaagcccaggaaaagagggggtgctttggtccaccctccaaggcttggggtgggcaggagaacaagggtgtcagctggatgtggcttccccgggcagccagatagccgccctgtctcccgcaggctgccccccggattatgttcctccagagatcttccatttccacacgcgctcggatgtgcggctctacggcatgatctacaagccccacgccttgcagccagggaagaagcaccccaccgtcctctttgtatatggaggcccccaggtgagtgcacacctgctccccaggcccccaccccaccatccacccgaggactccccatccccactcaagtgccagctgtagaacagtcaaccagaggaggctccccggctacctgcctggtgccccagcccaccccgcctgccctgactacacagggtcctcggggcccctcaccctcctttctctgtgcccgtttgcacgctccccgcccttcctggatggcctccccttccccctccgcctgctgactctcccttgttcctctaggaagtcccctagtctccaggttggtatggaggtggccatgggccctgggcccaattcctggagcaggggtcaaaagcaggcagcagattggcagttggaccatcttaggcgcacatcttacccagagcagctctgtccccacagaggatacggggcgatgtctgggtactttgtggttcatcaccactgcgagttctcctggcctggagtggcttctcagcaccccgcagtgcccagatggccccacccgagaaggagccaccccaatgtccatcatgccagagtagttgttccaggcaggactggggcagtggcccagctgagaaagagcctgacagtggcccttccccctccctagcagggtcccgagtatgggcccctcccgccttgccactcccaggtgtccatccagagcctccggggcacaggtgctttcattaggctctgaggccccagcccggcccggtccccagcccaccggcatctcccctgccaggcccgtcctgcccggcatctcgtgctggactgctggccctcacctccccacaggtgcagctggtgaataactccttcaaaggcatcaagtacttgcggctcaacacactggcctccctgggctacgccgtggttgtgattgacggcaggggctcctgtcagcgagggcttcggttcgaaggggccctgaaaaaccaaatggtaacaactcctccctgttgctctgggtcctttgggtctcgggaagggagccctgggccgtgtgggtgcagggcatgggagcggctctggaataccacccgcagaagggcacttctggctggggtgacgcaggctcaatgaggcgcccttttagaacaaaaggggatgtatgctttgctgctcag

SEQ ID NO: 20444 - DNA, 2300 bp, Homo sapien
gcttttgcattcctatgcctcttagcctgttcacttttctaattgcattggttaatgcctccaatggaatgttaacaatgaattctattatgtgctgctgccatatgtacatttgctaggactgtgggtgtgagtcaccactcccagctaatattttaatttttttttttgagacggagtcttgccctgtcaccaggctggagtgcagtggtatgatcttggctcactgcaacctctgactcccaggttcaagcaattctcctgcctcagcctcccgagtacaggcacgtgccaccatgcccagccaatttttgtatttttagtagagatggggtttcaccatgttggccaggacagtctcaaactcgtgaccttgtgatccgcccccctcggcttcccaaagtgctgggattacaagcgtgagccactgtgcctggacttttttttttttttttgtagagacaaggtcttgccatgttgcccaggcccaggcaggtcttgaacttctgggctcaagcgacccgcccacctcagcctcttaaagtgctgggattgcaggcctgagcccaggcacccactctagttagtattttatgtccctgtgatgcttccctttggtttggttttcgttgttctgtgtgtggaggtgctgcttttccacgtagaatactaacatctcctcttaaaataaattcaagtttaaaaattgttcatttaggccaggtgcggtggctcacgtctgtaaacccagcactttgggaggctggggctggcggatcatctgaggtcaggagttcgagactagcctggccaacatgatgaaaccttgtctctactaaaaatacaaaaattagccgggcatggtggcaggcacctataatcccagctactcaggaggctgaggcaggagaatcgcttgaacctgggatgtggaggttgcagtgagctgagattgtgccactatacttcagcctggacaagagtgaaactctgtctcaaaaaattaaataaagaaataaataaataaaataaagcaaactacgaaataaaggatagcgactgtgggccgaagagtcagtgaagaggagaaactattagagcttgccgctgtgagacttaggccattgtttccggaacacttggatcatgaaatcttgtcacccatcctgtcctcccctaagcatgtgccaggaaggaagcctgtgggtgctgcagggttacttggccaagtgcaggtgaagccagcgcaggaagcccagccctgattccacacgggtttggacgctgcgtccccagcttctctgtgcaggccactgaggctcccagcttccctctcatcttcccccgcatcttcccccttagcgcctgggccatgttcctggaccggccccagcagtggctccagctcgtcctcctccccccggccctgttcatcccgagcacagagaatgaggagcagcggctagcctctgccagagctgtccccaggaatgtccagccgtatgtggtgtacgaggaggtcaccaacgtctggatcaatgtaagcggggcaagcgctggctgtatgcccgcctgggccctggagtcacactgtccccacccccacgtcctagaaggctgagcgccaatggcaggtggtgtttgcccttgtgtggagaagtgagctcaggccttggccatccctggctggcagggaagagggtctaggggggttggtgagtctggcagccattggagcctctcccctcatctatttttttctttaattagagacagggttgctctgttgcccagactagagtgcagtggtgtggtcatagctcactgcagccttgacctcctgggcctaagtgatcctcccacctcagcctccagagtagctaggaccacaagcctgcaccaccatgcctggctaatttatttatttatttttagaggtggggtcttactatgttgtccaggctggtctctgaaattcctgggctcaagcaagtctcctgccccagcctcccaaactactgggattactggtgtgagccaccatgcccggccacccacaccttctgacgcatcttctatctgctttccggacaggttcatgacatcttctatcccttcccccaatcagagggagaggacgagctctgctttctccgcgccaatgaatgcaagaccggcttctgccatttgtacaaagtcaccgccgttttaaaatcccagggctacgattggagtgagcccttcagccccggggaaggtgagcagagcctgacgaatgctgtcgactcatcgcgttagtc

SEQ ID NO: 20445 - DNA, 2300 bp, Homo sapien
gctggtgcagcccttcagctcgctgttcccgaaggtggagtacatcgccagggccgggtggacccgggatggcaaatagtgagtgtctctggctggaacccaaggaattcacctgcagggccctgggccctgggcagccaccgaagctgcctcctggccttccgtgccattccttccatctgctcacgtcttcccgcagtgcaaccgccaggacaggcctcagaccagtgtccaaagggccctcctgacctcagccagtctgaggatgaaacactggacttatgagtcccagtgttagtgccactaggacatgctgatccagttacccagagtgtggaggagacctacagaggggatttcaggtgtccccagacctcaggctcagaaaaactgagtcacaaagtagaggtgctcccctgtactcactccccagcctcccacccatgtcgaggagagaactctaccacctccctaaacgggggccccaaaccccagtgggcaaattcagcctctgcctgttttttttttttgagatggagtctcgctctgtcgcccaagctggagtgcagtggtgcgatcataactcactgcagccccgaattcccaggctcaagcaatcctcccacctcagcctcctgagtagaggggactataggtactcgccactatgcctggccaatgttttgtattttttatagatatgagggtcttgcttttgcattcctatgcctcttagcctgttcacttttctaattgcattggttaatgcctccaatggaatgttaacaatgaattctattatgtgctgctgccatatgtacatttgctaggactgtgggtgtgagtcaccactcccagctaatattttaatttttttttttgagacggagtcttgccctgtcaccaggctggagtgcagtggtatgatcttggctcactgcaacctctgactcccaggttcaagcaattctcctgcctcagcctcccgagtacaggcacgtgccaccatgcccagccaatttttgtatttttagtagagatggggtttcaccatgttggccaggacagtctcaaactcgtgaccttgtgatccgcccccctcggcttcccaaagtgctgggattacaagcgtgagccactgtgcctggacttttttttttttttttgtagagacaaggtcttgccatgttgcccaggcccaggcaggtcttgaacttctgggctcaagcgacccgcccacctcagcctcttaaagtgctgggattgcaggcctgagcccaggcacccactctagttagtattttatgtccctgtgatgcttccctttggtttggttttcgttgttctgtgtgtggaggtgctgcttttccacgtagaatactaacatctcctcttaaaataaattcaagtttaaaaattgttcatttaggccaggtgcggtggctcacgtctgtaaacccagcactttgggaggctggggctggcggatcatctgaggtcaggagttcgagactagcctggccaacatgatgaaaccttgtctctactaaaaatacaaaaattagccgggcatggtggcaggcacctataatcccagctactcaggaggctgaggcaggagaatcgcttgaacctgggatgtggaggttgcagtgagctgagattgtgccactatacttcagcctggacaagagtgaaactctgtctcaaaaaattaaataaagaaataaataaataaaataaagcaaactacgaaataaaggatagcgactgtgggccgaagagtcagtgaagaggagaaactattagagcttgccgctgtgagacttaggccattgtttccggaacacttggatcatgaaatcttgtcacccatcctgtcctcccctaagcatgtgccaggaaggaagcctgtgggtgctgcagggttacttggccaagtgcaggtgaagccagcgcaggaagcccagccctgattccacacgggtttggacgctgcgtccccagcttctctgtgcaggccactgaggctcccagcttccctctcatcttcccccgcatcttcccccttagcgcctgggccatgttcctggaccggccccagcagtggctccagctcgtcctcctccccccggccctgttcatcccgagcacagagaatgaggagcagcggctagcctctgccagagctgtccccaggaatgtccagccgtatgtggtgtacgaggaggtcaccaacgtctggatcaatgtaagcggggcaagcgctggctgtatgcccgcctgggccctggagtcac

SEQ ID NO: 20446 - DNA, 2300 bp, Homo sapien
agagggaaccagctgggcccagctgcaggctgagggcgtctccccatcctgagccagggtacccgttctgggtgtttcctttctccctttaggaatgccatatggcagccgagagaactccctcctctactctgagattcccaagaaggtccggaaagaggctctgctgctcctgtcctggaagcagatgctggatcatttccaggtaagctgtgctattaggcgtgggccctaccgtgggcgaggaggtggcaaaggccagccccacaggccatacatgccttcggtcacctctctgccccaccggctgtgagttcccacaaaccctccgtcctgtggactctggcgggtgagccttccctcctccccctgaccacctgtactcaagcgacagagaaactcttaccaaaagcatctcttccttttaacggcatcaccaaagattgggaattaacttggcttgaggcccttttagagagactggttaatcatcaatctcatccagtgttggctctctggggatagttgagggaggaaaaatgccttttgcattgattggcgtgtttttgtgtttgatgattgggaggccgaggcaagaggattgcttgagcccaagaatttgagaccagactggggaacacagcaagagcctgtctctacaaaaaataaaattagccaggcctggtggcactcgccttgtagttccagctaattggtaggctgagatgggaggatctcttgaacccaggagggcaaggctacagtgagccgtgatctcaccattgcactccagcctgggagacagcgaatcccagtctctaaaatagtaacaatatagcaataaaaataacataacattataacatagtaacaacataaacataacaatgtaacaataatgatatctaacagtggctgagatcgtgacactcccactttctccaccactggttcactggccctcactttggcctgtctctgagtccccaagccagtgtccttgtgtttacactgctttccacagagtgtaggggtaattttgcttttgattctgcttttttttttgagacaaagtctcactctgtcactcaggctatagtgcagtggcgcaatctcggctcactgcaacctctgcctcccggttcaagtgattcttctgcctcagcgtcccaagtagctgggactacaggcgcgtgccaccacacccggctaatttttgtatttttagtagagacggggtttcaccatattggccaggctggtctcgaatttctgacctcgtgatctgcccacctcggcctcccaaagtgctgggattacgaaattgaaagctcttgatgggaagggattgtgaatagggtaggagggtggggagtctgtaagaatggcactagggacccggagagagtactccggtggtgtggggcagggacagcccctcccaggggcccccatctgctatggagagggtctgtggggagggaactcaggaagtgaggaggcttctggccccagagtctcccctgccacctcctaggacactcagccagtcctgcagggccaggttcgctggcaatctttggccacccactgtgtcaagggctccggcagccaattctgcccagtacaggaagttctctctggcgaggcccgaagtcagattccctgggaatgccccagcccgaggatctctgccctggccagcgggagatcctctttgcccactgacgctgccccctgtcccctgtatgtttccaggccacgccccaccatggggtctactctcgggaggaggagctgctgagggagcggaaacgcctgggggtcttcggcatcacctcctacgacttccacagcgagagtggcctcttcctcttccaggccagcaacagcctcttccactgccgcgacggcggcaagaacggcttcatggtgagccctggccctggctgtgtgcgggggtggcgtggagggcccctccccctgagctgggcgtctctgtcctcaggtgtcccctatgaaaccgctggaaatcaagacccagtgctcagggccccggatggaccccaaaatctgccctgccgaccctgccttcttctccttcatcaataacagcgacctgtgggtggccaacatcgagacaggcgaggagcggcggctgaccttctgccaccaaggtggggccagcccctcctgtgcacggccaccatagccacctggccagcttccagaaaggccccattgcccccacagccagggtcttcctgcacacacccctcacaagccaccctcccgtgcat

SEQ ID NO: 20447 - DNA, 2300 bp, Homo sapien
ttgcagctctttctccccttccctctcaaagcaggctggggccctttctcttgcagtggttaccctgtggggtctcctcttggcaagaggcagagtcttctgggaactggcacactgcagagtcaaggcggcccactcatctctgccctttacttctctcacacccagtccctgctgtccactcccgcgggttttcccacttcctccaagcaagcagcgacttccccaagccaagctgttggtcccggaggacagggcttctggcaaggtcggcagtcactcggagcccacaaagggaagcgagaccagccccggtgccaccctttccagaccactggctctcgcagaactgggtcactgcggccatgtttagatttctgtaaaacaaatatttgcctggccagtccagtcaggtcaaggagtgtgctaagtgacgagggcgggagtggggtggtgggagatgtgacaccgcggcggccactcacggtggctgctttgcggacccagagtgtcctgagtgggaggagagagtgggatattctttggggaagggcgtgccattcaccctttcacctgcacctcccacatcccgaggctctggaacttccagtgaaggccaagcatctccccggctggacagcaagccaacagcacaggtgaccaggatggattttcattccttcacgcccgggcctctcccgagacccagcatgtctccccgcgagcccactgagagataatcattccacagtgctccgtggaatgcctgccacgtgccagccaccagctaaggttctgggagcacagctgtgaatgggacagacatgggggagacaggggtcccacaaataaccgctgtgatgaaggtggagggaggggacagccaggtggcgtgtgaaagatgagcagaaagaccagcttcagcgtggatggtgtgaaaggtttctgacggcctgccaagtacttcagctgagatctgattagaagctggccaagcaggctgggtgcagtggctcatgcctgtaatcccagcactttgggaagctgagggaggcggatcacttgaggtcaggagttcgagagcagcctgaccaacatagtgaaaccctgtctctactaaaaatacaaaaaacattagttgggcatggtggcaggcacctgtaatctcagctacttgggaggctgaggcaggagaatcgcttgatcctaagaggcagaggctgcagtgatctgagatcacgccactgcactccagcctttggagactctgtctccaaaaaaaaaaaaaaaaaaaaaaaaaagtatatatatataaacatatatcaaagaagttaagcaaagtgaggaaaaatgcactccgagcaggagggccagcatgtgcaaaggccctgcggtggaaaggaatttggcctgtttgaggagctgagtgaaggctcatttggctgggtcacagggataagaaggatgagattcaagggcttggcaggggtcgacagcagccttgaggtggtggtgagaactggttgttatcccggggactgtggaaaaccaggaagggttttaagtgatggggtcttggcagtggatgtggaacatcctggtgggaggtggtttcagtcattcagccaaagccaagcatggtggctcacacctgcagtcctagcaacttgggaggctgacgcaggaggattgcttgtggccaggagtttgagaccagcctggggaacatagttgagacccccatctccaaaaagaagaatgtttttaaagatcattcatttgagaggtgatggtggcttgaatcttagcagcattagtgacatggagagaggtagaccaacccaagaagtgtttagggagtggggaaagcggcaggggtggggctcgtctggaagaacctgagtgcctcgcaaggggcagcattggggcagctcgtaggtaaaacagttctcctttctcatagtctttgcttcctccccgcagcttctcgctgaattccgagggggctgagaggatggccaccaccgggaccccaacggccgaccgaggcgacgcagccgccacagatgacccggccgcccgcttccaggtgcagaagcactcgtgggacgggctccggagcatcatccacggcagccgcaagtactcgggcctcattgtcaacaaggcgccccacgacttccagtttgtgcagaagacggatgagtctgggccccactcccaccgcctctactacctgggtaagccgggccctgcaggctgcttgggcggggacagcatctgggaccacagttccctgg

SEQ ID NO: 20448 - DNA, 2300 bp, Homo sapien
tttagtctcctcaccctaatcccagccccgcaggagtgagggtgtgcagaattttacagcagtctgattctaaattcttgccatcatcttcccacctcttctactgtctctttaagaaaataaagaggcctggcgtggtggcacatgcctgtaatcccagcactctgggagactcaggcgggcggatctcttgaggtcaggagttcgagaccagccatgaccaatatggcgaaactccatctttagtaaaaatacaaaatatagtcaggcgtggtggcgggtgcctgtaatccccgctacttgggaggctgaggcaggagaatcgcttgaatccgggaggcggaggttgtagtgagctgagattgcgctactacattctagcctgggcaacaggagcaaaactccatcggaaggtaaacacatacacacacagtttttcttttcagaaagctcttttacagtgtagttggggtcgggcgcggtggctcatgcctgtaatcccagtactttgggaggctgcaggcgggcgaatcacgttgaggtcaggagctggaaagcagcctgggcaacatagtgcaggccctctagtctctacaaaaaatacaaaagttagctgggagtggttgcacacgcctgtagtcccagctataaggcaccgtctctacaaacgcattttttaaaattcagccaggcgtggtggtccacacctgtggtccaagctacccaggaggctgaggtgggaggatcgcttgagcccaggaggtggaggctgcagggagggatgatcgtaccactgcactcgagcctaggcgacagaacgagactctctctaaaaaatacaaaaaacaaaacacacaaaaaagtagtttgatctaaagcaaaatggtgaatatctgcagaaactaatgtgatatcaagtatagattgatatctatgagatgaaaagcttcatttgaccccggatgggtttgtgggccgtttgacgtgcattgttttaatggaaggtggatttatgataaagtgataaacatgtgtgtgggtgggtgggtgtgttggaaagggtgtttattggatttctttttgtcttccttattttccttctttcggtctctactgtatcaaatacaataacagatattcaggaagagcggatattgctttagctgactgtagccagtgtttctttggtgggacaacgcaactatcactgcaacattatctctataggagaatttaaagaaccctgacgcctaccggtttccgtagtgtagcggttatcacattcgcctcacacgcgaaaggtccccggttcgatcccgggcggaaacaggtcagctgtttttcctaaccggagagtaatactatttgaaattcaccgaaagaacgattctagtcccattctttctcttccgccttcctcctgccttttagacatttttatgggatttaaaaaaattttccgtgattgatggctcacgcctgtaatcccagcactttgaaaggccgaagagggcggatcacctgaagtcagagttcgagaccagcctggccaaaatggtgaaccgcccccccccccccaccccgccccaccccgccccaccccaccccatctctactaaaaatacaaaaattagatgggcgtggtggcgtgcgcttgtaatcacagctacttgggaggctgaggcaggagaatcgtttgaacctgggaggtggtggttgcagtgagcggagatcacgccactgcactccagcctgggggaccgagcgagactccgtctcaaaactaaaatgaaaatttcaaactcgcaaaagtggtaccgcatgcgttggccgggaatcgaacccgggtcaactgcttggaaggcagctatgctaaccactataccaccaacgccctgataggtagcatcctctccggatatccttaatagtgggggatcatgggtttgactgagtgataccaagtcacaggggggtgtctctccctaacccaccggaagatgtcgttcatggggcgttacgcaccttaggccgccgcgccgcgggctcccccccaagcgccgcggacgccttggtacgtgcctggtggtgtccaatcccaggccgccgcctgggtcgctcaacttccgggtcaaaggtgcctgagccggcgggtcccctgtgtccgccgcggctgtcgtcccccgctcccgccacttccggggtcgcagtcccgggcatggagccgcgaccgtgaggcgccgctggacccgggacgacctgcccagtccggccgccgccccacgtcccggtgagcagcg

SEQ ID NO: 20449 - DNA, 2300 bp, Homo sapien
ccctttttcaatttttttattatttttattttttttatacaaggtctcgctctgtcacccaggctggagtgcagtggcatgatcttggcttactgcaacccctgcctcccgggttcaagcgattctcctgcctcagcctctgtagtagctgggactacaggcacccgccaccgcactcggctaatttttgtatttttagtagagacgaggtgtcaccatattggccaagctggtctcgaactcctgacctcaggtcatccacccgcctcggcctcccaaagtgctggaattacaggggtgagtcaacgcacctggctgggatctatctcatggggctgccctgaggccttcagatcactcagcaggtagaatgtctggcactgaccctggcacagagtaaaagcttagggaaggggagagagaaagggtggcaggtcttcctgtgcaacctgaggaacttcacttttgtcctggcctgaatgatcaggtcctgtacagctgtccctgatttatatcctaactgtcccttctatgcttgctcaccccccagggcctgttctttcccccacccccaccagggcccttacactgactgttccttcaacccaatgcccataccaacatgtgagcagagttttcatgtctttaccctccctaaaggcaaggttggttgctgaattcatgtatgtatctccagtgcctagtacaacaagtttgttgagcaaataaatgggtggaatagatcaggaaagaataacagctgcattattagaaaacttaccgtaaacagacatgattgctagtgccatgccaagccatattgggacctcaggcaaaaggaaaagtcagaaaggctggttctgcctttatttacatttttgatattttgttcattgtggattttggcatacattttgatttcttaaaacattgcatcgatttttttttgagacagggtcttgctctgtcacctaggctggagtgcagtggtgcaatcataactcactgcagcttcgacctcctggcctcaagtgatcctctcacctcagcctcccaagtagctgagaccacaggtgccattctctctctctctctctctctctctctctgtttctctctttctctctccctctctccctctttctctctcagaaacggggtctcactatgttgcccaggctcatcttgaaatcctggcctcaagtgatcctcccaccttggcctcccaaagtgctcagattacaagcatgagccattgcacctggcctgaaatattatttaccttgattattgagttttttggtgcccctttaagttttgcacctgaggctggtgcctcacccaactcacattagcccctgccctgattatttctaacatgcaatccacaccatatcattagttcctcagcaaatactctactattatcactacttcacagttgcaaaaactgaggcacaactgtgcccaatgtcccaaaggaaggagaagaaaaatctgaacttgaaccccagtttcttcgttttttggttcagagcctgcccagtatagcactacaataagctgaattttataaattgggttttgagttaaggaatcaaaagcttcaggcttaagtcccacctctgccccagagtcttctgagccctccattttcacagacgtcagttgccctaggtggaactggactttaatattctccacatcccttattttttcccaaaacagtttaccagctttttctttcctgaaccaggagcaatagcaaaaattgggaatgggaagaaacaggtaccagccaggacacctgaacgaacttggagctcaggaacccaggaggggattggagagagtggggagactccatggtccacaatgaatgctccttccccatccgaaaaaatcccctagcccagtttttgggcagatgccagacttttattctgaagcgtgggccacaacctatgaggtaatctttggagcttcattctgaggcggaatcccattggccagttggggaagcccctcccaggattcctggcgctccgccttccctgaagcctataaaagcgcaggtccccgcctcggcagccacgggacacctgcatctgccaacaagactggaagcaggtgaggcacacagagggggaggcccgcagctgcgtgggaggaggggtggtctgagggacgtgggatgccgggaatgaggctggtttgcaggttggcgcatggacattttcccagaaagggacagagacggcgaagtttgacggtctggaaagcagagaccagcagggctg

SEQ ID NO: 20450 - DNA, 2300 bp, Homo sapien
gggtggacaaaggcgttgatcaacagggcatgagataacattctttttttttgagacggagtctcgctctgtcgcccaggctggagtgcagtggcgcgatctcggctcactgcaagctctgcctcccgtgttcacgccattctcctgcctcagcctcccgagtagctgggactacaggcgcctgccaccacgcccggctaattttttgtatttttagtagagacggggtttcaccgtgttagccaggatggtctcgatctcctgacctcgtgatccacccatctcgacctcccaaagtgctgggattacaggcgtgagacaccgcgcccggccggcatgagataacaattctgaatgaagacgctgttgaacatcttggttgtgatactggctacatagctgcatgtttgtcacacctgttctctttatttatttttatttatttatcttagagacagggtctccctctgtcacccaggctgaagtacaatggtgcaatcacggctcactgcagccttgacctcctaggttcaagcgatcctcccacttcagcctcccgagtagctgagacaacaggtgcacgctaccacgcccggctaatttttctatttttgtagagatgtgctatgtttcccaggctggtctcgaattcctgggttcaagcaatcctcccacctcagcctcccaaagtgctgagattacaggtgtgagtcaccttgcccggccaaacctgtcctctttattaaaaatgcattttattgtatatatattacacctcgaataaactttaaaaataaagaattcgggtcaccaaagatttctttttcataatataattcattgttgtcaaaaaatgccagggaatggatcaccttacaactgctagaatagctatcatcaaaaagacgaaaggtaacaaacgttggcaaggatttgaagagaacacttatacactactgatggtaattttaattagtatagccattatagaaaatggtatggaagttccaaagaaaaatttaaaaataaaactaccaggtgatccaggaatcccacttctgggtctttatccaaaggaattgaagtcagcacgtcaggccgggcatagtggctcacgcctgtaattctagcactttgggaggctgaggcgggcggatctcccaaggtcaggagttcgagaccatcctggccaacatggcgaaacccgtctctaccaaaaatacaaaaattagccgggcgtggtggtggatgtctgtagtcccagctactcgggaggctgaggcacgagaatcacttgaacccgggaggcagaggttgcagtgagccgagattgcggcattgccctccagcctaggcaacaagagcgagacgctgtctcaaaaacaaaaaccaaaaccaaaaaaccccacaaagttattgaaagaaataaataaaaataaatacgtaaataaaagaaggaaattctgacacatactagaatatacataaatgtatgtaaatgaataaatgaatatatgaatgtgagaataagaagtgagcgcgtcattttttaccgttctcccagctcaaaacgttttcgccccgtccagcttttcggcctcctccgggcgccccctgccggtgggccgcttgcccgtgctccaagcccaaaacagacgcgtcccctctagtcgcttttagccttcggtctcggtcctgattggctcagagtcgctcgtgatcccttttgggaaatgtagtccttaagggtatcgcgcctgctttttctatacgctctgacgcagagatagccacgggaagtacgtcaccaaatttcgccggttcccacaagctaggtcgtgtgacgctgcatgacgggaattgtagtcctcaaattgctagcttccgatgccatgcgctgcgactggaacgccaattcccaccatgccgcgcgctcacagctctcaggggctgtcctgtggcctttggggaagtgtagtcttgagcccccaagattccttttctgttctatggagtgggcccgcgcaaaggactccatttcccggcgtgctgccatccgtcgggtcgcggcagccattttgttccgcccgaggagaccctaagatggcggcgagggggacggtgaaggttgcctcccgcccgtccgggctctgatcctccgtctccccgtcccccggcggccggcccatggcctggcggaggcccgaaccatggacctccgcaccgccgtgtacaacgccgcccgtgatggcaagctgcagctgctccagaagctgctcagcggccggagccgggaggaa

SEQ ID NO: 20451 - DNA, 2300 bp, Homo sapien
tccggcctgtgcgacagagtgaaatcccatctctaaaaaaaaaaaaaaagccgggtgcagtggctcacgcctgtaatcccagcactttgggaggctgagcgggtggatcacgaggttaagagatcgagaccatccttgccaacatggtgaaactccatctctactaaaaatacaaaaattagccaggcatgggggcatgcacctgtagtcccagctactcgggaggctgaggcaggaggatcgcttgaacccgggaggctgaggttgcagtgagccgagattgcaccactgcactccagcctggtgactgagtgagattctgtctcaaaaaaaaaaaaaaaaaaaaagtctgggcacagttttgcatgggtacaagcacctatgagacactccttgaattggtaattttggggtgggagacagagaggccaggaggatgtgtttaactttctctcccccaccagccctggagaccctgaagggtaagaccatttctgtcttccccgctactgtattcccagagcctagacgttcctggaacacagtcagtgctcaataaaatttctccctcactggagagaagtactcaataaggggaactgtgggggatttgacatcaacataacttccattgctatctccctacaagaacttttaggtgaacttcagcctggggtccctgagcctcttaggggtgttcagggtgtctgtgaattctgatggaggaaaaaaatttcacatctttattttcactgactctaactgataattaccattccctcaattattaatgaagacaaccacaggacctgggactttgtccgtttgtccctaataaaaaccacagatactttcagattgcattgcaaccagaaacacatctgacacttgtcaccacggcaaaatcactgtgattattagatcttatttaatgtggtgataaaaataatataggccaggtgcggtggctcacacctgtaatcctagcactttgagaggccgaggcgggaggattgcttgagcctggaagtttgaaagcagcctgggtaatatagggagaccccgtttcaaataataataattattataatcataaaattaggccgggcgcagcggctcacgcctgtaatcccagcactttgggaggccgaggcgggcagatcacctgaggtcaagagttcgagaccagcctggccaacatggtgaaaccccatctcaactaaaaatacaaaaattagccaggtgtggtggcacgtgcctgtaatcccagctactcaggaggctgaggcaggagaatcgcttgaacccatgaggtggaggttgcagtgagccgaggtcgcactaccgcactccagcctaggccacagagtaagactccaactaaaaaaaaaaaaaaaaaaaagggaggccggacacggtggctcacacctgtaatcccagcactttgggaggccaaggcaggtggatcacctgaagttgggagttcgagaccacgctgaccaaggtggagaaactccatctctactaaaaatacaaaattagccaggtgtggtggcacatgcctgtaatcccagttactcaggaagctgaggcagtagaattgcttggacccgggaggcggaggttgcagtgagctgagattgcgccattgcactccagcctgggcaacaagagcgaaactccgtctcggaaaataaataaaaaaataaataaacaaacaaacaaataaaataagagaaataaaataaaaacagctgctacatttatttcctggaaagcacctatcactaacggagatgatcccactttacaattgtgattactttctcatctgggacccccgcccagatgactgtgggctccccgagagcagatgcgagttcttctggccccctgcagacagtaggtgctcacacttgctgaacgtgaccgcaagggttgggaagagagcgcatgggtgcggggcgacccggggactttcccggtgctgcggggcaggactccgaaaccgtgacctcacgtcccacacccacccgggacgcggaaggggcggcgcgcttccttcccagggcgcgggccgcggggtggagccagcgccctcagcgcgctacggtccgcgggcaactccgcagaagccccagcccccaggaccccaggacccagtggcgcagccggcagccccggatccctggtaggtggggaaggggcgaggacgggcctgaggtggagaaggtgtcgggggtgtggggggtggccctgagcccgtgccgctcgccagggctccaggccacctggcctcc

SEQ ID NO: 20452 - DNA, 2300 bp, Homo sapien
ttgacaaaaaacaagaacaaaatccccgcatcccccacattcatctcgtcctttgctgtcctaccacgtgacacattgtaaagttctctcacttatgttgttccttgttcgtctctcccactgggtagtgtgtgtcaccagggctggaattcttatctgtttagctcaccgctgtccccagcgcaaggactcaataaatatggttgaatgagtgaatgagaaggaaaaagcctgttacaaatgtcatggaatggggtctcagattcacttgagaatctcactagctgcctgaagttacttaaatttaaacattcaggccaagcgcggtagctcacacctgtaatcccagcactttaggaggccgaggcaggtggatcacttgaggccaggagttcgagaccagcctggccaatatggttagtcctcgtctctactaaaaatacaaaaattagctgggtgtggtggcgcgcgcctgtaatcccagctacttgggaggctgaggcaggagaaccgcttgaacccgggaggtggaggttgtagtgagtcgagatcgcgccattgcactccagcctgggagacagagcgagactctgcctcaaaaaaaaaaaaaaaatttaaacattcagcttctcactgtgcattagccacgtggtgcttttggctacaatgttggatggcacacaattctagaattgcagaaagttctattggacagtgctagcatagaccctgtccccactcacccccccaaaaaaatgcagtcacagacacccaatttttcccatgttctttctaaagctaccagaagcttcattctattcaaataatttggcagaggtggcaaactggtggcccctgggctggacaaagccccagttgggtttcatttggtccaattgttccctaacaggcaggacatgtctacagcttgaacttcctgtggatctgtgactctccaggtgggtctcccatagggcactgctctcccctgcccctctaagcagggcatcactgccacctcctcagcagaaatattcacctcctccctggaccatctgagattgagaccttggtttatagaccaagaggataaataatttgggaggtggagaggggcggggtaaaatccaagtgggggcagcttcaggaaaaggttgatccagcagtcacagagcctggagcctgacccctccattgcccctggctgaccctctccaggcctcagtttccttctctgcaaaatagggatgattaaaaagacaatacagtgctgggaggatgaagtggtctgatgttgggcagatcaggccggaggctggacaagttcccgtggtggttcaagtcactcatatagctgggttgggccgggtgcggtggctcatacctgtgatcccagcaatttgggaggcccaagcgggcagatcacttgaggtcaggagttcaagaccaacatggtgaaaccccgtctctgctaaaaatacaaaaaattagccgggcgtggtggcacgtgtctgtaatcccagctactcaggaggctgaggcaggagaatcgcttgaatccaggaggtggaggctgcagtgagccaaggtcgcgtcactgcactccagccttagcgacagagcgagactgtgtctcaaaaaaaaaaaaaaagtgtgtgtgtgtgtgtgtgtgtgtgtgtgtacatatagctgagtcggagcccatggtggagggcgtggcccctgacgcgctggcgagggtcaccctgcaactctcccagggttctcgcagcctcagtttggccataggggaaatgggcgacctggggaatcccagcacctgtgcggcgcccccgatcgcactcacctcccagggccaacttcacagggtccccagctgcggagcgggggtcccgtggctgggacaggcgtggtccaagagtgctccctccccttcaggggcagggcgtggagtccttcccggacttcatgacttggcgaggggcggggcctagtggaggcggggcagggaggagaggggcgggcctggcgcgggcaatccctcaacctgattggtcccctcgcccgtcactccagtgcgcccccaacctaccacgcagtaaaagccacccccgcctcggcccggacggtttccaagctggttttgaagtcgcggcagctgttcctgggacgtccggttgaccgcggtgagtggcgggggcgtctcagttgagctggggggcggtgtccatggagtcctggggcaccccaggggccggaggggtcggggagggcctttctcggggtgggatttgctggac

SEQ ID NO: 20453 - DNA, 2300 bp, Homo sapien
tgggattacaggcgccggccaccacacctggctaatttttgtatttttagtagagatggggtttcaccatgttgaccaggctagtctggcgactcctgacctccagttatctgcctgcctcggcctcccaaagtactgggattacacgtgtgagccaccacgcccggcccacacatttatcatcttacagtttgggaggtcagaagtctgaaataaattttaggggcagggcgggttctaggagtctttcttgctttttctagccaccagaggctgcccatcttccttgcctcttggcctgatctttttttttttttttttttttttttgagactgagttttgcttttgttgcccaggctggagtgcaatggcgcgatcttggctcaccacaacctctgcctcctgggttcaagcgattctcctgcctcagcctcccgagtagctgggattacagacatgtgccaccacgccaggctaattttgtgtttttagtagaaacggggtttctccatgttagtcaggctggtctcgaactcctgacctcaggtgatctgcctgcctcggcctcccaaagtgctgggattacaggtgtgagccaacgcgcccggcccttggcctgatcattgtaaagcctgcttccactttcccatctcctttgactttgaccttttgtatccctttttcacttattaggaccttttaaggacattgtgcccacctggatcacccaggagacgctccccaactcaaaatcattaactgaatcacacctgcaaagttgcaaagtccttttagctgtgtaaggcactgtattcacagatcctgggggcgaggacgtgggggtctagagacgcatatcttcgggggccatgatctgtctcctatattagggacatagcagaagtcccactgaccagatagaggagacttaatagagtgacgaagaaactgtaaaaagctaagtgggaactcaacatttttctgctcacagctctcaagggaaagaccaaagtcctccccggtggccttcaaggtattatatatcacccctctgacctcaactccccctcccctttgctcagtgggccccaaccacaccagccccttcctgctccctggacacctctaagccttttccggcctctgggtttgactttccctcctagacccatctgtccttggagtctcatctccgattccagctcaaatgtcatcttctctgagaggcccaccgcagtggccccagtgagagagtatcctctctccccgcctcccaccacatggctgctggtcactctcctataaggaatcatctgaaattatctgctttagttattcatttcttgcctgtctcccccagataggaattttccctccctgagaccaccaactgggtctgccatgtacaccgctgggttctgcagctctgagcaacctgtccggctgctttgtaggtgcccagcacaggtcactcctgtgcccgccaggactggtcagagtggaacagacagggcggagggggcagggcagccctgcccgcctggacagcctggagaaggcgggaaaacgaggcgggaaaagacagcaaacaagccctgcgggtgggtagagtggggagccctggcaggccctgacgccaggcagtggggcttggggcgatcgggcgagccatcagggtgcaggtggtctcctaggggccccccacattccctcgcagtatttacacattgattccggccttcttagacctactggtcaatgcgtgcgagtggggggctgcgaacggacttggacttaagagttcagggggtctgtaccctgggggtccccaaggctcctggggtgtccacgtgcggggggtgaccaggccctgccacgcagcccctttgcacgctgggcgcgcccagcagagcgcgcagggctgggcggagccgtggcccactaggcggaggcgccgtggacagaggcgggggcgccccccaccctctttctcgcttcccgccactgcgtcggccaatcaggaggcaggcgcccgcccccggcacggcctcctgcggccccgcaactcccaaatgccgagttttcgcgggaaaaaaatcagagcagctggcagcgcggcgggcagcgtttgccgagcgggcgctccgggtcgcacgcaagtccgcgcggggtccgggccacgcacgcggtttcatcgccatccccagccgggccacgcgcgcaggcagacaagctgttcgcggcgaccggagaggtgagcgggcgggccgggtcggggtgccagcccgggccgggcgca

SEQ ID NO: 20454 - DNA, 2300 bp, Homo sapien
tataaggaatcatctgaaattatctgctttagttattcatttcttgcctgtctcccccagataggaattttccctccctgagaccaccaactgggtctgccatgtacaccgctgggttctgcagctctgagcaacctgtccggctgctttgtaggtgcccagcacaggtcactcctgtgcccgccaggactggtcagagtggaacagacagggcggagggggcagggcagccctgcccgcctggacagcctggagaaggcgggaaaacgaggcgggaaaagacagcaaacaagccctgcgggtgggtagagtggggagccctggcaggccctgacgccaggcagtggggcttggggcgatcgggcgagccatcagggtgcaggtggtctcctaggggccccccacattccctcgcagtatttacacattgattccggccttcttagacctactggtcaatgcgtgcgagtggggggctgcgaacggacttggacttaagagttcagggggtctgtaccctgggggtccccaaggctcctggggtgtccacgtgcggggggtgaccaggccctgccacgcagcccctttgcacgctgggcgcgcccagcagagcgcgcagggctgggcggagccgtggcccactaggcggaggcgccgtggacagaggcgggggcgccccccaccctctttctcgcttcccgccactgcgtcggccaatcaggaggcaggcgcccgcccccggcacggcctcctgcggccccgcaactcccaaatgccgagttttcgcgggaaaaaaatcagagcagctggcagcgcggcgggcagcgtttgccgagcgggcgctccgggtcgcacgcaagtccgcgcggggtccgggccacgcacgcggtttcatcgccatccccagccgggccacgcgcgcaggcagacaagctgttcgcggcgaccggagaggtgagcgggcgggccgggtcggggtgccagcccgggccgggcgcacggggctcgggaactttgcaaaactttcccgcgcggccagcccgggcgcacgcatgtcccgcactctgtcccgggatccagggcctccccttccacctaaccctcgggaatcgttccccggcacacatccggctggagccgggaccagcgctgcgtccccggagcccggcggggggtcgagcgcgccgggtgggggagggcctggcgagccgccggggaggatgtcaggctccgcgcctgcgcgcggggcgccccgcgattcaattgtcgcgcccgagcccgatttcgcgcgccctgagttccccgggagcatctgggccaatggggagcgagcggggcggggcggccgggtgctgcggagccaataagaggcggctcaagtgaaggggggcgggacttgacgagcgggggccccctctgtagtcccggcggcgggggtgggcgtgggctcgctggcgcgacccgcgcgggccagtgggagtgcgggagggacgccgagggtccagggtttggaggggcgcgagctgccgggggttggaggtcgaggtgagtcgcggggcgcgcgcgctcgcgggtggccgggacggggcggccggttaccatggccaccgcggggcgggcccggtcgcgcacgcgcgcggggggggccggcaaggagggggggcgtgggcaccgaggggtcccggggtccgcggatctcgggtggggtttttccctctcagtggcacttggttgagttcccccgggacttctgaagttccggcccgcgctggacttctgggattccctcttccgtaaataggaatccgaggaatgaatgaatcaatgaatgaatgaataaacgaaccaactcggccacttggcccgggcctcctttctcctctggtcgtggggaaggagggatgggttggaccttctgcttttctttcaattccctcttttcattctccttcctcctcaatcttcaacacttggctagtcgttaatgccttaagtgcttaatttgttgtgtctggtcctggccagggtctggctgtacaggaggactggaagggcatcctgggagtttcctggtgtccacaggccggacaaaagcaaccccgactccttagagcatggcatggctcagaggtgctggtaaaactgatgggggtttttgctgtccctcccctcagcgccgacaccatgtggatccaggttcggaccatggacgggaggcagacccacacggtggactcgctgtccaggctgaccaaggtggaggagctgaggcggaagatccaggagctgttccacgtgga

SEQ ID NO: 20455 - DNA, 2300 bp, Homo sapien
aagagggctaatgaaggtctcctatggcatgcaagccagagaaattaatcatcaggtctcatctggagtgagcaggcatgatcctcccagcccccaaaaacccctggccgggcgcagtgtttattttccaacctagacaccagatggcagcagtacccggttcaaaatccaacaacaacacagtggggtacacgcagctcaactgacgacttttaatccagttccagtagtctacgcccgtccccacggtccaaccaactccagcagatgggacctacaccttcgatcacactgtctcatcctgccgggaaaccccactcccagtaggtcccacagtcccccacaaaaacaccaaccaaagtagcacctccacccccaggtgccaatggagggagcgccccaaacgtggcagctatgaaatcaaagggggacattttaaatgcaacgaggggctggagacagaacagagaaagagacgagggtcggtggacccctcggggaccacacgccccaggtcagcagcagccgcagcacagcaggctcagggtggcggaaattcctgattagcaagcgccatctccagactctgaataagctaatccaaatttttagaaacaaacactcgcagggtctgatgcttaaccggtacaggctgagagcaattggtggtggatgtttaaaaaagaaaacctggtcccctccgtcctagctaccagatggtcctgggccctttctcgaaaattcctcagccttccatcggccacctccaaaacttctttctctagccattattttgaggcggagctttgaaaaaagaagtttaaaagcccagaccctatagattcgagggccagccgccagcccagcgtgtcaatctgtgagtcctccctttgttccttcctctcgcaggcatttgaggtttctgtggacttctccttccgggagagatgaagtgggaccggacgaggttgttggggggggaggtgggagggagaaagtatcggctggtggctgcagaggcgcgaggcctggaccaggcatagaacaaaggtgctggcggcgggtgtacctgtttgcccctgtagaacagcctctgcaggcctggctccacgtggaacagctcctggatcttccgcctcagctcctccaccttggtcagcctggacagcgagtccaccgtgtgggtctgcctcccgtccatggtccgaacctggatccacatggtgtcggcgctgaggggagggacagcaaaaacccccatcagttttaccagcacctctgagccatgccatgctctaaggagtcggggttgcttttgtccggcctgtggacaccaggaaactcccaggatgcccttccagtcctcctgtacagccagaccctggccaggaccagacacaacaaattaagcacttaaggcattaacgactagccaagtgttgaagattgaggaggaaggagaatgaaaagagggaattgaaagaaaagcagaaggtccaacccatccctccttccccacgaccagaggagaaaggaggcccgggccaagtggccgagttggttcgtttattcattcattcattgattcattcattcctcggattcctatttacggaagagggaatcccagaagtccagcgcgggccggaacttcagaagtcccgggggaactcaaccaagtgccactgagagggaaaaaccccacccgagatccgcggaccccgggacccctcggtgcccacgccccccctccttgccggccccccccgcgcgcgtgcgcgaccgggcccgccccgcggtggccatggtaaccggccgccccgtcccggccacccgcgagcgcgcgcgccccgcgactcacctcgacctccaacccccggcagctcgcgcccctccaaaccctggaccctcggcgtccctcccgcactcccactggcccgcgcgggtcgcgccagcgagcccacgcccacccccgccgccgggactacagagggggcccccgctcgtcaagtcccgccccccttcacttgagccgcctcttattggctccgcagcacccggccgccccgccccgctcgctccccattggcccagatgctcccggggaactcagggcgcgcgaaatcgggctcgggcgcgacaattgaatcgcggggcgccccgcgcgcaggcgcggagcctgacatcctccccggcggctcgccaggccctcccccacccggcgcgctcgaccccccgccgggctccggggacgcagcgctggtcccggctccagccggatgtgtgccggggaacgattc

SEQ ID NO: 20456 - DNA, 2300 bp, Homo sapien
ctgagctgggtggacaagctgggcctcatcatggagttcatggggccaggcgtgcagggctaggagctcctggggcagcgctgtatccctagtgctcagcggccagccggggccccatgctcaggccagggcctctcaaggcattttgtggagtgagtggcaggctgcacctcaaccggcctaatgaaggccggcttttatatcataacctcatttagaactcagtcacccccacttttattttttttgagacggagtcttgctctgttgcccaggctggagtgcagtggtgcggtcttggctcactgcaacctccctctcctgggttcaagcgattctcctgcctcagcctccccaatagctgggatcacagggacatgccaccacgcccagctaatttttgtatttttggtagagatggggtttcaccttgttggccaggctggtcttgaactcctgacctcaagtgatccacccacctcggcccccgaaagtgctgggattacaggtgtgagccaccgtgcctggccgtcaccccccattttctagaggccgaagaggagcatcggagatcagcagtgaggatgccccgtgcacgcttgatggggctggaattcacgccagctggtttttttttttttttttccatggtgcagctcaactccggccgtctctagccgagcagcacacgtagtaggtgactcgcaggcctgaggagtttggtgtaaaagtgaggccgctggctgctcggggtagggaggaggagggcggtggagcttctctgcagcagtcattgcagaggacaccatgtatatcttggtggcatcctcaggtcagcgagtcgggtgtccatcggccccacgtggctggcatacacggccggagcaacgacggagcgtactccctagtcctggcggggggctatgaggatgatgtggtgagtgtgtgtgtgggaggggtgggggagggttgctctagttttttggatggtggtaaaatacatagaacaaaatttcccatcctagccgtttttaaatgcttggttcccggtggcgtgaagtatattcccattgctatgcaaccatcaccaccaccatctccagaactttctcatcttcccaaactgaaacgttgtctccacgaagcactcactccccaccccctcccagtccctggcaccgcccaacctggttcctgcctctgtgactctgacgactctggagacctcctgggagtggaatcgcacggcctgcgtccttgcatgcctggctcctctcactgagcccgacgtccttgctttgtccatgttgtcgcatgtgtccggattccccttttgttcacggctgagtcctattctgccgtgcggagggaccatgctgtgttgatctgtctgtccgtgggcactggggttccttcccctttcgactgctgtgaatagatctgctacgaacacggctgtacaagtatctccagcccccgttttccattcttttgggtgtatatccagaagtggaattcaagactcctgtgataattccatgttgagtgttgttttttttttttcttttttttgagaccgagtctcattctggctggagtgcagtggtgtgatcacagctcactacagccactacctcctgggctctagtgatcctcccatgtcagcctcccaagaagctgggactacaggcaggcactgccacgccaaactaatttttgtatttttttgtggtgatggggtttcgccatgttgcccaggctgatctcgaactcctgggcttaagcgatcctcccgctgcagcctcccaaagtgctgggattacgggtgtgagccaccatgcccagccctctgtttaagtttcttgaggacgcaccacactgtttgtatagtcgctttgccattctgtagtcccaccaacagtttacaaagggctccaatttccccacattctcaccaacgcttgttattttctgtttctttgaaagtagccatcctggggagtttgctttcaatgcagtctctttttttttttttgcctctgcagagggttcacccagccttcttgtctgtttcaggaccatgggaattttttcacatacacgggtagtggtggtcgagatctttccggcaacaagaggaccgcggaacagtcttgtgatcagaaactcaccaacaccaacaggtttgtggaatcagccttcttatttccttgctgatgcatatctgccgagtcttggttctgttttgggcctcatgtccagcaagtgatagtctcattaggagcgtggtagaacatagc

SEQ ID NO: 20457 - DNA, 2300 bp, Homo sapien
tggtggcaggcacctgtaatcccagctacttgggaggctgaggcagaattgcttgaacccaggaggcggaggatgcagtgagccgaaatcatgccattgcactcttgcactctagcctgggtaacaggagtgagactctatctcaagaaagaaagaaactcgtagaagaaagcaaagaggccaggcgtggtggctcacgcctgtaatcccagcactttgggaggctgaggtgggcggatcacgatgtcaggagatcgaaaccatcctggctaacatggtgaaaccccatctctactaagaatacaaaaaaaaaaaaaaaaaaaaagcctggtatggtgacaagtgcctatagtcccagctactcgggaggctgaggcaggagaatgtcatgaacctgggaggcggagcttgcagtgagccaagattgctccactgcactccagcctgggtgacagagcaaaaaaaaaaaaagagaatatggaaataatgcacaaaagaagtgcaaagttgtaatcaaatacaaactgaggctgtggtgagatactatttgtttcccctataaagttggccaaaaattctaaaatgttgacataggtcaggggtaaaatagcattccactgttggtagaaatacaaattggaaccatctttctggaaatctcttctgcctgtttgtatgaagagctttataaatgatctattcttgtcactctaactccgctttgaaaaatgtctttaggagacctctggctaggtaaaaatgtaagatgtaatgtttttcataccattatctaaaacaattggcacatagacacacacacacacacacacacacacacacactctcacaaagtcagtaactaagtacctaaaaaagacatgggccatgggtggtgtgtcacatgcctgtcgttccagtactttgggaggctgaggtgggaggattgcttgaggctaggagtttgagacctacttgtgcaacataaaattatgaaaaattaaaattacaaaaaagaatttcaaaaaagttagctggttatggtcgtgtgggcctatagtcccagcttgggagccggaggtgggaggatggcttgagcccaggaggctgcagtgagtaaggcgtgatcatgccattgcattccagcctgggtgacagagtgagacaccctttctctttttgtttgttttttttttatatgtgtgtgtgctttgttttgttttttttgaggcagggtctccctctcttgtccagggtggagtgcagcagtgtgatcgtagctcattgtagcctccacctccttgggctccactgatcctcccacctcagcctccagagtagctgggactataggtgcatgttaccacgcctggctatttttttttttttttgtggagatggggttttgccacgttggccaggctggtcttgaactcctgggctcaggcaatcctcctgccttggcctcccagagtactgggattagaggcgtgagccacggcacctagcaaccctgtctcaaataaatagtaggctgggtgtggcctattttataaattatacatatataactttgaaatattaaatttttttttttttttgagacagaacctcactctgtcacccaggctggagtgcagtggcataatctcggctcactgcaacctctgcctcccagactcaagcgattctcctgcctcagcctcctgagtagctggaattacaggcacgcgccaccacgcccggctaacttttgcatttttagcagagacggggtttcaccatgttggccaggctggtctcgaactcctgacttcaggcgatctgcctacttcagcctcccaaagtgctgggattacaggcctgagccaccactcccggctcctgtgtttccttttttggggggtacatcctcacctataatgcgtggggtcctgactctccctgcagggcgctggctctcaactgctttgctcccatcaatgaccaagaaggggccgaggccaaggactggcggtcggggaagccggtcagggtggtgcgcaatgtcaagggtggcaagaatagcaagtacgcccccgctgagggcaaccgctacgatggcatctacaaggtgagtgccccttgaggaggccgggggctctgtccccgccggggctgcctctgatggagctgacgctgatgcccgctctctgcaggttgtgaaatactggcccgagaaggggaagtccgggtttctcgtgtggcgctaccttctgcggagggacgatgatgagcctggcccttggacgaaggaggggaag

SEQ ID NO: 20458 - DNA, 2300 bp, Homo sapien
aaaaattaaaacaaaattagctgggtgaggtgacaggtgctactcaggagactgaggtggtagaatcgcttgaacctgggaggtacaggttgcggtgagctgagatcgcgccattgtactccagcctgggcgtcagagcaagattctgtctcaaaaaaaaaaaaaaaaaattgaaaaaaacattcagagacagcatctcactctgtcgcccaggctggagtgcagtggtgccatcatagctcatcgcagccttgaactcctcgcggggctaaagagatcctcctgccttagcctcctgagtagctggggctacaggcatacaccaccatggccaacatgatgaaaccctgtctctactaaaaatacaaaaattagccaggtgtgctggtgggcgcctgtaatcccagctactcaggaggctgagacacgagaatcccttgaacccgggaggtggaggttgcagtgagccaagatcacgccactgcactccagcctgggcgacagagcgagactctatcttaaaaaaaaacaacaaaaacaaaagccacaggctgcctggggcaggtgactgtgctgtggtcaccaggcctctcccccatgtggtcaccgccctcgcccagctgtgtgacgacatgctgcagacatgtgccccctgcgtaggcatctgtgcacctgtgtacggcgtgtcactcctccctggcgtgcagccagcccggtggcatcttccctgtttgtctgcttgggaagtggagactccaggcctctcagctctgtcttctcctggctttcttccccaggcacgacttggttgattgagcttgaagttaggaatctgaatccaccagacttggttccttcctccttttcccctttcttctcattgacgtgtatgtttattttttatttttttcgagacaaggtcttgctttgtcgctcaggctggagtgcaatggcgtgatcatggctcactgcagcctcagcctgcctccctgggttcaggtgatcctcccacttcagcctccggagtagccacgcccggctaatttttttgtttttgttttttctttgagacgcagagtcttgccctgtcacccaggctggagtgcaatggcgtgatctcagctcactgcaacctccgcctcccgggttcaagccattctcttgccttagcctcccaggtagctgggattacaggcatgtgcctggctaatttttgtatttttagtagagacagggtttcaccatgttggccaggctggtcttgaactcctgacctcaagtgatctgcccccctcggcctcccagagtgctgggattacaggcatgagccacgatgcttggcctgatgtgtgtgtttattaagcatctactgtatacactgtgcttggtgttgagagagaacacagcctcaaagctcagggagcatctgccctgttgtagataagataagcacattaataatatataacacggctccacaggtggaaggagaggtgccgtcttgaaggcagatggggtgaggggatgggactgcctctagggaggtgtcagggaaggccccataagggaggtgacttgagctgagctgtgagtgatgagagccgggggaccgagctgttaagctgcatgacctgccagggacaaaagcctggaggccgggtgagcttggaatctttgagggcccctaggggggccaggctggtgatgggcagcaggtggaaagtgagactgaaggtcagaggggcctctggacctggtgagactgtccccacagtcctgggagaggtggccaggagcaaacctgatggtgtggatggcacttctcacgcgcctgctgtgtcttacaggactgcctggacagatcctttcgggcacaggtgttcagctgccctgcctgccgctacgacctgggccgcagctatgccatgcaggtgaaccagcctctgcagaccgtcctcaaccagctcttccccggctacggcaatggccggtgatctccaagcacttctcgacaggcgttttgctgaaaacgtgtcggagggctcgttcatcggcactgattttgttcttagtgggcttaacttaaacaggtagtgtttcctccgttccctaaaaaggtttgtcttcctttttttttttatttttatttttcaaatctatacattttcaggaatttatgtattctggctaaaagttggacttctcagtattgtgtttagttctttgaaaacataaaagcctgcaatttctcgacaaaacaacacaagattttttaaagatggaatcagaaactacgtggt

SEQ ID NO: 20459 - DNA, 2300 bp, Homo sapien
agcccccgaatagctgggattataggcgcgtgtcaccacgcccaacttttgtaatttttttggtagagacggagtcttgctatattgcccagcctgttctcaaactcgtgggctcaagtgatctgcccatctcagcctcccaaagtgctgcgattccaggcatgacctgaaattaaatctcaactccatgtggaatatatgaatatggtcccataagaatttaaaacacccagagcttcttaaattctcctttgacttctctttttaccagtgtgcagctttccttctctccccaaggattaagttcgtttcttcagtttaggagtacctttttctgtgcattgacaagcttgtgtgctcttaacctcatgataccggtttctgtgtgtgtttccatatttattttattgagtacaggattctggaccactgtccctagctcagcggttgggagatatttcatgtttgcaaacagatcggccttctcttttttcttttctttccttttttgagacagagtctcaccctgttgcccaggctgaagtgcagtgatctcgactcactgcaacctccgcctcagcctctggagtagctgggattacaggcatgcgccaccatgcctggctaattttgtatttgttaatagagacaggtttttgccatgttggccaggctggtctcgaactctggacctcaggtgttccacccgactcgacctcccaaagtgctgggattacaggtgtgagtcgcccgagccacagcaccgggcctggcctccttttcaattgctacatagtaagtattccagagtactgattgctattaagttacttctctaatcccccactgatggatagttagtgcaaaacattggaaacagttgcagacagccctgccgccggcattcttgaattgtgtaagctccagaccttttttctgggtacatcacctccaggaagaactgctggctgggttatcgggtggtggatgcacttagaatgttattagaaaatgtcaaattgcccaatttacactcctgccactccaaatgggggcatgcctcacacccctgcgtggtccagtacacaatgaatgctcattttgtgaagtcacagggtcaaatctttctccgtgcctcatcccacttaatccttgcaacattctcaagaggcgggtagacggggtgtggccactaccatcatatccattgcacagttggaaacagactcagcgaggttactttgctggaggtcaaccacagtgaggcatggggcccggcttagctttgaatccaggtcagaaagcaccaaagctcattctctcccatacattttagggaactcggggagagggaccctaactattccgaaggccttgccccttggcaaaggtttgttgattgtgatgggaatagacctacggtggcggggtggaggctcttgctgctttaccctatgttctcggttctcctcctttgcaaaacggatcgctatgtctccttgcttggcactttgcaaattggggaacgctaagcccacattccggccacgggtttcgaacctccagcctgcacgttcccggccggtgctgatgctgtgctgggtctcacgtactcagccgccgcctgataaccagggcggggcccggagcttgcgggcagtgattggcacctgccccagcctgtccgcgcctcgggctggcccctcaagccaatactggctcctctctgtgcggtcgtcgggcgggccctgaggctcccttgtcaatccaaggcccagctgccgtcgggttggtcgcggcagccttggctggcgtgcgccccctccaatgagaacagagccggtcagcgggcacgtgggtgggcgccggcgtgtccccgccggtctgccaatgaagaggcgaggccggcgtttgtccccgcccaatcgcggcgcgcggtgggcgggccgtgcggtgttgatgggcccggcggaggggaggggcggagctgtcagctccggccaatgggcgctcgggcgtggatccggcagccaatggcagtcggggcggagctggcgcgcggccttataagcccccccgcgagcgcttgcggagggctcggtcgccagcaaccgagcggggcccggcccgagcggggcctgggggtgcgacgccgagggcgggggagagcgcgccgctgctcccggaccgggccgcgcacgccgcctcaggtgagcccacggggaggccgcccggccgtgtccgagcgcggaccccgccgccatggccgcccccgcgtcgcggctcggggctgcgggcgc

SEQ ID NO: 20460 - DNA, 2300 bp, Homo sapien
cttaaggttaactgatttgggacctttatcacatcttcgagaccctcacggcagcagcacggggcatgtgtcactcgaggagtgtgggagccctggggcggggagtcctggggtgtctagagccctggggtggggaccctggggcggggagtcctggggcggggacgctggggcggggagtcctggggcggggagtcctggggtgtctagagccctgcctgtcccggggcttcccttttgtaggcatttcttgctgtgaaacatgatttggtacagaaacggacataaagcatgtaagtaccagatatatatgcgtgtgtgtgtgtgtgtgtgtgtgtgtgtgtgtgtgtgcgcgcgcgcgcgtatgttagcaaatgactctccggctgtcccctgtgtacctcgatgtcaggacacggcccccacctgtgcctccttttcccagccccctctgcacactgtggtggtggcttcctcccggctctgctggcggcgcccttgcctctcccctttgccaggccgcgtgtgcctgtggcccgggcagtgaggctgtgtgttggctgcattggaaggtcttacaaatgggctgatttccttgcgtttctgctcaatggtgtgtgtgtaagattcatccggttgtgtgtggtggcagtgcactcattgtcatggctgtgaaattccccactgtatggctggactttagtcgactttttccattctgccgtggacggacatttgggctgtttccagcatgaggcttctgcgaaagacctatcatctcttcacctgctgctcatgtaagaaattcattttgatcgtaagccttgctatcagtaactgtgactggggctgcatttatgatgttccgttcctcatgcagcagctttgcctggagtaaccctttgacttgtgcccctggctccacgtccttgttcacggacgaggcacagattgaagagacgtccgatctgcccttgaagcgctgccctgtgggatcaggagggcagcgggtcctgggagcaggtgccaggacgatgtgcagccttgaggacagggtgtgtcccaattggcgagggtggcctgaacccgaaggtgtgggtgaggaaggagccatttctaatggagtcaccatattaagccctgcttagccaaacttgaaggtgacagtttgttgtgggacatggagatgatgcagggatgcggggaccgaggccagcatgtgtggtgtccaaggtcgccctgggtgctgctgtgtaggtgagggaagagggactgatgggctgcttagggggccatgtctgagggcagggcccaccacttctgcccacacctcattggccagcacccagtcacgtggccacaccttgcatcaagggaggctgggaaatgtagtctgaccacatgtccagctgggaaggggcaggtgagacttctctttcctgccatgtgggtgctgggtgccctgcaggggctcagccaacagggtcttgaggttgaagagatggatctgcccaagccctgacggagtgctcatgcctgctcagggcccagcatgagctgcgtcaggagcagaagccattgggaagggcttttggtgtggccgggcagccagacactccacgcgcaacccccagagcagtgccaggcccgggagcccttgggatggaggcagggagaatggggggctctgaggactgagggaggaggggagcccggtgaggggaggatgggtgaccagctcaggagcaggggcgggaagggggcatagaagcttcctaagcaggggagctactactcttggccatgttccaggaggatggagtggctgtaggagcaggctttcgggccagggcctgggtgtggtgggagccggggctggctctggaccctgcaggggctgccttagcctcacgctgtctgaccagcccctgcctcacgtcgtgtgctgagtcctgtctgcggcccctcgctcacccgctggcttggtctggcaggagcagatggccttcattttggagtcttttgttcaaagcgggcgcttcgggttggagtggcagtgcacacgctggctcgtgtcgcttgtgaggctgcaggatttttgttttagggaggtaggagccaaacaaacctggcgcccgcttccaggctgtggcatgccaggcgagtcaccggcatcctgtccctgcccaccgctttaagaaactgttagttctgtttgaaatgtcatcactgggcgtgaattcccatcttcagataatcccgccaggcggtgtttggatgaggagtttattcaggctgtg

SEQ ID NO: 20461 - DNA, 2300 bp, Homo sapien
tgtgtcctaagccgtgtcctggcactttctcttggaaactgaggtttttcttccgcctgtgtccttgggggtggccgggaggcaggtctgccagcatcaggtcttctggtccccgaggccgtcgctgggttgttccgagtggcgggaggtgcagctcgctgttgggcactggcggtggcggagcccagaagtctccgtggctgcccggcctcttgtccaagagtcctttgtgatttctgtgggggctgctcctctgaacgctgggcctgcgtcccgcagtctgtgctttctgataacgccagagccacgttccagtgtattaaacttttaacattcgccagattcaattaatcttatctttacaactcccaattacaggcagtaattaagtggagcagcattgtaggctggggatacggcattaatcatcgcagccttggagccataaattagttccttcccgtccccagcatcttcccagaaggagcagagtgtttcattccctgtgcggaggggtctttaatcccacaaaggtgctttggattgggattaaaatttctcatctttatgtaaatcataaaagcccatttaaaaaagaggaatgcacccctgtctagacagtggaagactctctgaggacgacagagttgaaggtgctggggtcgccttggctggggaccctgggagcatgcccagaaattaattatttgtgtcctgttagattagaggctccgtgatgttcgcctcttctctggctcctgccccctccttatttatttttatttttatttttattttttttaattttttgagacagagtcttgctctgttgcccaggctggagtgccgtggcgcaatcttggttcattgcaacctccacttcctggattcaagcaattctcctgcctcagccacctgagtagctgggattacaggcgcctgccaccacgcctggctaatttttgtatttttcgtagaggcggggtttcaccatgttggtcaggctggtctcaaacttctgacctcgtgatccacccgcctcggcctcccaaagtgctgggattagacgtgagccactgcacccggcctgtttgtttgtttgtttgtttgttttgagacagagtctcactctctcgcccaggctggagtgcagtggcaccatcttggctcactgcagcctttgcctcccaggttcaaatgattcttttgcgtcagcctcccgagtagctgggattacagcctcctgagtagctggtattttgtatttttggtagaggaggggtttcaccatgttggctaggctggtcttgaactcctgacctcaggtgatctgcccgcctcagcctcccaaagtgctgggatgacaggcatgagccaccgcgcctggcttctttatttcattaaaaaacaaagtggcctttcagctggaaggggctgtagtggagcaggggccgtctcccaccctctgagcttttccttgtcttgcttctgccctgggagggtctcggggagagaccatatcatgtgtcctctcatctgtgtgactgttctagaacgggagctgttggccttgttactctagagttggggtcgaggatgggacttgaccatcctcagctggcactcagctgtgtgccctcaagtccctgaggccctgtcctcgtccccttcgcttggaaattgaggtttttgttttgccggaggccttgggagtgggctgggtggtgtccccgttggcactggggcttctcgctccccctcaaggctgcggctcctggtgcccaccctccctgatgggaagagagtcccaacatcgcaggtctccagcttctggtacggcatgagcgggatgccacccccacttcgcttcgtgtgtttgcacactttcatcttatgtctttcttattcatgatggagccttggtgatctttcaaatgtaaaatgtgtaaaaataaaacttacaaagtcggtgacaaatgcagcttttctcatttccaaagctgctttttccctgttggctcccagtgccgggaaagggtgacgtgggcctggagaccgtgacgtgggcctggagagcgggctggcagctccgggggccccagatgcttgctgttccagactcggccctcccagggtcccctcgccacccgcagttccaatccaatacttttgttttttgccttttcagcctcctcgaggtggagtgccgcttaaccgggagcatccccactcctggctttctgagtgtgtcacaagccaccgagccatggtcctcactccccgctcctccacctgcccca

SEQ ID NO: 20462 - DNA, 2300 bp, Homo sapien
gcaggcctgagaactcctacaaatcagagataagaaaacaaatggcccgatgaattcggcgtgaggggcttgagcagacgcgttacgaaggagctgcaggaacgaaagccatggttcagtgcccagcatcggtagaagtcagaggcagccagctgggagacaccgccagccccaggacggccacgtcagaacaccgccaccagatgccagtgaggagggcgcagctgcacgctgctcccagccggggtggatgcagggcggtgccatggccatggaaaaccgttcggcattttcttggaaacggaagcatgtaccctgtgccccagcgatgccactctgtgcatatttactcaggagaaatgaaaacatatgtctccagaaagattggtacataagtgttcttagcagttttcttcacgagagccccaaactggaaacagcccgcacgtccatcaacaggaggatagataaataaataaccatagatccacgcgcaaccgagtactgtttagaaatgaaaaggagcggtcgcctggtgcacaggacagtgggaacaaatctcagaaacgcacgccaggtggaagacaacaggcacgtgtccctgccgtacaacgccattcatgtgaaccactaggagggaacgaggtctgtggtgactgagagcgcgtgcgtggttcggtggggatggcctggtagagggctggtaggaggggtgcctgggggcccggcatgttttgttcctgtctggatcagtggttacgcccagaactccgagcagcctgtgatccctgcgttttactggatgttaaataaagatgaggagcccacttgacttcaaggattctagttcatgagcctcagtttccacgtctgtggattgggcccacagccccacctcctagaagcccttggcctgagccccggggtgcagcaggtgggagccatcactccaaatttgttgttgatctttctggatggtcgtctttcaaaggctttatcaacgggcttagcagtgagcagggagtgggggtcagtgtggccatctcgagtgtccccagagtggggagggttcctagggcacaaggctgtagccccccagccctggtaggcagccctgccttttcttccagaccttggggtggctgttgggaaaccttgggtctggggtcattgtgggccccaccccagccacgcacgcctcggctcctcagtttagggggtcctgcttcagagacctgcaaagtcgaatgggccgaacatccgaattggacctgggtctggaagcattggcccgctctccagggtgctgatctgtggtgtcaggtcatgcccccggtgtgcagatatttctggatctccatgacttcatggagatccccttgttgagatacaattgaaagatggcttgggatggcggcgtgtcgcaggccccttcctggcgtgttttgcgcgtgcagtggtggttcctttctcatgcgagggcagaaggtgtcctgagcgcgtgcagtgtcttgtcttcagagcactctaaagctgctgtcagcaccacccgccccgaaaccagccccagctgcttcaggacatgtcacagtgactgtgagtgtgactcagccacctccaaagcaggaggcccccatcgctccccatgaaggtccggctggagacacccccacgggcattgtgtccagccacggctccatctgcggttctcccactggggtgatgctgacggccgccttggggcagggcaggggctgctggggctggaggggcccggctgagccgagtggaggttgcagagctgtggctgcggctgctcactatgtccttcatgagccgcgtgggaaatgggctggagccctggagcccctggagccgctggatcacctttgactttgtgaaacccccttggctcataagccaggctccctggcacttgctgggaagtgcccacgtcccatcccctggtgcgcctctggtggccctgccctcacctgtctcctttccctctgcagatcacgcaggaggccggggaattcatgatcacatttccctacggctaccacgccggcttcaatcacgggttcaactgcgcagaatctaccaacttcgccaccctgcggtggattgactacggcaaagtggccactcaggtaaaagcttgcctgctgggaacgggtcccagcagggcgggaggaggctcttttttgcctctgcagccacacgcccatagctggtccagcagccgtttcgctcagcccagggcctgggctctcaaccagggtctgattctgggctcc

SEQ ID NO: 20463 - DNA, 2300 bp, Homo sapien
ctcctgtgtctcgacgtctcgactccgcatggcaactcaagacccttgcagatgatagacagcgaagaaatgcgcgtggctgtgtccgtgaagctttgtttacagaccctgaaatccagatctcatgatttttacatgctaccaaatacgataatttttctgttttgagccacttaaaaatgtgaacattggccaggcacgatcgctcacacctgtaatctctgcactttggaggccaaggaaggaggattgcttgagtccaggggtttgagaccagcctgggcaacatattgagatgccatctctacaaaaaatttaaaaatcagctgggtgtggtggtgtgcgcctgtggtcccaactactgagaaggctgaggcaggaagatcacttaagcccaggaggtcaaggctgcagtgagccgagattgtaccactgcactccagcctgaatgacagagcaagaccttgtctctccaggaaaacaaacaaacaaacaaaaaaacatgtaaacactgttcctagcttgtgggtcgtacccagacaggctgctggcaggtctggtctttgagccaacagtggtggccttggtgtgggggcagcctcccccttccctttgagcagtgaccttccctctgcagccatccagtctctgctgccttgatcttgtcccagctggcgatggatggtgcccactcgagacccagccactgagcaccaaggttgggggcggctcagccttggccccccaccacgctctgcagaaacaggccttggaactggtttctgaaaagtcacttctggtccagaaccttctcctctaaatgggcgccttctttttcaacacgtccatctgtctgtgagtctgggactcctgggcggtctgggcatctgtctcggcctcctctgtcttccccacctcgcggcctctctcggagaatgttccctctgccccgagtgttttcacagcccctcctgacagccctgccaaggtgaatctgtctcttctgctcttgttctgtccttttgatttcctgcctcctgtgtgctcctcatgaagagctgcctcctggtgaggctactccaggcggcccccgcagcacagagctcgtgcaccccagctcccaggcccagccagacgtgctatttgcataatggttaattgattgtggctcaggctaattggtcaacagagtggattgccaataaaccggcaccacgttccaggagtggaatgggactagaggccgtctaaattgcctgccaggaggagatgcggaagccgctgcgctcaccgctgcttggaaccttctttgcacgcaggaagtggaccccccagaaccagcccttgcgtggcctggcctggcctccctgccccggccaccccctcacttctagtcacgacctgctcctcccaggagccccctcccgccctctcccgcgccgccatcctgggggctgccttcacccagcagcaagcctgaataacaaatgaagtcagcttcccaaggatataattttcttgaaagccttcagtatgtaaaacaaggctgattcactttttttttttttttttaaagtcattgggggtgcttttctctggagaggcagatgggtgactcacgttccaaagcccaagctgcccctccctccaccagggaggtggtcggttcccccctgagcagtgccctctccacgtggcctgccttttcccctgagccaggctccctccctgagggcatatcttggggccagggcagccctgtctgagcatctgtggctcaggctggatcgggagacacagtggactggctctgtctcccagacaaggggcttgtggacacaggcgggatccttctctggttgggggagcatcctgggccctgcagggtaatgagcagtatccctggcctccacccactccatgccaggagtgccccaagtcgtgacaaccacagatgtccctagacatcgcccagtcccccgcgtgggaacccctgccctagaccaagggatggcatcagggtgggcgccatgccctcacccccgtgcagtccagccttccctgccctcggcgtggctgtgggatggccctcatgtgtttaccaggtgccccatggggtgcggatggttcggcacagctgcctgagctcagaggacacggcctactccctgctcgccaccttacatgggtctcttccagaactaaatctcgttgagcgagcgttgggggctgtttgtattcttccccctgatggatgggtcgcctaaaactgcagcctggctcctggcgggtgccctcag

SEQ ID NO: 20464 - DNA, 2300 bp, Homo sapien
ttaaagggctagggcagggactcagagtaagggactgtgctctaggctttatttccttcatcttcccagtccccaactggttgtgtgcaaggtgtacctagagtctgactgtgtgtgtgcatgtctgtgtagcctgcctgtgtgcacatatgtgtgtaggaagggaatctgactttgcatatctctatttggctggctggcacatgcacctgtggtctgctgactgactggcctatctatagtctgacagtgtgccggcacctgtgtctgcgtgtgactttgaccggcttgtgcacctgtaggtatctctgatctaattgcatgtttgcagttccctgtaacccaactgtgtatgtgtactgcctgccccaccatgaccccttatgtgtatcttttctggcttggtgtatgtctgtggtctgattttgggcctgtctgtgtttgtggtctgactatgtgcaagttttatttgcctgattgtgtgtgtgtgtgtgtgtgtgtgtgtgtgtgtgtgtgtgtgtgtgcccgtctctgctgcctgactgtgtgaatgcatttgtttctgtgtctcttgcagatatgcaaccgcttgcagtctgactgtgtgtcggtgtgtatcggtggtttgactgtgtgcatctgtgtatgtctgtggcgtgatttagcaggcatcgttctctgtggctggtctgactgtatgcctgtggcctaactatgtacactgaggccccccgaatcccgttcgtcaccctaggctgtgacccggccactacccgcccatccttcccctgggaccgccccagggctgggcgaggtgaccgcagctgggtattttgggagtcagaatcacaggggctgccccgttattatgcgccaccagttcctgtggtcacggcctggacccgcccagggcatgggctggcatgggtgccagcctgactaggcaacaaagatcttatccttgggcctctcccttcccctccctggccctctgacctggctctggacagagtggagattggggagatggggagggggccattccagggttcaaggtatgtgacgagggacccttctgccctggaggagttgaggttcttgtgggagaaacgtgctgaatgattaacatcttttcatttagtttgggaaccagggtgaataccacggaggataaccttagtcatatctgatgctccgggatgtagaatgtagggggaattgacctttgaggggcagagaagggtttcctgaggaagtgacagctaagctgagacctgtcatgtggtggggacagcattccaggcagagggcacagcagaagcaaaggcttggaggtgggactgagcttggctggcctggctgtacctccaagcgagaggaaacagtgaagtcagcaagagtggcttcccctgggggctctgggagccatgggaggtcttagagcagggcagggacaggcaggtgtgtggaagagatttgtcttataacctgggggatcaggttttagagccagacagcagcatagtctggagtcccctccttcctgagaagcagcctgtgagttggagaaaactggggctcagcacccctcagtcctggtgtggggcttggtctgagtcaggggctcaggtcctcagtcctggtgtggggcttggtctgagtcaggggcccagcctgggttggggactcatgctggggttggggtttagctggtggttggaggctgtcttagtccatttgggctgctgtagccaaataccacagaccaagtggcttataaatgacagaaattggtacctcacagttctagaggctgggaagtccaagatcaaggcaacacagatttggtgtctggtgagggctatcttctggttcgtggaaggcatcttctccctgtgtcctcacgtggcagaaagggcaagggagctttctgggagatcctttatgacactaatcccgttcatgaggtctctgctctcatgacctagtcacttcccaaacactccatctcctgttaccatcatagtggggactaggtttcaacatatgattttttgtgggggagacaccttaattctatagcaagggcccagcactttcattccatcccatcaccccatgatccttccccattgtcccatgaccagcccccgcaggaccctcccctgctccatgtgaccctccctctgcctcctccatgaaggtctcctggatttccccactcgcctctcacagccctccattgtctctgcagacgttgccccatctgacgctcggctcgaggcctctctgtgagggac

SEQ ID NO: 20465 - DNA, 2300 bp, Homo sapien
cttttctcctgtttatgacttccgccttatcgttttgttccccgggttaatgctttttgtttatctgcatctgtggcctggaatgaatgaatcaacaattttggaggaaaaaaaaaaccaattctaaagttgagttcctctgttgggcaccaggccttctccaaatatgtgccttgaggaaataaatgctttcgacatgatcaaaacacaaggactgatgtgcaatcttgcttggtggctgtgagccctccaacccccttacctttgtcaatatcccccttttatttacttccgctctgttttttttccttatttttgagagtctcactctgtcgcccaggctagagtgtgcagtggtgtgatattggttcactgcaacctccgcctcccgggttcaagagtttctcctgcctcagcctcccaactagctgagactacaggcacctgccaccacgctcggctaatttttgtatttttagtagagatggggtttcgccatgtcggccagcctggtctcgaactcctgacaagtgatctgcccaccttggcttcccaaagtgctgggattacaggcatgagtcaccgggcccggcctcttttctcttattattccatcttcaggcaccaatggcagccaggctgccacattatagcaattcatcatcacaccctccttaggagcaggggctaccttgccccattttacagatgagagctgagatccagaggcaaatccattctacagatggggaaagtgaggctccgggcctcacacagcaaatcagtgttttagctgggttccaactgtggctcgtcctgactccagggaagcaggggatggtaattaggtgagacctgtgtaaagtgcttactctataagaagtgctccatcatccattcattcatgtgttcaacctacaatagggatctctggagccacactgtagtgtaactagaataaaaacgggataatgggaccaggcgcggtggctcacgcctgtaatcccagcactttgggaggccgaggtggacggatcactgaggtcaggagttcaagaccagcctggccaacatggtgaaacactgtctctaacaaaaatacaaaaattagccaggcgtggtgacagcacgcctgtaattccagctactccggaggctgagacaggagaatagcttgaatccaggaggcggaggttacagtgagccgcgatcacgccactgcattccagcctgggcgacagagtgagactccgactcaaaaccaaacaaacaacaacaacaacaacaaaccgggataatgggatagagtggagtggggcgtggctggtagctgttgtcagggagggcttctcccaggcgctgcttatttgagcagaaattggaaagatgagaaggggaagttcttggatgctcaagttagaggaactgtaagaagctggctgaggcgggaggatcacccgagcccaactactcaggaggctgaggcgggaggatcacctgagcccaggagtttgaagctgcagtgagctatgatcataccactgtactgaggcccaggtggcagaccccatctctgaaaaagcaaagaaggagcagctggtttttctggatcattgacatggtgggggggaggggacagggtagtgggcgctaatgtgaaacggcgagctgcagagaggaggcgggattttattccaagggtactggggagccgtggcacagtttagggcagcgcacagaaagtgccatgccctttgcacccaggacgctggggctcccgcacggacagtagccccaggggcccttcccgccgccgccgcagccgccaccaccaccaccaccccagccgcccacgtgtcccgcgaagccccgcgccccacgtgctcccgcggccctttaaacaccccggagccacgtgaccgcgctgcgccgtcccattggccggggggcgtggcggccgcgcggctgcgcagtgacgcgcacgggccggccctgcccccgacccggcggcggcggcggcggcgctggcggaagggatgacgtcaccggctgggggggcgcgcgagcgggagctaggggagcgcgagccgcagtgagtgtcctcgcgccgcccgcccggcagcccggccggcgcgcgcacgccgcgagccgctggcgctcgggctccgctcggatcccatgcaacagccacgatgtgaagcggggcagagccgggggagcccagcccagccagcctccaggtaaagccaaaaaaaaaaataaaatcatggattagaggaaaaaaaaatgcaggcgctcca

SEQ ID NO: 20466 - DNA, 2300 bp, Homo sapien
cccaggaatgactactcacattccacattcagaagcaaatcagccctgtacgcctacaccgctgtggttgggtcttgcttaccacagccaacccgagcctgaccgctacatttgtccctctctgcttctgtttttccactcttgcctcctctcatgcctgctggactgaaaaacctgcctctgcttggtagcactgggctgcaagggccatccacagtggccaaggcagtggcctctagatagtgtggcctccgtctgtggcagtagacagagcaggggcaggagtgccaccaggggccgggcatggtggctcacaaatgtaaccccagcactttgggaggctgagactggcagatcacttgaggtcaggagttcgagacaagcctgggcaacctagcaaaacccccgtttctattaagatacaaaaattagccgggcatggcagcatgtgctcgtggcctcaactgatctgcccgcctcgggctcctaaagtgctaggattacggacatgagccaccatgcccggccttttctccctttcttagaaggaaaacctctgcaaagatcttatttccaaataaggtccattcacaggggttggtcagaaccaggggttaggggttcaacatctctatttggggcccacccactacatggtacaagagatttgtgtgggaggtgatctcagaagctgtgggaggggagagaagtgggtggggaagggaaggagacagtagcgggctcattgacaagacagtactgggttcgttgacttatggagctcattcgactggggacctctaggagatatggtagaacatacttcgatttgtcccataagagggacgagggagtgggggcatttatctaccacctcccatctgtcactggctgagggctgctctgagaggtattaggccaacacagaaaatctaaagactaagtagtcagcctggcaaagtgaagttgaggagcaagaattctgttccaggcagagggaacagcatttgcaaaattctagaggtgaacaaagcaagatgcctctgggacattgcaaatcatccaggcttcagagattggcaggcgcccaaccacaggggtgcatgtaggccacagagaagagtgtgggctttatctggagggcaatggggagccatgggagagtttagagcatgggaaagactatgttacaggtctggaagctgaggcccagagaggctaaggaatttagctgatgtcatacagcttatgaatggcagagacagaaatccgacttgagtgggctgcagacagattgagggtgtgaaatttgggggatggggactggggaggaggtgaggctgatgcccagggctgaagctcaggcagggggcacagttggagacccagctggagaggcaatgctatagggagagagaatgaagctggtgcaagcctggaggccaacctggcggtgcggacttgggaccactgacccccaccagccccaccctgaccctggcacttgactctccctccaaatcaagtccaggagggctctgaggatatatggactcagacctgagtccggataaaagagccagctacggagagaaagggctttccaggcaggaggcccagcccatgcaaaggccctggggcaggatcctgcctggtgtgttggaggaacagcaaggagatctgtgtggctggagcagagtgagggatggtgacagggggtcaggaatttgggttttaagcactgatctcattgtaggggggcgtggcttgaacaagtctgggtcactcttggagtctcagacaagggtaacattgaaccttctacagtgtgttgctaggaacctccagaagctgatgctggtagcgtcttcgcacagtgagggctgaatctgcactgctgggggccggcagcccttttgaagcatccctgggcctccttgggtccaaagataccctgagccttcaagaagttatctcaaagcttgcccgggtaccggcaaatcacagacctaggaatgatccattggccacaggcccaggcagctggcagctcctgggacagaatgtagcagggcgatgtcacagaagctgggggcatctagaaccctggtgactcctggtctccatgtcatctgccagaaaggccacctgcgccagcacctcctgagaccggccttcaaagacacgacgcatgccgctctgccgtccggagcacttaatgcctagagccagcagggtcccagtggccgcgtcactgcctctgagccacgcggtcattccaactcaactgccctcgcgtc

SEQ ID NO: 20467 - DNA, 2300 bp, Homo sapien
tgggcgaggtggctcccacctgtaatcccagcactttgggatgccaaggcgggtggatcacctgagatcgggagttcaagaccagcctgactaacatggagaaaccccgtctctactaaaaatacaaaaaattagccaggcttggtggcgcatgcctgtaatcccagctactcgggaaggctgaggcaggagaattgcttgcacctgggaggcggaggttgcggtgagccgagattgtgccattgtactccaccctgggcaacaagagtgaaactctgtctcaaaaaaaaaaaaaaaaaaaaaagtgatgtttgtgtaatgaatggattacaacaaaactgctaatgctaggtggcctgggttcgaatcccagctctgccacttttctctctgtttcctctgggaaatctcttttcttctctatgcctcagttttctcacttgtaaaatgggaagtcatagtgtcatgagaaaagtaagagatgcttcccccaccccaataaagtacctagaagactgtctgtcacttagcaggtgctcttttcttttcttttcttttttgagacggagtttccctcttgttgcccaggctagagtgcaatggcagatctccgctcaccacaacctccacctcctgggttcaagcgattctcctggctcagcctcctgagtagttgggattacaggcacccaccaccacgcctggctaatttttttgtattttttgtagagacggggtttctctgtgttggtcaggtagatctcgatctcccaacctcaggtgatctgcccacctcggcctcccaaagtgttgggattacaggcgttagcccctgcacccagcccttctctttttttccttctcttcctctctctctctctttctttctttcattctttctttcctcttctctttctctctctctccctctttctttctttctttctttcttttttttttttttttttgagacggagtctcgctgtgtctcccaggctggaatgcagtggcgcacgatctcggctcactgcaagctccgcctcccaggttcacgccattctcttgcctcagcctccggagtagctgggactacaggcgcccgccaccacgcccggctaattttttgtatttttggtagagacgggggggtttcaccgcgttagccaggatggtctcgatctcctgaccttgtgatctgcccacctgggcctcccaaagtactgggattacaggcgtgagccaccacacccggccattttttttttttttttttttttttttttttttgcgataagtctcgctctgtggctcaggctggagtgcagtggcacaatctcggctcactgcaacctctgtctgcgggttcaagcgattcttctgcctcagcctcctgagtagctggaactacaggcatgtgccaccacgcctggctaatttttgtacttatagtagagacggggtttcaccatgttggccaggttggtctcgaactcctgacctcatgtgatccgcccacctcagtctcccaaagtgctgggattccaggcatgagccaccgcacctggcctaaaagtaaattttttttttaatgtaggctgagcgtggtggctgagggttataatcccaccgctttgggaggccaaggcggagaatcacttgacgtcaggagttcaaaaccagcctgggcaacacggccaggccccatctctacaaaaactacaaaagtgagctgggcttggtggcagcgcctgtagtcccagctacttgagaggctgaggcgggaggatcgcttgagcccgggaggtcaaggctgcaacgaaccatgattgcgccactgcgctccagcctgtccttaaaaagatcaaataaagtggcctcccagcctccctccctggagcctccaccatgtaaccccctggacattcgcgcgtctccttggctgggatgacctcgctgatggctctgtgctgagtggccactccgcctctagacccccgggcgcactctggggccagcagtggggagcggacgcctgaggggaccgtggcacccgccccgccccgccgggccgggcctgcccactgcgtgccgggcgtgtccgggcgggcggagcgcgggcgcggcgggggcgggcggccaggctagtcgggcgggtgcgcggggcgctcggggcccggggccagagctggagccggagccgggcgggcgccatggaggggctgcggcgggggctgtcgcgctggaagcgctaccacatcaaggtgcacctggcggacgaggcgctgctgctaccgctgacc

SEQ ID NO: 20468 - DNA, 2300 bp, Homo sapien
agtcattgcctccaaatttaccatcctttgacctagggcagcactgagcaactggttagccgcctttctcagtctggtactgctgtgtgcttattgttttcagagtgtgtacttctcagttaatggaggcatcccaggtcatgagttcaaatcgagaaaaggaaaaaagaaaatatttgggagtgctgtttttgtagttcacttaaaaagagcttcagatttagtaaaacttggtgttaacagtttttcttttgtttggcatgtagtaaagagagaaattgaccaagttagatgtttgtttttaataaagtaggctaggcgggccaggcgcggtggctcacacctgtaatcccaacactccgggaggctgaggtgggcggatcacctgaggtcaggagttcaagaccagcctggacatggtgaaaccccgtctctactaaaacatacaaaaaattagccgggcgtggtggtgcatgcctgtaatcctagctcctcgggaggctgaggcaggagaattgcttgaacccaggaggtggaggttgcaatgagccgagatggcgccattgcactccagcctgggcaaaaggagtgacactccgtctcaaatgaatgagtgaatgaatgaatgaataaagtaggctaggagaaagtgcccggttagtgttaccttaagagtattgctaccaggtgaaattggaggggtgcattttatcattttgagttctgctttggaaatcctgtgattggaggggtatgtggtaatcaccagtacttagaaactgcctgggaaattcattcgttcattcacccagtacagacagggcatacccacctgcaggccactgccagagacgctggtggagcagagtcgtggagtgtgtgttctggcggagaggcaggtgctgaactgaatgacccaacagtagacttgcagatggcaaaaggtgccgtgagggaaatagacacacaagttgcctaagcgaggtgtcagccttggttttcatagctccagcctccacgaagtcatcttccattttgtttttcaggtggatggggaaggatttaagaacactttggaaacttcatcgttgaacttcaaagtaactccggtaagttaccatctggttctgcatcgctggaaatgttaatcgagtggttgattttccataatgaaagagcagtgtgtatgtgtatggaaatgactggatactgtgctggatgctggggttaagaggttagcagaagagaaacagtctcagggctggccatctagcaggggcagtgggatcaaaccaaatatgtaaccagaagggagaaagaagtgtgatgagggagcagttctggtggttggacttcataagtgcctggaactcttcccagaggtctgacggataggttgaagagggaaagaagaatttggagcagaaagtttgggtggtgtctctgatgcaaaagagagaggggagcacacagggttggatagaagccagaggtgttgcagagcagctgggcccgcctcgctgagtctgggccaccagaaggattggacctattgtcctaagtgagacagatgtcggaaaaggttttcagcagagtagagagatcattttgttatgacaggtttcagttacaaatcagtttatgttgggagaagtatttttttcttaaatccactgtgacctcttctctgacaaagggggtgtttgccagctgcagcagccactaggtcagcttggtcatggggtgggtggcatggcagggcagggcccaaactcgggagaatgggacagactgttatcactagggacctgctgttaccagggaaactgttaaaatgagctggttttcatcaggttattgtaggatggaatacattttttggagacaagaaagttttgtggaaacaggcatttattcacagatgattgaaagccatatttactggtgaaatgtatgtgccccgtgtttaaagtgacttgtggatttgctttttcttttttaaataggacattgaagaatcccttttggagccaggtactgataagagaaacacgacagttatggtttgaaagttttcacactattattttaaagctgtctatattttaagctgtgttatgatcttgtaaattgctctaatggtggacaatccagatcatacaaggatcagagattggaaacccattcgtatcaccagatctgtggaagagccattctggcttcttgaggtcaaatacatttggtgcaatgtagtagtgattcttttcatgtctaaccacgtagagtggcatttaattccc

SEQ ID NO: 20469 - DNA, 2300 bp, Homo sapien
agaagtagctttaagagcttgtctttctctagttgacttttaatcccaatggcagaagctgaaacgtttttcgtatattttaattgcacttggcacctgtacatctctttcctcctccctgtgcccttgacagagctacctgttaggtggtgacgagcaaagctaactcttagtggagggacaccgagtaccagagaaattctcccagcctagaaggcgggaagagcacactacacaccatttctctaaattctctgaacactcaagccccaagcagcatatgtacaatacctttaacacatctcttggctgacttcttgctggtggcttctaactcgatgccaatttcatcaggatcttgcccctcttctttaaccgcctattagggagagatgagttttacaacatcattaagagctgcagggcacacactgttccttacaagtaacaacctcccatgaaacaaaggcaaacccgtccttgcaaagagcaactccgggtcagctatctgggccgcaagcccaaaaggcggaggaggaaccccgcacaacttgggtctctctgggtccaaatgacaaaggagagggaggctgtgagcaggagctccagaattggggtcaaggaccagttccaaaatggcaactcaactcgacaatgccaaaccttcgactttaaagttatatgatgggacaaattagaacagagaggctgcacttggcccggcctcggtgaagggctggccaccgctggtgaggaggaacagcagccagcctggggagattcaacaggtccctcagtgcctgccacctgccgggtccaggactgggtacccacaagctccctccctatgctcaagttgtttgttccagttgcggaaacagacaattcccaaccccttaatattttgcatttagcccctgctttcagcgaggtgcgacacaaacgcaggatgagctggcaaggaggtggggcagcgcattaggaagggcgctcaggaaggtgatgtctcaggcagacccaaaatgacaacaaggggccggccacgagaagatctgggggacccgggtggacagcttcgtaaaggccaaagccctggggcaagaacaagcaccgccccctttcctgtaaatgctctggagtccgccagacacccattctccggaggaggaaactgaggcacagagagaaaggcacctgcccaaggtcacagagccaaggctcgatcgggagccccaggaggggtcccggggccaccctggtagcggagaagaccgcacgctgagcgcgcttgaggagaaaaggtggaaagaggataggaagggaggcacagagaggagcggtgacgggccaaggtcacacagccggccccctgggtgcccgacacctcgaaccggggtcggccaagacgcggggcgaacccagggcgccccgggtccgggagccgcggtgacaggtgcaggcgggggcgtgcccgggcctcctgcgccacccccgagccccgcgccgcctcaccttcttgagccgctccatcaggacgctcttgttgccgcccgtgtccaggttccgcttcttcagctccgcccgcagatcgatcacccgcagctcgctgagccgcctcgtcccagtctccgcaacgcccgggccgagagaagccgtgccagggcccgagtcgcccgacccgggcagagtctccgccatcgtcgcgttcccgtcttcgccaccgactcagtcgcacaccgccggcagctatagcggctctgaacacaaaatggcgccgcctaagaggaaaacgcactcgtttcctcccgccccgctttgcggccgcgcacgcgcacgcgcaccgcccccactagcgtacttagcagcaaggacgctcgcgcgtccaccaaccgcgggttccccggcacaacgcgcaagcgctgaatctgcagctcgcatgcgtcccggcagttcccggcgggaggctgacgagacgcaacgcgtctgcgcacatccccgcgttgttctcactgcgcatgtgcagttgcaaccgggatactagaacctacgcttggtgcgcctgcgcagaagcgaggcgcgctggggcgactggagcggttccctcgcaggcggcgccattttgtgctaggagcctgataaaaccggcccggttctgtggaaagtgggcggcggagccagggtccctggaatggcggagactctgtcaggcctaggtgattctggagcggcgggcgcggcggctctgagctccgcctcgtcagagaccgggacgcggcgcctcagcgacctgcgagtgatcg

SEQ ID NO: 20470 - DNA, 2300 bp, Homo sapien
cactctctgcattttctctgggtaaatatgtagatcagtgggcttcctgccttatctgagtaaagagaatccatagtgaaaagaaacacaagcttgagcttttaaaaggcccatgtgactctggccgagacaactatccacccttgagcccagggtttctcatcaggaaaaaaaaaaaaaaaaaaatccctacttcttctcatcaccaattaataataaagccctgtgatctccgtagttccggagtcaggatggtgggatgtgtcaacagccccactgcctgcaggggctggggggtgggcggccaggcggagcaactacaggggagaggtcccagagtagccaggtggaaaaaaggcagagaaaaaaagctacaggaataaggaaaccgcaggtggctaacctttacttgcctctctgcttttcctagggatccctttgaatcccccaagggaggcgttagagcccccgatctgcaaatgaggactcgtggtggcacagagaggaaaagcgaatcgtgatggcaaccacacaccgagtgtttacatgcgccaggcagcacgccaagcctgctccacgcaaacttatttaatccccaaatcaaagtcctattgcttttttgcttcttacaggagaaaaaaaaaaaaaaagaatagaaaagaggactcagaaggggttcaaggtctcctatgcccaagatcaggccaccgagagctggcagggtccccaagtccagagagactgacggagctgggggagcccaggctctgcccgcctcccgggcagttctgaggctggttttaaagtccacccggggtctcccctcatttcacatttctgatcactaccgtcaacaccacttttccttcctgccacgttacttcaccgagcgagtaccggcaaaccgtgaaaactggattgtggtgggtttttttctatttttccctttgagtatgtcctacgggtgtttcctttgtaaatcagccccgattcaggctggtcggtcccctgtgggtcacaaagcatcttccctggggaaaccaagcagccgaatcaggaatcccagggcctgggttcaaatcccgacgctgcccgtcctcggccgtgtgaccttggccgagtcccttcccctcgcctgggaagtgagggtttcagggtctcccctccaggtacggaggaggggacgagacgaggggagaaccctcctctcagtggacgatgtcacccgtcaccgtttctcctgcacgcgtgccgtttttgtggttctcctggccccattgcggcgttaggatttgaacccaggcccagccggccaaggaactctctccggggcctcggaggagccgggggacgcgagagcgccaggtccggcgaggccgcgaacgcggccgggggcggacgccagggcccgcgagccaccgtcgcggccaagaggaccccagacccaccctgtgcccgccctcggggccccaaatccaccttcttcagccgctccatcaaaacgctcttgttgccgctcgagtccacattccgtttcctcagctccgcccgcagatcgatcactcgcaggtcgctgaggcgccgcgtcccggtctctgacgaggcggagctcagagccgccgcgcccgccgctccagaatcacctaggcctgacagagtctccgccattccagggaccctggctccgccgcccactttccacagaaccgggccggttttatcaggctcctagcacaaaatggcgccgcctgcgagggaaccgctccagtcgccccagcgcgcctcgcttctgcgcaggcgcaccaagcgtaggttctagtatcccggttgcaactgcacatgcgcagtgagaacaacgcggggatgtgcgcagacgcgttgcgtctcgtcagcctcccgccgggaactgccgggacgcatgcgagctgcagattcagcgcttgcgcgttgtgccggggaacccgcggttggtggacgcgcgagcgtccttgctgctaagtacgctagtgggggcggtgcgcgtgcgcgtgcgcggccgcaaagcggggcgggaggaaacgagtgcgttttcctcttaggcggcgccattttgtgttcagagccgctatagctgccggcggtgtgcgactgagtcggtggcgaagacgggaacgcgacgatggcggagactctgcccgggtcgggcgactcgggccctggcacggcttctctcggcccgggcgttgcggagactgggacgaggcggctcagcgagctgcgggtgatcgatctgcgggcggagctgaagaagcggaacctgg

SEQ ID NO: 20471 - DNA, 2300 bp, Homo sapien
tttgtattttatttttttgagatggagtctcgccctgtcgcccaggctggagtgcagtggtgcaacctcggctcactgcaacctctgcctcctgggttcaagcaattctcctgcttcagcctctcaagcagcagctgggattacaggtgtgcaccaccacgcacggttaatttttgtatttttagtagagatggggtttcaccatgttgcccaggctggtctcgaactcctgacttcagatgatccgcccacctcagcctcccaaagtgctgggattacaggcgtgagccactgtgctcggcctcctttcccttttagatccctaagagacacgtgtcgggcaggaaggaggatggacagaaaggaatggccaggaagtggggagaggggctagactggggtgtctccctccaagcaaagaaactgggtgccttacctgcattccaggagtcacggatgggaaagtaaatctttggaggggctgggagctgggaaaaagagatgggcagaaagaactggtgaaaaggctcagcagcccatccccagaggcggagggaggaggacaggccggagaatcaggtcagcatcaatatggaggacaacatcgtgcagggctggagggacctcccagagctgaccacccgccaaaccctggcctcgttcccggcccgtagtacctggggtatctgcaggcctgtctgctgacacacgtactggctgaactggtacatggcgggggggaccacctccccagccttctgtagggctgcctggctcttgtcgctgggccccagcagctcctggtcgtacaccaggtagacggcgcccccagccacacttcccttgatgaggaacctgcgggcagggacgggaggagcagaagctcagcggacactgacagccaccctcaggggccaaggcccacggggagagtgagaccctcctgagggctcaccgtccacagggtgacactctgtagtgcagcaccgtcgacccagacccctattatatacagcactcgttttacaacgtgcaaggcagggcggctggacgccacttgaactgatgaactgaaacccagagggggagagtgggtcactcaaagtcccacagtgagcaggggcagtgaagacgtaagatcttgaccttctagaagccttccagccctggagaaaccaagtgtccctgggcgcctcctgcccgctgtcactcgcagctccgagcacgcattcacttctcatccacgccagcggcaggattcaccggcattcccacctcacagagaagacaactgaggctcggaggcggaggctgacaccgcgaactgaacgccaagggctcgctgggaagcaggagggaggggattggcgacctcgggaagccccgcccctctgaagcctcagtttccctatctggcccataggcggggaacgaaggggaagtgactctaagggaagcgaagagcagatcgggaccagactggagacagggatgcccacaaaaatggactttttcggggactcgggtcccctccggcgcccccacgcacctcatcagcgaccacacccgggccaccatggtcgctcggatccacgcgcaaggacactcggctcgcccgccgcttcctgtcgcggcgccgcagaggcctctggaaggtgtagtctttcttgcccgacgcaaggtcctctgggagtcgtggtgtcttgcggctctgagactccagagaagggctgcggtctcgcagcggagggccgctgggaaatggacgctttaaggcccgggccgccgcaaggctgtctgggaaatgtagtcagcacggcgctgtttgcacctggccgcggagcctcctgggaaatgtagttcggcccggccctggcaccgtgaggggaaagaggcgtcaggtgcctggctgaagcctgaaggtgacccgaaaacaagtcagagcccgagagatccacccgcgcccgcgcgggggaccaagggcccggatttaagaagagtgtgcctacaaggcggttgtcacggcaacgagagggcgggattgttcgagcgctgcggccccctcacgtgatcgattcggaggcggggcgtccgcccagtgggcggggccgggcccctgctgggaggcgaagaccaggcgggcactgttgcccggcgacgctccggcgctgggtccccgaggcccggcccctccccgggaggaggtgggcttcgagtcacgtgacccgtgccctacgggagggggtgcggtcggggacccggcaggaggcggccgagaagagaggaccgtgggggcgttc

SEQ ID NO: 20472 - DNA, 2300 bp, Homo sapien
acaagtgggtgcaccagcacgcccaactaatcatcgtattttttgtagagatggggtctcctgctgaggcaggagaattgcttgaacccagcggggtggagattgcagtgagctgagatcgccccactgcattccagcctgggcaacagagtgagactctgtctaaaaaaaaaaaaaaaaaaaaaaaaaagtcaatgggacaaggggaaggggacttccagaaccaggaagctgagacagaccagatggagcggatcattgaggagtccctaaatctcccatctgtaggtccagccctaggttctttgcctctgctgtcttctgggtgtctcctcctgacaacctccaggccccttagaaccagcaggacccaatccaggctcagcatgtcaccccatacctgcttctcttcccagctcaccatcacagaaatagccccactatcccctgtccctaaatgggagacccaggtattgtcctcacctccttctatcctttcacccccacgagctcatggttttcagatcttatcagttctccctctccagtctctccccagctgtcccttcctctctctctccaggactcccagattgtcacctccctcctagaccctaccccgggcctgaccacccccatctttcctttggcctcccttccatctccgatttggtctcccccacctccacactggcttccccatgtccatactcattctctccctgcctcttctgtcaatgcagccaaaggcgtctgtgtcaaaagcaacatggccatggcccttcctgctccaaaccctctcaggggtccccactgcaactgatggaaaccaggctcctcactgcaccccatgaggccctgcaggtatagcccctgactacctgtctatccttctctcccacggccccatctatgaatcgttcagttctcaaaataatgaactcctcacctttcccagacacaccaggcatgcccacagcaagaaacgagcttccaccttttccccttccagggacagcccatgaagctcctctgctcatccctctttccacccccagctctacactgactgcagcagcccggcagggggaagtgggaccagatggactgacgggtggacggatgggtggatggatgaatggatagatggacagatgcatgtatggatgcatagatagaaggatggatgggtggatggccagatgaatagatggatgggtggatggatggatgatggacggagagatgtatgggtggatagatggatgagtggatggatgtatgaatggataaatgggaacacataaatggatggatggatggatggatggatggacggacggatgcatggatggatggatggatggatggatggatggacggatagatgagtgggtggccagataaatagatggatgggtggacagatggatgagtggaaggatggggggagcagatggatgaatggatgggcggacagatggatgaacggaagtgtggatggatagatggaaggatagatgggtggatggccagatggatagacgggtgggggacagatggatggatgggcagatgaacggttgaagcagcccggccgaaatgcgggagaaatggggggaagccctgcagaacgcatcggccccttcttgacctcggcgggccttagcttcccctctgaacaaagcgggcgtgtgaccctctgcgcacccctaaaccgtgcactcacccgctcaggcctcagtttcccccactgtccagcgggggtggggtcccgggctgggagccacgcgaacgcccccacggtcctctcttctcggccgcctcctgccgggtccccgaccgcaccccctcccgtagggcacgggtcacgtgactcgaagcccacctcctcccggggaggggccgggcctcggggacccagcgccggagcgtcgccgggcaacagtgcccgcctggtcttcgcctcccagcaggggcccggccccgcccactgggcggacgccccgcctccgaatcgatcacgtgagggggccgcagcgctcgaacaatcccgccctctcgttgccgtgacaaccgccttgtaggcacactcttcttaaatccgggcccttggtcccccgcgcgggcgcgggtggatctctcgggctctgacttgttttcgggtcaccttcaggcttcagccaggcacctgacgcctctttcccctcacggtgccagggccgggccgaactacatttcccaggaggctccgcggccaggtgcaaacagcgccgtgctgactacatttcccagacagc

SEQ ID NO: 20473 - DNA, 2300 bp, Homo sapien
tgtcccctgtccctctgcaggcccacacaggaccatgaaggtgcttctcctcacagggctgggggccctgttcttcgcctattattgggatgacaacttcgacccaggtgagcacctggggttgagggagggagaaaccgggccagctgtcctgtcctccgcccagagtgaccaccccggctatggccagccagcctccagggagcgcgagtgctgctgacaggggccaacgctggtgttggtgaggagctggcctatcactacgcgcgtctgggctcccacctggtgctcactgcccacactgaggctctcctgcagaaggtgagccaccccatgtctagatgaatggtgggggtgctcatggggggtgggaagagagcctgggtttaatccctgcaatgatccaggcttcccgtgtgaccttgggcaagtcgcctaacctctctgagcctctcagtttcctcatttgcaaaacggggacaataaaaccactttctggccaggcacggtggctcacgcttgtagtcagcactttgggaggccgaggaaagtggatcacctgaggtcaggagttcaagaccagcctggccaacatggcgaaacctggtctctactaagaagacaaaaattaggccaggcatggtggctcatgcctgtaatcctagcactttgggaggccaaggcggatggatcacttgaggtcaggagttcaaaaccagcctggccaacatggtgaaaccctgtctctactaaaaatacaaaaaataaaaataaaataaataaataaaaaattagccggcgtggtgtcaggcacctgtaatcccagctactggggaggctgaggcgggagaattgctggaacccgggaggtggaggttgcagtgagctgagatcgcgccactgcactccagcctgggtgacagagcgatactccatctcaaaaaaaagaaaaaaaaaaattagggcatggtggcgcgagcatgtagtcccagctacatgggaggctgagtcaggagaatcacttgaaccccggaggcagaggttgcagtgagccgagatcgcactactgcactccagcctgggcaacaaagtgagactctgtctcaaacaaacaaacaaaaaaacccaccttctcatgggttaggatgttgtgccaatgcagtgagacggtgactagaagatgcagtgtttcttaacaaatgagagtattgagtgtccaggcctgtgctgatagccagggttcttaaactcgaagggaaggatgggcacttcttagcaacaagcagtccattgctacttcaaggaagggtatggctcttgggcacaaacctttcaatatttcaagagaagctagcaatcaggaaattgtagatgaaatgtcctgttttagatgttggtgattgactaaccaccaaattggccagcattctggcccgcgggcctccactttgcgcccctcaagcagtggtaaatttttgggaatgatgttgaatgggtcccgaggctcagagtaggggggggttttcaggcgggggcctccctatggccagcaggtgcggtggagggggaagcgctgctgtagaggagaggcccacgggcagctctggccccccccaggtggtagggaactgccggaagctgggcgcccccaaggtcttctacatcgcggcggacatggcctcccctgaggcgcccgagagcgtggtgcagtttgcgctggacaagctgggtgaggggctgggcctgaagcctggagtccgggaccgtggcctaggccttagggacaggaccagaattgggctgtgggtgtggccacagtaacaggtgtctcagggcggagacaaatggggactgggggcgtgggcggggtggagtctcattgcgtctgggggaagagctctgaacggggcctcgttgaatgggaaccaaaccttgctagatccagggtgtaaggccaaggctgggtgtctttgatcgtagtgggagttacctggggcggagctcgctggaccagcgctctgggtggagctaagctcgggggcggggtttgatcgtttccttggggaggggcctccggggctgaccggcgtttctgggccaggcgggctggactacctcgtgctgaaccacatcggcggcgccccggccggcacgcgagcccgcagcccccaggcaactcgctggctcatgcaggtgctccgctcctccgcggccccggcccgcccctctatctcagggaccggtggtccgttcccttcgcggtccgggttctgccttctccagggagggctctccacccg

SEQ ID NO: 20474 - DNA, 2300 bp, Homo sapien
cctcacctgtttggccatgattgatgacgtgactgcttccattttgcagatgaggaaactaaggctcagagaggccacgccacccttgagccacccatggacccctctccatctcctgcctgcgcctttaagtccctgatttattctttccattcattccatctgggaggaacccccccaactcctgccagcttcccctagctggggtctctggtactcttcacacctgcaggggcgtctacactgttcgtctacctggtggcagggtctgagcgggaggaggagggaaagagtgtgttctgagctggacccagcctcttgttcgagaataaaaactcttcttctcttgcatatctgttgttcaaattccttggtaattccaatttgctagcagccagcgggcagcgggagggggtgtgtgtatcaggggccttgactctcaatcccatttcacaggtggggaaatggaggctgagagggccaggagcagtggctcacgcctataatcccagcactttgagaggtcaaggtgggcagatcacttgaggtcaggagtttgagaccagcctggccaacatggtgaaaccctgtctttatttatttatttattagacggagtctcactctatcgcccaggctggagtgcagtggtgcgatctaggctcactgcaacctctgcctccggggttcaagcgattcttgtgcctcagcctcccaaatagttcagattacaggtgtgggtcacaacgcctgactttttgtatttttagtagagacggggttttaccatgtcggccaggctggtctcgaactcctagccttaggtgatccccctgtctcggcctctcaaagtgctgggattacaggtgtcagccactgcacccggccacaaacaaatattttaattaaaaaattagccaggcgtggtggcatgtgcctgtggtcccagctaaggaggctaaggcaggaggatcacttgagccctggaagtcaaggctacaataagctatgattacagcagtgcactctagcctgggcgacagagcaagaccctgtctggaaaaaacatgaaagcgctaaccctaattagagcagccctaaattgagactctcttcttgtatattagtagcattaaaggagaaaaactggaaacttgtgtgtttctgccacccgattcagttatttagcgtcccgtccctacaccacctaaattacatcagatgtccgcaaggggcactattacacgttgctgtattcagacctagtctagagcttgaccaattgataacaaaaccaatacctttttttttaaatggagtttcgctctgtcgcccaggctggagtgcagtggtgcgatctcggctcactgcaacctctgcctcttgggctcaagcaattctcctgcctcagcctcctgcgtagctgggattacaggagcatgccaccacgcctggctatttatttatttatttatttatttatttatttattgagacggagtcttgctctgtcgcccaggctggagtgcagtggcacgatctcggctcactgcaagctctgcctcctgggttcacgccattctcctgcctcggcctcccgagtagctgggactacaggtgcccaccaccacgcctggctaattttttgtatttttagtagagacggggtttcaccgtattaggctggtctcgagctcctgacctcgtgatccacatgcctcgacctcccaaagtgctgagattacaggcgtgagccaccgcgcccggcctaatgggcgttttaacagttcatacagtttggtattattattcccgctctacaagtgaagaaattctgagaggtgatgtcgtcgatgcagggtcggcccgaaataggcggagttgggattcgaactcatttcacaggcagagggaggagagcagccatagccacctccactggttccgactccagctcccgggctcgcaggagtaaacgcgcatgctcagggagctcggtcgcgcatgctcagcgcaacggcggggaagactccagccgccagggggagcgcgtgccgttcttgcctctctggcctgcgcctcctgagccgagtagatatcccggagttccgcgcggcgccagcccttccgccacggccgtctctggagagcagcaggtaagtggtttcccgcactgccggtatccgccgccatccggactcccgggtcctctgtgcaggttggaggatggttggttgtggcgagcgaggctgaaggagccgggacgcggggctctgggcctcgggaactgagccggtact

SEQ ID NO: 20475 - DNA, 2300 bp, Homo sapien
ccctgaggaccgggtccccgtttgggggctgcactgcagcagagcgtgaggccctggccaccgaggcagctccctttgtcccccagggagtcagtgctgcagatgatgcaggctggccagcgggtggtggacaaccccatctacctgagcgacatgggcgccgcgctcaccggggccgagtcccatgagctgcaggacgtcctggaagagaccaatgtgagtgctcgtcacctccacagccccccacgcctggctgcaccccacctccactatgctccgcccacgcccggctgcccccgttcctcctcagctcccccatgcctggctgcccttgtccctccaccgtgcaccatccacacccagctgtgtgtccctggctctgtttttgagatgatttcccgctgcgtgtcttggtccacatccatccgcctttcggtggcttcatagccttcggttgggagtcaccgttgcgggttcagtgggatcctctgggccgtgtacccggggcgttgccagtcttttgctgttgtgagcagcactcctgagcgcgtccccatgcacgcagctggagggcctgtgaagtatccgtaggatgcgtttccagcacgggatttgttggggcagagggcacacatgcctctgtgctgggtacagcatggccaggtcctcccggcagcatctctcagggtgcgcattttcccccaacctcggccctacacacacagatgccgacttctgctcatcctttctgtcctccctgtctcggcagattcctaagcggctgtacaaggccctctccctgctgaagaaggaatttgaactgagcaagctgcagcagcgcctggggcgggaggtgagcccgcggctgaggcgcagccactcttgggggccttcccctcgggccacgtgacatcagtcaggctctggagcacacggagggaccggtggcatcggccagggcaagccaagaaggcctgtctgggttttgagggcttcgtgccatcatctgctctgtcgtcctgggctgtggaactctccgcgttgaacagggaagcttaaagctggtcccagtgtaatgagcccagggtggagcagtctcaggaccgtccaacattaagggaagaattcctttgcctttgtaatcttggggacagtgttggaaattggaaagcagcctgggaaaagtgaagatgctgtttcttaagacccagccattgaggctcgctgtcatgattttcggcagatcacagcctgcctgatggccggtcacctcacggtcgtagcatttttcagaattttttactttaagacagggtctcagtcggccacctaggctggagtgcaatggcgcaatctcagctcactacagcctccacctccagggctcaagtgatcctcccacctcagcctcccgagtagctgggattacaggcgtgcaataccacaccggctaatttttgtattttagtagagacagggtttcaccatgttggccaggctggtcttgaactcctggcctcaagtgatccgcccgcttcagcctcccaaagtgctaggattacaggcgtgagccaccgcgcctggccccatctctacaaaaaattttaaaattagagccaggtgtggcaggtgcctgtggtcccagttactcaggaggctaaggcaggaggatcgcttgagcccaggaggtggaggctacggtgagctatgatggtgcctttgcactccagcctgggtaacacaggtagaccctgtctcaaaaacaaaagaagatggaaggaaccaaaggcttcgtgctctgggtttcgtttcttttctctctgagtcctgggggagcagagggtcccccttcgtctggggacgcacccacccacccagcttcccggagccagggcctgatggcagcacctcaccccacaggtggaggagaagatcaagcagacccaccgtaagtacctgctgcaggagcagctaaagatcatcaagaaggagctgggcctggagaaggacgacaaggatgccatcgaggagaagttccgggagcgcctgaaggagctcgtggtccccaagcacgtcatggatgttgtggacgaggagctgagcaagctgggcctgctggacaaccactcctcggagttcaagtgagtgccaggcccggggcggcccagccctcaggtgacccctcctcagcccccatcttaggcaggccaggggacccagcggggagccccgtggcaccttcttggtgtggcaggtgcgggctgggaggcatccagcgagtatcagccctgttctgggca

SEQ ID NO: 20476 - DNA, 2300 bp, Homo sapien
acagatccttgagatttgtttagaagagtctggagagtgagcgcagaggctgactcactgcgtgaccttgctctgccagttaggagataaccttcccatagatgccactttccacatcagtagtttttttttttaagggaaggggagctgggggagaaggcttttggggccttcctactgtaaaagctcaagttccttacactcactgctttctctctattacatcatcctgctccctccccacccccaaggctcttagtctgaaatgatctaatttctaccaccggaatgacttgttctctacagtattctcagaacttgctacgtggtaggaggtcaagaacacactgaataacccacctcttcccaccctcctaagcctcctgtcccatccatgctctactatttctcgtaattattgccttctaatacaatatcgttactaaacatctttattgcctgtctcatcctgccaaaatgtaagctccaaggcagatttattttttaagagacagggtctcgccatgttgaccaggctggactccaggtttccaacaatccttccacctcagccgccagagtagctgggagtacagcgcgcgccaccatgcccagcttcaaaggcagaaatttttgtctgttttgttcactgccatatccccagaacctagaacactctctggcaaataataagcaatcaagaagtatttgtctaagaaaggaatgaattctgatcccagtgaggctcgtaaccagacggcagagcgcctggggcgaggaggtattacaaaactcgtgccaagtaaggagaaaactaacagcgccgtaacactactcaggtccctcccggccccggatttctatgaccggcgttctaaagtggataatcctaggctcatcgggttcaactcctctcatctaacggatcctaagaaatccgaaagggagaggactttggctcaaggttcccaagctagtggtgagcagacaaggattcgaactgcacccttcgagaaacttcatgtctgaaaaagttgcgaaacacaagggcgctcaagtgatcccacggttcagcccgctgcttgcacaggtgggaaacctgaggccgaggcggggactcccattacctcgataatcttgataaagcgcgggaacaccgggttgcgggtgatggcgatgagcggcaggtgcggaaacacatcggggatcgtcatgggcgtgagcgccgttatgaccgggccttccccggcgcccgcgctgccccccgcgccgccggctccttcctccgcgccgccctcggaggcgtcctcgccccccgagaatgcgcctccgccgcggctgctcgcttcccaaaacccccgccattggcccccaattgccgggcctcggccccacagtgcccaaggaggagaggcgtcgcaggtccgctggcctcggagcaaccacgctcctgctgcagtgggaacccgccccccggcggcggccagcatcggccgccgcagcacccagcaccgcgccgctccccacagtcgcacgtagccagtgctcgccgccatagcccggccatactggcggctcacacaactcgcgtcatttccgctcgccgcgaaacgcacgtgacgcccggcgcgtgcctcggtacccgatgggcgcgtggctcgaaacagccgcttcagggagctgggcctacgcggagaagagggggcggagttcgagcatcggatcgtctccgcctcttccggtctcccactttatgcgctgaaggccttttccggtcacgtggaaggctgtgagcaggcgccagcgcccgtacaaaacactggtagtgttgcaaacgcaacgtttaggaactcatgagcagcctgtgcacatgcttaggcgcgcggacaacatgcgcatgctcagactctagactggccacgggtggccgggtgcgcatactcaggctctgagcgcactttggggtgcgcggattcgggcttcccgggattcgtctgcgcatgctcaagattcaggcggagcgccgggctgcagtgcgcggaggcccgctcccgggactcattgatgcgcatgcgcagggcttcagcctgcacgtactcggattgtgcagcgactccccgtggcggttgaggggcagtggtggcggcggaagcccaagtcgatgctgatgttgatgctggtggcggctgtgaccatgtggctccgaccgctggtcacagctcagctctgtcggtggggctgccaggactcctggggctggggtgctgccgggggtcgggagggtgctggttcatcttgga

SEQ ID NO: 20477 - DNA, 2300 bp, Homo sapien
cccataatcccaactactctggaggctgaggcaggagaattgcttgaacttgggaggcggaggttgcagtgagccgagaccgtgacattgtactccagcctgggcgacgagaacaagactccatctcaaaaaaataaaataagggtatggctgggcatgggtggctcatgcctgtaatcccaacactttgggaggctgaggcaggaggatcactggagcctaggagttcaagaccagcctgggcaaaacagtgagaccccatctctttttttttttttttcctttgagacagagtctccctttgtcacccaggctggagtgcgatctcagctcactgcaacctccacctcctgaattcaagcgatttttctgcctcagcctcccaagtagctgggattacaggcacctgccaccaagcctggctaatttttgtatttttagtagagacgaggtttcatcatgttggccaggctggtctggaactcttgacctcaagtgagtgatctgcccacctctacctctcaaagtgttgggattacaggcgtgagccactgcacccagccagtgagaccccatctgtacaaaaaataataataaataaaataaaataaggttaaggaatcattatgaatcttcctgtaaacatcaaatgaggccatacaccctaagaatacagctcacaggtccctactgaatgtgacagtttagtccagatgggagttccctgagggcaggaacggagtttcagcaactggtccccatggcaggttggagtatgcactaacctaacatttactgaaatttcaaaatgtgctgggtaaggctgggcgcggtggctcacgcctgcaatcccagcactttgggaggcgggggttgcagtgagcagagatcgcgccactgcactccaccctgggaaacagagcaaaaactccggctccaaaaagaaaaagaagtgggagggctaggcccggcgtggtggctcacgcctgtaatcccagcactttgggaggccgaggcaggcgggtcacgaggtcaggagatcgggaccatcctggctaatacggtgaaacccccgtctttactaaaaatacaaaaaaaaattagccgggcgtggtggcaggcgcctgtagtcccagctactcaggaggctgaggcaggagaatggcgtgaatccgggaggcggagcttgcagtgagccgagatcgcgccactgcactgcagcctgggcgacagagcgagactccgtctcaaaaaaaaaaaaaaaaagaggtaggagagcttaatatcgggctgggaggatggggtggagtagggtgagcgaggcgtcaagttcgattcctaaaaagagtaaaaggggagcctcagtgaggttggggagcaggcctcggctccaagatgaaccagcaccctcccgacccccggcagcaccccagccccaggagtcctggcagccccaccgacagagctgagctgtgaccagcggtcggagccacatggtcacagccgccaccagcatcaacatcagcatcgacttgggcttccgccgccaccactgcccctcaaccgccacggggagtcgctgcacaatccgagtacgtgcaggctgaagccctgcgcatgcgcatcaatgagtcccgggagcgggcctccgcgcactgcagcccggcgctccgcctgaatcttgagcatgcgcagacgaatcccgggaagcccgaatccgcgcaccccaaagtgcgctcagagcctgagtatgcgcacccggccacccgtggccagtctagagtctgagcatgcgcatgttgtccgcgcgcctaagcatgtgcacaggctgctcatgagttcctaaacgttgcgtttgcaacactaccagtgttttgtacgggcgctggcgcctgctcacagccttccacgtgaccggaaaaggccttcagcgcataaagtgggagaccggaagaggcggagacgatccgatgctcgaactccgccccctcttctccgcgtaggcccagctccctgaagcggctgtttcgagccacgcgcccatcgggtaccgaggcacgcgccgggcgtcacgtgcgtttcgcggcgagcggaaatgacgcgagttgtgtgagccgccagtatggccgggctatggcggcgagcactggctacgtgcgactgtggggagcggcgcggtgctgggtgctgcggcggccgatgctggccgccgccggggggcgggttcccactgcagcaggagcgtggttgctccgaggccagcggacctgcgacgcctctcctccttgggcactgtgggg

SEQ ID NO: 20478 - DNA, 2300 bp, Homo sapien
cagaactcgagacaaatcctattagtaaatttcactggaaaatgtttctcccacttactaggtatgtgttgttaggcaagtgtgtctttaactttcctaagtatgctttcgtatctataaaataagggtgttggccgggcgcggtggcacacgcctgtaagcccagcacgttgggaggccgaggcaagtgaatcacgaggtcaggagttcgagaccaacctgggcaacatggtggaaccctgtctctactaaaaacacaaaaaattagctgcacgtggtggcaggcgcccataatcccaactactctggaggctgaggcaggagaattgcttgaacttgggaggcggaggttgcagtgagccgagaccgtgacattgtactccagcctgggcgacgagaacaagactccatctcaaaaaaataaaataagggtatggctgggcatgggtggctcatgcctgtaatcccaacactttgggaggctgaggcaggaggatcactggagcctaggagttcaagaccagcctgggcaaaacagtgagaccccatctctttttttttttttttcctttgagacagagtctccctttgtcacccaggctggagtgcgatctcagctcactgcaacctccacctcctgaattcaagcgatttttctgcctcagcctcccaagtagctgggattacaggcacctgccaccaagcctggctaatttttgtatttttagtagagacgaggtttcatcatgttggccaggctggtctggaactcttgacctcaagtgagtgatctgcccacctctacctctcaaagtgttgggattacaggcgtgagccactgcacccagccagtgagaccccatctgtacaaaaaataataataaataaaataaaataaggttaaggaatcattatgaatcttcctgtaaacatcaaatgaggccatacaccctaagaatacagctcacaggtccctactgaatgtgacagtttagtccagatgggagttccctgagggcaggaacggagtttcagcaactggtccccatggcaggttggagtatgcactaacctaacatttactgaaatttcaaaatgtgctgggtaaggctgggcgcggtggctcacgcctgcaatcccagcactttgggaggcgggggttgcagtgagcagagatcgcgccactgcactccaccctgggaaacagagcaaaaactccggctccaaaaagaaaaagaagtgggagggctaggcccggcgtggtggctcacgcctgtaatcccagcactttgggaggccgaggcaggcgggtcacgaggtcaggagatcgggaccatcctggctaatacggtgaaacccccgtctttactaaaaatacaaaaaaaaattagccgggcgtggtggcaggcgcctgtagtcccagctactcaggaggctgaggcaggagaatggcgtgaatccgggaggcggagcttgcagtgagccgagatcgcgccactgcactgcagcctgggcgacagagcgagactccgtctcaaaaaaaaaaaaaaaaagaggtaggagagcttaatatcgggctgggaggatggggtggagtagggtgagcgaggcgtcaagttcgattcctaaaaagagtaaaaggggagcctcagtgaggttggggagcaggcctcggctccaagatgaaccagcaccctcccgacccccggcagcaccccagccccaggagtcctggcagccccaccgacagagctgagctgtgaccagcggtcggagccacatggtcacagccgccaccagcatcaacatcagcatcgacttgggcttccgccgccaccactgcccctcaaccgccacggggagtcgctgcacaatccgagtacgtgcaggctgaagccctgcgcatgcgcatcaatgagtcccgggagcgggcctccgcgcactgcagcccggcgctccgcctgaatcttgagcatgcgcagacgaatcccgggaagcccgaatccgcgcaccccaaagtgcgctcagagcctgagtatgcgcacccggccacccgtggccagtctagagtctgagcatgcgcatgttgtccgcgcgcctaagcatgtgcacaggctgctcatgagttcctaaacgttgcgtttgcaacactaccagtgttttgtacgggcgctggcgcctgctcacagccttccacgtgaccggaaaaggccttcagcgcataaagtgggagaccggaagaggcggagacgatccgatgctcgaactccgccccctcttctccgcgtaggcccagctcc

SEQ ID NO: 20479 - DNA, 2300 bp, Homo sapien
gtagtcccagctactcgggaggctgaggcaggagaatggcgtgaacccgggaggcggagcttgcagtgaaccgagatggcgccactgcactccagcctgggagacagagtgagactccatcaaaaaaaaaaaaaaaaaaaaaaaaaaaaaaaaaaaaatctgcatcatgaaataaaatttaaacctccagaaaaacaattacaatgattagatctcaggaatcattttcttcttagtttgcagaccaatacatctggtcagaagacgtggccctgatgttcaggagcccagggactctggaaatactgaccccactgcgtgacacagcctttccagcttttgatttccagaagtgcctcgtgaatatccaggcgcttctcatggaccctgaactccacgttggaaagtgcaaggtatgtgatcctaactgttttgatcaatgttcaatgtagtttttaaagacaaattcaacctgggcatggtggtgcacgcctgtagccccagttgctcaggaggctgaggctggagggttgtttgaggccaggagttcaagaccagcctgggcaacatacacccatttctaaaacaaaaaaaaatttttttttaaagctgggcgttggccaggtacggtgggagactttggagactgagtctttgggagactgaggcaggtggatcacttgaggtcaggagttccagaccagcctggccaacatggtgacaccccatctctactaaaaatacgaaaattagcttggtgtggtggcgggcgcctgtaatcccacctacttcgagtgctgaggcatgagaatctctttaacctgggaggcagaggttgcaatgagccgagatcacaccactgcactccagcctgggtgacagagcgagacttcgtctcaaataataaataaataaataaataagttgggcatggtggtgtgtactctcagttacttgggaggctgaggtgtggggatcacttgagcccaggagttcgaggctgcagtgagctatgatggagtcactgcactccagcctgggtgacaaaatgagatcctcgtttctaaaacactaatttaaaaaaagagaaattaacaaaataagagacaacaagatagtattcgtcaccaataagagatcaatcacatcacccattgaccactgccaacacgatcaaactcaatctcatgaggcaagcatcaatccagctgcaaatttgccagaaatacaaaagacagaggaatgggttcacctgcaccagggaaatccagattttgagaaatgctgcgggcccaacagcgtggggacttccaaaatccatggaaaggaaaagggggccgggcgtggtggctcattcctgtaatcctaacactttgggaggccgaggcgggcggatcacctgaggtcaggggttcgagagcagcctggccaacatggcgaaaccccgtctctactaaaaatacaaaaattagatgggcgtgctggcacatgcttgtaatcccagctactcaggaggctgaggcaggagaatcgcttgaacctgggaggcagaggttgcagtgagccgaaaccaagccactgcactccagcctgggtgatggagtgagactccatgtcaaaaaaaaaaaaaaaaagtagattttgtagagacaggagtctccctgtgtggtccaggttggtctcaaacccctgaacttaagtgattctctacccctcaggattacaggtgtgagccactaaacccagccaacaaacctgtagattgaaagaggattaaaagacatacctgtgttgggaaacgggcaagactgagtgatgatcttcagatgcatactagggcagctctactctaaagaaacagaaagagggggcgggcgcggtggctcacgcctgtaatcccagcgctttgggaggctaaggtgggtggatcacaaggtcaggagatcgagaccttcctggctaacagtgaaaccccatctctaccaaaaatacaaaaaaaaaattagctgggcgtggtggtgggcgcctatagtctcagctacttgggagactgaggcaggagaatggcatgaaccccggaggcagagcttgcagtgagccgagattacgccactgcaccccaacctgggcgacagagccagactctgtctcaaaaaaaaaaaaagaaacagaaagaggtcaggcgcagtggctcacaactgtaacctcaagcactttgggaggccgagatgggaggatcacttgtgcccaggaatttgggaccagcgtggcaacatagtaagcccttgtctctattaaaa

SEQ ID NO: 20480 - DNA, 2300 bp, Homo sapien
tcacacctctgggctgttcgccttcccacttgggaccccctcgtaccaccctgatgggagccactgggtcagccaaaactcctgaagggctggtgagcagaactccagggtcccacctgcccatgtctccctgagaccccagcctctgtctcctcaggaaatggggacatcttgtcatttgaggatgccaaccgcgccatgcagactggtgtcaccgggatcatgattgcccggtaagtgcccagggatgttagagatccagcttcatgcacagcagcagtgccctgaacccaacacgccgtcacccacccctgttctgtggtgggctgttggtcccaagatgggaggagcagagagcgatgtcaggagttgcagctgcgttgcggcagaggggactggaaattgctgctgctgtgggatctgatgattgtgggttgaaagtcctgggctttggccaggtgtgtggctcacgcctgtaatcccagcactttgggaggccaaggcacgccgatcatttgaggtcggaggttcaagactagcctgaccaacatggtgaaacatctctattaaaaatacaaaaattagccaggtgtagtggtacacgcctgtaatcccaactactagggaggctgaggcaggacaattgcctgaacctgggagacggaggttgaacagtgagccgagatcttaccactgcaccccagcctgggcgacagagccagactccgtctcagaaaaaacaaaagaaagtcctgtgctttgaaggttgtgtgcatgcagctgggaggcttactaggcttgtaggttttgtggtctgggctccggctcaggccaggccatggaagcagaggccacacgatcccaggcaggctggtggctgggcccactgatcgtcacccgtcccacagtggcgccctgctcaagccgtggctcttcacggagatcaaggagcagcggcactgggacatctcgtcgtccgagcgcctggacatcctgcgggacttcaccaactacggcctggagcactggggctcggacacgcagggcgtggagaagacccggcgctttctgctcgagtggctgtccttcctgtgccggtgggcaccggggctggctggggtgggcggcgcgtgggccgcggctggttagagctgactcaagcctgtcctgcccgcccacccgccgcaggtacgtgcccgtggggctgctggagcggctcccacagaggatcaacgagcggccgccctactacctgggccgcgactacctggagacgctgatggccagccagaaggcagccgactggatccgcatcaggtgcctgggtgggctggagttggggagctgcagtcgggggcccggggtcacggagggtactttgcaggtcctgggcctgacctcgctttccacctgctctcccacagcgagatgctccttgggccagtgccccccagcttcgccttcttgccgaagcacaaggccaacgcgtacaagtagcctcaggctttcccaggggcaccctggggcgaggagagtacaataaattttattcttttaaaatccaggcctttctgtgaccctgaagcagcccctcctcggcccccaccttccccaaacctcttagctgcctccatgggccctgccccaagctgggtgctgctggtgcccagagaggccttgacccccaagaaggtagcgggttgaggacccggggggcctcagcctgtgtgggtgtggatcagggcagcctgcctggaggaggcggcctcaaagctgttaggggggtgttgctggaagaggcaaaggcctggcccagaatcctccctcccatggtgatgaccatgtctgccaacgtctgcccctgcttgcccccaacacccagaaccccaaccagtgggcgcgctgcaggctggaacccgctgccccgagtaaccaggcaaacagaaccccaccaggttctcagcctgttctccggttgggccacttgcactcccactgccgccctcctggcctgtctggaccgggccccccgctgccccatgcagcaccccaaaccgttctgtgcccctgcagctccccaggaaggtttcagcccgcagagtctggagggggctgaggtgctgggcaaccagcctgctcccacctgtgccgagcctcctcccgctatgggtacgatcgggtgggtgggagcacctgctggagagggttcaggggcccacccgcctaagggccctacccacctgggcacctttgtccacaggctccttgaacctgtatcatcccccagacccagagaaaga

SEQ ID NO: 20481 - DNA, 2300 bp, Homo sapien
ccgttttgtttactaccacgcccccagcatctagcacagcatctggcatacagatgctcaactaattatttgttgaaactaatgtcctgcataaaagtagtgtaatttactttttttttttttttttgagatggagtcttgctctgtcgcccaggctggagtgaaacggccgatctcggctcaccgtaacctccgcctcccaggttcaagcgattctcctgcgtcagcctcctgagtagctgggattacaggcgcccatcaccatgcctggctaatttttgtatttttagtagagacggggtttcgccatgttggccaggctggtctcgaactcctgacgtgcccacctcggcctcccaaagtgctgggattacaggcgtgagccaccacacccggccttatttatttatttatttagagacagtctcgctctgtccctcaggctggagtgcaatggcgtgatctcagctcactgcaacctccacctcccgggttcaagcgattctcctgcctcagcctcccaagtagctgggattacaggtatgtgccacaacgcccagctaattttttatatttttagtggagacggggtttcaccatgttggccaggctggtctcaaactgctgacctcaagtgatccgcccgcttcggcttcccaaagtgctgggattacaggcgtgagccaccgctcccgacccctaatttacatttttaaaaaccctagcaggggccgggaaccatggctcacgcctgtaatcccaatgcttgggaggccaaagtgggagaatcgcttgagcccaagagttcaagatcagcctgggcaacctggcaagacctcgtctctacaaaaaatttaaaaattatccaggcctattggtgcatgtctgtagacgcagctacttgggaggctgaggtgggaggatagcttgagcccaggacgaggctgcggtgagtcgtgatcgtaccgctgcactccagcctgggcgacagaacgaaaccgtttcaacagaacaacaaagacaaaaacctccaaaacaccctaacagttaaatttcctcagtccagaagctgattgcagtccagttcgcaattggccaggctctagtttatataggacctgaggctccacccatgtgcaggcaccgcccccgtggcgtcacgagcgagcaatggcgtcattggaacgacatgagcatgcgcacttccccagcacaatcagggaagacacgcgtgacccggaaggtcttcccgccacactccagagcggatgtgaggggcgccgatggcggagggaacggcggaggctcctctagagaatggtggtggtggcgactcgggagccggagctttggaacgaggagtggcgcccattaagcgtcagtgagtcgccggggcaggagggaagctgaagggccttttccggcacccatagcgcggtccgagctgtgcatgccgggagattaggcagcggctgagggcgagaagccaccggctcttcattccgggccgttcttccgcctgcagggtggtcagcggaggtacctgagatcgtgcacgttggggcctgtcacatgcgcgaaggacaccacgtgcatgctagggcaggtgggatttgaggccaggcccgcgctgcatactggggattgtagtccctgcatatggacgtacggcgcatgtgctctgccagcggccgttactggcgggtcttggggttgaagcgagtgccgcggggcgtgctggggcctgcggtgtttgaagggccgaaaggcgtgctgggaaatgtggtggcttagactccgcttcaaggcatgctgggaattgtagtttttcgcagcctaacgtgcgcagggacgttcttgactgaacctgataatagtttcgcgcaacactttggacagtgaggacccagggacaaaataggtcttttttgaggccgtgaggggctcccaggctgggagctggctggttcttaagtagtgagctccccatcagcagaaggatttaaggacgtgcaagtgtttctagcctcctttccccagtgtttattgactatgttcggagggttttcctttccctttctgtcggcagatacctcaccaccaaggagcagtttcaccaattcctggaagccaaagggcaggagaagacttgccgggaaaccgaggtaggagaccctgctggcaatgagctggctgagcctgaggctaagcggatccgactggaggatggacagacggcggacgggcagacggaggaggcagcagagcccggggagcagctacagactcagaagagggcc

SEQ ID NO: 20482 - DNA, 2300 bp, Homo sapien
cttccccaggaagccttcccttgccagcctgttaacaactgcaactgcagcagtgagctataattgcgccactgtactccagcctgggcaacagagcaagattctgtctcaaaaaataaataaataagtctatttttaaaaataaataagtaaataaataaatttaaataaataaataaactctgtctctcaaaaacaattaaaatgtggctgggtgcggtgactcacactcaaggcaggtggatcacttgaggccaggagtttaagaccagcctggccaacatgatgaaaccccatctgtactaaaaatacaaaatttagccaggcatagtagtgggcgtctgtaatcccagctacctgggaggcagagaaaggagaatcgcttgaaccggaaaggtggaggttgcagtgagccgagatcgcgccactgcactgcagcctgggtgacagagcgagacttcctcttaaaaaaaaaaaaaagaaaaaaattccaacagccaagggtggcattcccaatccaccttactgctttattacctactcacttacggtttaatttacttatgtacagttgacccgcgaacaacgcgggtttgaattgcatccatccacttataagtggccttcgaaaaataaaatacagttggccatccgtatccgcgggttctttaacccctaccaaatgcggaggcaggatgggaaacctgcggatacaaagggcggatttttcctatacagggattctgttgggcaactgggggacgagtatacgcggattttggtatatgcggtcttggaaccaatctccaaaattccgaggagtattatgtttttcgtctgtgtttccgactcccaagttagctcttaaaggtaatgatttctccgttttgtttactaccacgcccccagcatctagcacagcatctggcatacagatgctcaactaattatttgttgaaactaatgtcctgcataaaagtagtgtaatttactttttttttttttttttgagatggagtcttgctctgtcgcccaggctggagtgaaacggccgatctcggctcaccgtaacctccgcctcccaggttcaagcgattctcctgcgtcagcctcctgagtagctgggattacaggcgcccatcaccatgcctggctaatttttgtatttttagtagagacggggtttcgccatgttggccaggctggtctcgaactcctgacgtgcccacctcggcctcccaaagtgctgggattacaggcgtgagccaccacacccggccttatttatttatttatttagagacagtctcgctctgtccctcaggctggagtgcaatggcgtgatctcagctcactgcaacctccacctcccgggttcaagcgattctcctgcctcagcctcccaagtagctgggattacaggtatgtgccacaacgcccagctaattttttatatttttagtggagacggggtttcaccatgttggccaggctggtctcaaactgctgacctcaagtgatccgcccgcttcggcttcccaaagtgctgggattacaggcgtgagccaccgctcccgacccctaatttacatttttaaaaaccctagcaggggccgggaaccatggctcacgcctgtaatcccaatgcttgggaggccaaagtgggagaatcgcttgagcccaagagttcaagatcagcctgggcaacctggcaagacctcgtctctacaaaaaatttaaaaattatccaggcctattggtgcatgtctgtagacgcagctacttgggaggctgaggtgggaggatagcttgagcccaggacgaggctgcggtgagtcgtgatcgtaccgctgcactccagcctgggcgacagaacgaaaccgtttcaacagaacaacaaagacaaaaacctccaaaacaccctaacagttaaatttcctcagtccagaagctgattgcagtccagttcgcaattggccaggctctagtttatataggacctgaggctccacccatgtgcaggcaccgcccccgtggcgtcacgagcgagcaatggcgtcattggaacgacatgagcatgcgcacttccccagcacaatcagggaagacacgcgtgacccggaaggtcttcccgccacactccagagcggatgtgaggggcgccgatggcggagggaacggcggaggctcctctagagaatggtggtggtggcgactcgggagccggagctttggaacgaggagtggcgcccattaagcgtcagtgagtcgccggggcaggagggaagctgaagggcctt

SEQ ID NO: 20483 - DNA, 2300 bp, Homo sapien
agaatcgacttcccctgcaaattcactctcatcagatccccaggctggtctaggatttgtttagatgccctcacgttggggaactcattccttactaagaataaccaccaccaataccaaacagtctcaagtaccaccaatagtgctgagttctcagggtgactacagcatctgctcccaagcccagcccagcccatatggtgtgtgctgtgtcaaagaacctgggttcaaatcccatgtccttttctaacccttggacaagcccctacccattttgtgcctcggtttccctagctgtaaaatggagatagtagtgcctctcttgtgggctcagcaccaggcctgttacacagctggtgcttaataaatgtgtcctgttacttaaggtctgatatgtgtagctcctgtcgtcgccgtccatgggggtgagtggggtggggaaggggtggtttgagtttctgcacatcaggacacgaggcgcggtccatgcaaatgaaatgcaaatcccatgcaaataaatctctgggtggtgcagggcagcgtgcaaggctggaggtacaaggtgcacgcatttggggggcgcctgggaaccccatgagccgagcccaggcccggaggtgctgacccgcatccagcccggctttcagtgctcggtgtaaatgtttacacctggccggccgccaggctccacgccgccccacactaggcagccgggagggggaatgtaaactcgggctgggggccgcgggacgctcgggaggagcccagacggcgtcgagtgtggtgggcgtgtacacgtgagttattaaacaccgactgtatgcagtgaggaggatgccaccaggcactcacagcaccaagtaactggtgcccgaatgggtaaagctcagggcattcctgggggcccactagcgcccctgcaccagccagaggttgaagtgaatagggtaggcagccatggaaggctccctggaggaggcaccctccaagctgagattgcaaggggagtgagagctaggtacagtgactcacgcctgtaatcccagctctttgggaggccaaagtggaaggatagcttgagcccaggagtttgagaccagcctgggcaacgttgtgagattcccctctctattaaacaaaaacaaaaacaaaaaaaattaaaaattagccaggcacggtggctcatgcctgtagtcagtcctagctacttgggaggctgaggtgggaggatcgcttgagcctaggaggtggaggctgcagtgagctgtgatcacaccactgcactccagcctgggtgacagagcaagaccctgtctcaaaaaaaaagaaagagagagagagaaagaaagaaaggaaagaaaggaagagaaaaagaaagagagaagaaagaaagaaaaaggaaagaaagaaagagaaagagagagaggaggctgggtgcggtggctcatgcctgtaatcccagcactttgggaggccaaggtgggcggatcacttgagttcaggagcttgagaccagcatagctaacagggagaaaccctgtctctattaaaaatacaaaaattagccagtcatgctggcaggtgcctgtaatcccagctactcggggggctgaggcaggagaatcgcttgaacccgggaggcagaggttgcagtgagctgagattgcgccactgcactccagcctgagggacaagagtgagactccatctccaaaagaaaaaaagaaaaagagaaagaaaggggagtgggagtggggagggagggaagaagtgttctccatgcaaggacctatctgtgcaaaagcccagagctgggactccatgtccagggcagctctggtccattgctgcccacttctgggcctgcttatccatctggatgggaaacaggctcagagaggggcagagtcaatggaggacaccagcatgtagggaacagtgtcagccccagattcctgcctccagactgtcctaaacaccaccctccccgcgcctttgtcccacactgccacctgccgggaatgacctctcctcctttcactcttccccctggctcctcagctgcagccgctccggcctccttgctgttcctgggatacgccacactcagtctggcctcggggcctttgcactggctgtgtcccctgcctgtgatgccattctcctctgcctggccaactcctacgtttattcaagtctggaccttgtcatcggctcctcaggaaggcactccgggacccccagatgggggcggttccctgtgactcctggcacggaggccaaccccttccttgttcaat

SEQ ID NO: 20484 - DNA, 2300 bp, Homo sapien
aatggcgtgaacccaggaggcagagcttgccatgagccgagatcgtgccactgcactccagcctgggccacagagcgagactctgtctcaaaaaaaaaaaagaaaaaaaacccagctgggcggagtggctcatgcctggcctctaatcccagtactttaggaggctgaggcagacagatcacctgaagtcaggaggtcaagatcagcctggctaacatggcgaaaaccagctctattaaaaaaatacgaaagttacccagtgccgtgtcacgcgcctgtagtcccagctactcgggaggctggggcatgagaatcgcttgagcccgggaggcataggttacagtaaactgagactgtgccactgcactccagcccgagtgacagagcaagattccatctcaaaaaaaagagagagataggggtatctctgttttccctaggctggtctcagactcctgggctcaagcgatcttcctgcctctccttcccaaactgttgggattacaggtgtgagtcactgtgcatggcctcagaagtcttttttttttttttttttttttttgagacagagtcttgcactgtcgcccaggctggagtgcagtggctcaatctaggctcactgcaagctccgcctcccgggttcacaccattctcctgcctcagcctcccaagtagctgggactacaggcacccactaccacgcctggctaatttttttgtatttttagtagagacagggtttcaccatgttagtcaggatggatggtcttgatcttctgatctcgtgatctgcccacctcggcctcccaaagtgttgggattacaggcgtgagccaccacgcccggcccccagaagtcatttttttaataagttacagtcaacctcaccagtcaaggaatgagacatgagtggaattaggttgccacttctggagctctgggagaccccaaccccctggcccatccctacctcccagaacctcactggtctgggcgtggctgggcactgagatagtagaactcaggcagcatgatgcagcctcccagaaatgatttctagaacagggcagtcgtgatacttggaggctgggctttgagctcggtcacctttgcacccagcttgggagtgagagagtttaaggtcatcctccctcaaaaccagtattccagatcatttctctccattccaggaagtttgcatagctccctggacttctgctttgcactgccctgcaggagtgggtggggaaaggaagtggctttgaggcacacagaggggcttgttgaggccaccggaggaagcttctgccaccaatatgggacctgtgcccagcctaccagaagagagcatctgaaaacatgtatcgacatggtaacccctctgcttgaagcctcacatggctccctattgccttggtgctgaacaccctatggctgaccgtggcccagcctctgcaacagctctgcctcctctccagtggtgaagacccagcctgctgagactcctcctgcagttcctcaacatgcctgcatttctgctgcctcagggcctttgcgaaggttgttccttgtaactggaatgcccttccatcccttttttattcaaaaggctgcaattttaattgaagaaagttcccttccaaggttcatgagttgcctgacttgcccaccggtttcctgcaagatcccttggcctggcacttagtgctcaggaaatatttggtgatgggccaactgagtgagaaggtgggatctggtgggaaggaaagcggaaaggtagaaattctgctcacttcctcattcccacctcccaaggaacccctggtgtccctgtggaacccgctttgggaaccggtggttcaggtcagccttttcactttgtactcaaagccacatcgcattgaagccacaggtggggcaaggtcatgcatgacctgagtctccaaatcccttcaccctgtttggttctgcaacggggattaggggagccccacgatttgttttcaaaggatgtccgggctccaggacaggatgccctgggtcacctgatgacaggtgtggtggttggaaagggcctggtttcagctccgggtacacttcctccttccttctgctgcgtggtgtggcctcttccacgtcctcagaatccagctgttactccgtccgcggcctctcagctctagggccctctgcacactggcccccccaggtaaggcctcttgtcccactttcacccccaacccggatcgcatgggtccagggaaaggcctcctggctccgagcctcctcccctcagcctc

SEQ ID NO: 20485 - DNA, 2300 bp, Homo sapien
tcagagtgaagagctccctttcccaacttctctttctctgcctctggaatttcctctgaggcttagagggacatggaaaccctccctgggtcccacgagggcagaggcccagccacctggccgatgttggggggctctggcctgccccctctggaaccccagcactgccctcaaacccccattgcctccctgtatgccccggatctcacatgtggttcatggcacgcccagcccgtggggccttctccctcctcctgggcaccagctgcccttggctcccagccctgggccccagggggagaaaaatttccagcaggctggcagctccatctcccacccagccctggccagggaaggcactggagggtccaatgagggccaagaccccaacgaggtgcacagatggcctaactgcccctgcaagcctcaagcaggtcctagcttgccctgagcctgagggaagaggtcctcatgataccctactctgggctctgggctcagctccttggcagggaggtcccacctggcactggtatggtgagccctgctcagagaggaccaggaaacctctcaagtcacacagcagtttcaggatgagcacacgttctctctggcaccatccctgaggtcagcccaaggtcctccaccctccctttgcccagcgatcacatcgatggaatgactagagccctactgtccctcactagagacctacctttggattttgaatccttaagaaacaacccagctgggggcggggcgtggtggctcacgcctgtaatcccagcactttgggaggccgaggcgggcggatcacaaggtcaggagatcgagaccatcctggctaacatgtctctactaaaaatacaaaaaaaaaaaaaaaaattagctgggcgtgatggcggacgcctgtagtcccagctacttggggcaggagaatggcgtgaacccaggaggcagagcttgccatgagccgagatcgtgccactgcactccagcctgggccacagagcgagactctgtctcaaaaaaaaaaaagaaaaaaaacccagctgggcggagtggctcatgcctggcctctaatcccagtactttaggaggctgaggcagacagatcacctgaagtcaggaggtcaagatcagcctggctaacatggcgaaaaccagctctattaaaaaaatacgaaagttacccagtgccgtgtcacgcgcctgtagtcccagctactcgggaggctggggcatgagaatcgcttgagcccgggaggcataggttacagtaaactgagactgtgccactgcactccagcccgagtgacagagcaagattccatctcaaaaaaaagagagagataggggtatctctgttttccctaggctggtctcagactcctgggctcaagcgatcttcctgcctctccttcccaaactgttgggattacaggtgtgagtcactgtgcatggcctcagaagtcttttttttttttttttttttttttgagacagagtcttgcactgtcgcccaggctggagtgcagtggctcaatctaggctcactgcaagctccgcctcccgggttcacaccattctcctgcctcagcctcccaagtagctgggactacaggcacccactaccacgcctggctaatttttttgtatttttagtagagacagggtttcaccatgttagtcaggatggatggtcttgatcttctgatctcgtgatctgcccacctcggcctcccaaagtgttgggattacaggcgtgagccaccacgcccggcccccagaagtcatttttttaataagttacagtcaacctcaccagtcaaggaatgagacatgagtggaattaggttgccacttctggagctctgggagaccccaaccccctggcccatccctacctcccagaacctcactggtctgggcgtggctgggcactgagatagtagaactcaggcagcatgatgcagcctcccagaaatgatttctagaacagggcagtcgtgatacttggaggctgggctttgagctcggtcacctttgcacccagcttgggagtgagagagtttaaggtcatcctccctcaaaaccagtattccagatcatttctctccattccaggaagtttgcatagctccctggacttctgctttgcactgccctgcaggagtgggtggggaaaggaagtggctttgaggcacacagaggggcttgttgaggccaccggaggaagcttctgccaccaatatgggacctgtgcccagcctaccagaagagagcatctgaaaacatgt

SEQ ID NO: 20486 - DNA, 2300 bp, Homo sapien
aaaatacaaaaattagctgggtgtggtggtgcacacctgtagtcccagctacttgggaggctgaggcacgagaatcacttgaacccaggaggcggaggttgcagtgagccaagatgacaccactgcattccagcctgggtgacagagggagattgtgtctcaaaaataaataaataaataatagccgggtttggtggctcatgcctgtaatcccagcactttgggaggctgaggcaggtggatcacttgaggtcaggagtttgagaccagcctggccaacatggtgaaaccctgtttctaccaaaaatacaaaaataagccgagtgtggtggctcatgcctgtaatcccagctgctcgggaggctgaggcatgagaatcacttgaacctgggaggcagaggttgcagtaagctgagatcatgccactgcactccagcctgggtgacagagcaagattccatctcaaaaataaataaataaataatttttttaaaaaaagaccagcctgggcaacatggcaaaatcccaactctactaaaaatacaaaaatttgccgggcaaggtggcatgcgcctgtagtcccagctacttgggggaattgctttagtctggaagtttgaggctgcagcaagctgtgatcatgccacttaaccccagcctgggtgatggagcaagaccttgtcttaaaaaaataaaataaaaggctgggctcggtggctcacacctgtaatcccagcactttgggaggctgaggtgggcagatcccaaggtcaggagatcgagaccatcctggctaacatggtaaaaccccgtctctactaaaaatacaaaaaattagccaagcgtgatggcgggcgcctgttgtcccagctactactggggaggctgaggcaggagaatggcgtgaacccgggaggcggagcttgcagtgagccgagatagtgccactgcattccagactgggggacagagcgagactccatctcaaaataaataaataaataaataaataaataaataaacataaggtaatacacgaaaaacttttgacttacacaccttaaatggattcactgtatgggttgcgaattatatcccgatgaaactgttttcaaatgacatggtggttgcctgctttctctgttggaccgaactggtctaagccttgcagtgtcgagcggagctccctgtaggtcacctgagtgtgacgaaaagggatcccgacgccaagacctaagttcacaccaaggttctggaaagagactcaaaacacaggccctcaggggacagcctgagcccagagtgggagggaagttgaactttgaccaattactgctttgcacccttgggctctggggcctcaggcacgaggtaaatttttataatgtaactgatattaagatggaattacgtcagccctggatatatggcagcctctcctaggagacaatgaagtctttgtcagtgaccttcaggagggtagattgggggaaacaggtgattggtgggggcgattttcaggcctctgagcccaagctaagccatcatatcccctacgaccggctcatatacgttcaaatggcctgaagcaactgaagatctacaaaagaagtgaaaatagccttagctgatgacattccaccattgtgatctgtttctgccccaccctaactgatcaatatactttgtaatctcccccacccttaagaaggttctttgtaggccgggcacggtggcccaagcctgtaatcctagctctttgggaggccgaggcgggcagatcacgaggtcagaagatcaagaccatcctggctaacacggtgaaaccctgtctctactaaaaatacaaaaaaaaattagctgggcgtagtggcgggcgcctgtggtcccagctactccggaggctgaggcaggagaatggcttgaactcgggaggcggagcttgcagtgagccgagaaagagccactgcactccagcctgggcgacagagccagactccgtctcaaaaaaaaaaaaaaaaaggttctttgtaattctccccacccttgagaatgtactttgtgagatccacccctgcccacagaacattgctcctaactccaccgcctatcccaaaacctataagaaccaatgataatcccactaccctttgatgactctctttttggactcagcccgcctgcacccaggtgaaataaacagcctcgttgctcacacaaagcctgtttggtggtctcttcacacggacgcatgagacatttggtgccgaagacccgggtcagcgggactccttcgggac

SEQ ID NO: 20487 - DNA, 2300 bp, Homo sapien
cgtcaggcacctcagaccatttgcccattttatgacaagaattatttagatcttgtaggatggaaaaattgaaagtgccattttttggctatttggaaccactgtctggtttgtattggggtcaagcggcattgcagaagaaaataagacatttaggttttaggtcaggcgagagttgaagaggttttaagttcttgagaacacaggctaagggagaggaaggaggaatggagggtggaaggttgcccatagtgaagtaggcaagtttaaagagaagggtagagacacggagagaaggggtgggggatgcttatcccccaggaaagtggagaagggatgggaggtgcttgccccccaggaaaatggaaacggggtggggggtgcttgcccctcaggaaagtagagaaggggtagagacacggagagaaggggtaaggtgagcagccaaagcaggcgtccctgcaattgacttgccaccaagggatgtgggtgaatgaccaaggcaggtgtccccgcggagatcagacacaaatggaatgtgggtgaataatcaggcagtcgtccccacaatgattaaacaccaagggaaggctgccttcccaagtccgtgaccggcgccagagttttgggtccacggataaaatgtgtctcctttgtctataccagaaaatgaaaggaatttaaattaagagaagggagagattgaaggatggtgccaagattgaaaggagaaagaggttgagggatagtgagagaggttggagaaggagtaaaagaggccacttacccaatttaaaatcagtgagatgttccttgggctggttggtctgcggacctgaggttgtaggtggatctcttcagggagtgaaggtgaggacaggggactgctgtcccgaaggagtcccgctgacccgggtcttcggcaccaaatgtctcatgcgtccgtgtgaagagaccaccaaacaggctttgtgtgagcaacgaggctgtttatttcacctgggtgcaggcgggctgagtccaaaaagagagtcatcaaagggtagtgggattatcattggttcttataggttttgggataggcggtggagttaggagcaatgttctgtgggcaggggtggatctcacaaagtacattctcaagggtggggagaattacaaagaacctttttttttttttttttgagacggagtctggctctgtcgcccaggctggagtgcagtggctctttctcggctcactgcaagctccgcctcccgagttcaagccattctcctgcctcagcctccggagtagctgggaccacaggcgcccgccactacgcccagctaatttttttttgtatttttagtagagacagggtttcaccgtgttagccaggatggtcttgatcttctgacctcgtgatctgcccgcctcggcctcccaaagagctaggattacaggcttgggccaccgtgcccggcctacaaagaaccttcttaagggtgggggagattacaaagtatattgatcagttagggtggggcagaaacagatcacaatggtggaatgtcatcagctaaggctattttcacttcttttgtagatcttcagttgcttcaggccatttgaacgtatatgagccggtcgtaggggatatgatggcttagcttgggctcagaggcctgaaaatcgcccccaccaatcacctgtttcccccaatctaccctcctgaaggtcactgacaaagacttcattgtctcctaggagaggctgccatatatccagggctgacgtaattccatcttaatatcagttacattataaaaatttacctcgtgcctgaggccccagagcccaagggtgcaaagcagtaattggtcaaagttcaacttccctcccactctgggctcaggctgtcccctgagggcctgtgttttgagtctctttccagaaccttggtgtgaacttaggtcttggcgtcgggatcccttttcgtcacactcaggtgacctacagggagctccgctcgacactgcaaggcttagaccagttcggtccaacagagaaagcaggcaaccaccatgtcatttgaaaacagtttcatcgggatataattcgcaacccatacagtgaatccatttaaggtgtgtaagtcaaaagtttttcgtgtattaccttatgtttatttatttatttatttatttatttatttattttgagatggagtctcgctctgtcccccagtctggaatgcagtggcactatctcggctcactgcaagctccgcctcccgggttcacgccattctcctgcc

SEQ ID NO: 20488 - DNA, 2300 bp, Homo sapien
ggcatggcggctcacacctgtaatcccagcactttgggaggccaaggtgggcggatcacaaggtcaggagatcgagaccatcctggctaacacagtgaaaccccgtctctactaaaaataaaaaaaattagctgggcatggtggcgggcgcctgtagtcccagctactcaggaggctgaggcaggagaatggcgtgaacccgggaggcggagcttgcagtgagccgagatcgcgccactgcactccagcctgggtgacagagcgagactccgtctcaaaaaaaaaaaaaagaatgcctggacgtcaggcacctcggaccatttgcccatgtttcaacaaaaatcatctaggtcttgtaaagtggagaaatcaaaagtgccgttttctggccatttggaaccgttgtcgagtttgtattggggcctagcagtattgcaaaataaggcagttaggtttttaggtcaggtgtgagttgaacaggttttaagttcttgagaacacaggctaagggagaagggggaatggagggcggaaggttgcccgtagaaaggtagagacacggagaagtggggctttggggggtgagcagccaaagcaggtgtccccgcaattgacttgccaccaagggaatgtgggtgatgagcaaggcaggcgtcccccgcggtgatcagacaccaatggaatgtgggtgaatgatcagggcaggcgtccctgcagtgattaaacaccaagggaagaccgtctttccaagtccgtgaccagcgccggagttttgggttcacggataaaatgtgtctcctttgtctctactacagaggaaaaataactggaattggaaggacagggagattgaagcgtagcgagagaggctggagaagagagtgaaaagactgcttaccccatttgaaattggtgagatgttccttcggctggttggtctgaggacctgaggttgcaggtggatctcctcacggagtgagggcgaggacaggagaccggtctcccaaaggagtcctcctgtcctgggtcttcggcaccaaatgtcacactcgcccgtgtgaagagagtctaccaaacaggcttcgtgtgagcaataaagctttttaatcacctgggtgcaggcgggctgagtccgaaaagagagttagcaaagggtggtgggattatcattagttcttataggtttgggataggcagtggagttaggagcaattttttgcgggcaggtggtagatcttacaaagtacattctcaagggtgaggagaatattacaaagtatcttcttaagggctggagggggagaatattacaaagtgccttcttaagggcagggaggaggatattacaaagcaccttctcaagggtgacgagggtatattgtacaaagtatgttcacaagggcgggggaatatcacaaagtacattattgcaagggggtggtgtattgtcacaaagtcaattgatcagttagggtgaggcaggaacaaatcgcaatggtggaatgtcatcagttaaggcaggaactggctattttcactttttttctggatcttcagttgcttcaggccatctggatgtacacgtgcaggtcacaggggagatggtggcttagcttgggctcagaggcctgaagaattgttcccttacaaaagtcatgtattgtctgattcacccacttgctccctgcactctccctgggtctggtatgcaataggtgcataagcaatgtttgttgattgactgactgaatgggtgggatggttaaaattctgctcacttctctccctttaccatctcccgagaaacccatggggcccccgtgggacccactttgagaatcaaagctttagaccagcgttttcactttatggatggaccagctgtgcacccaaagccaggcagccttcaggctacagatggagcccgggtcacgtcccgggcctccaagttcctgcacccttatccggtctcacaggcgagattaggacaccccggaaactggcttccagacaatatccctgctgcaggggagaacaccctaggtcacctggtgacaggtgtgtgctgcaatgtacacgtacttgttcctcctcttctctgttcccacttcctccccgccccaggaaacctgccatggcctcctggtgagctgtcctcatccactgctcgctgcctctccaggtaagttatcccattctaccttttccccccacccagaatgcctgggagacctcccaggaaaggcttcctggctccgtccctcctcccctcggcccccatcctatgggccctgattcat

SEQ ID NO: 20489 - DNA, 2300 bp, Homo sapien
gccaagatagtgccactgcactccagcctgggcaacagagcgagactccgtcttaaaaataaaaattaacctgtgcctgaggctctagagtccaatggtacaaagcagtaattggtcaaagttcaacctccctcccactctgggctcggactgtgccctgagggcttgtgttttgaatctctttccagaaccttggcatgagcttgggactgggtgtctggatcacttcatcacacccaggtcacctgctgcaaggttaagaccaacttggcccaacagagaaagctggcaaccctacatcattttaaaacagcttcatcggctgggcgtggtggcttatgcctgtaatcccagcactttgggaggccaaggcgggtggatcactttaggtcaggagttcgagaccagcctggctaacgtggtgaaaccccgtctctactaaaaatacaaaaattagctgggcattgtggtgtgtgtctgtaatcccagctacttgagaggctaaggcaggagaatcacttgaacgcagaggtggaggttgcagtgaactgagattgtgccactgcactccagcctgggcaacagagcaagactcagtctcaaaaataaataaacggtttcatcaggatgtaattcacataccatacagtgagccaacttaaggtgtacaagtaaataagtcaatggtttttggtgtgttacctttttttttttttgagacggagtctcactctgtcgcccaggctggagtgcagtggtgctatctcagctcactgcaagctccgcctcccgggttcacaccattctcctgcctcagcctctcaagtagctgggactacaggcgcccgccaccacgcctggctaatttctttttgtatttttagtagaggtggggtttcaccatgttagtcaggatggtctcaatctcctgacctggtgatccgcccgccttggcctcccaaagtgctgggattacaggtgtgagccaccgcgcccagccaccttatttttaaattgtaattccatatatccatacatatatgtataacataaacttcaccatttaggctttttttttttttttatgagagagagttttgctcttgttgctcactgcagcctctgcctcctgggttgaagtgagtcttctgcctcagcctcttgagtagctgggattacaggtgtgcaccaccatgcccagctaatttttatatttttagtagagacggggtttcaccatgttggccaggcttgtctcgaactcctgacctcaggtgatcctcccgcctcagcctcccaaagtgctgggatgacaggcgtgagccaccgcacctggcgcatttaggcatttttaagcatacaattcagtggcatcgcgtgcagtgttgtgcaaccatcactccagcatctttccaaaactttcatcaccccaaacagaaactctggacccgttaaacaaacattctcccctctccagcctccagtcacctctgttctacttcctgtctctgtggatcggctcgtcctggacatttcccagaaatgggatcacacactgtgtggcattttgtgtctggcttctgtcattgaatgtgatgtcctcagccttcatccacgctgtggcctgtgtgggagcctcgctccttttcttttttttgagacagagtcttgccctgttgcccaggctggagtgcagtggcgcaatcttggttcactataagctctgcctcccgggttcaagcaattctcctgcctcagcctcccaagtagctgggattacaggcatgtgccaccatgccggctcttttttttatatctttagtagagacaggttttctctttttttttgagacggagcctcactctgtcacccaggctggagtgcagtggcacaatctcggcccactgccagttccgcctcctgggttcacaccattctcctgcctcagcttcccaagtagctgggactactggcgcccaccaccatgcccagctaatttttttgtattttccatagagactgggtttcaccgtgttagccaggatggtcttgatctcctgacctcgtgatctacctgcctcggcctcccaaagtgctgggattacagacatgagccacctcgcccagccttttcatggctgagtgatattccattgtgtggatggatcacactaggtatatttgttcttctattgatggacatctgggtagtttctacctttgggctgtttgttctgttgtgagtcaggctgctgtgaccatgggtgtacaagtatctgtttgcgtccttttgttgtta

SEQ ID NO: 20490 - DNA, 2300 bp, Homo sapien
cgagatgggcggatggcctgagaccaggagttccagatcagtctggccaacacggtgaaaccccgtctctactaaaaatacaaaataattagccaggcgcggtggcgtgagcccgtaatcccagctacttgggaggctgaggcaagggaattgctcgaaccagggacgtgaaggttgcagtgagccgagatctcgccactgcagtccagcccgggcgacagagcaaggctctgtctcaaaaaaaaaaaaaaaaaaggagaatgccagggcttgcgggtccccttcattcccctgcaaggctaccctcatagtagctcctgatccacctcacctaggacctctctggcggtcccagtaaaagcttcaggtgtccctaaccacccagcaccccctgaccacagaaagacctcatcccaccccaaaactttctcaaacatctgtaccgccctcagatgccccaatcatgactcatgatcccctctaacaatctctaccccgttggaaagtctcgtggtcccttagctccttggacctgataatagccctgtctcactccacaatttccccgagcctggcgatagcttgggaccgcctcagatgaccccagggactagcttgtcgcatgtcacgacctcccagtgctccccaaccctgctggaccccctaccaacatccatttcacacaagatccccccctacgaccgcccaagacaccccgatgacaaccacgtgcgtacccgcgagactcccagacccgttcgatccaaacagcccccagtaaccccacgacctccctgcggcctcggccctccaccctcggggcccggccggcgctcaccagcgacgctggcaatactggtggtgctgtaggctttgcggtggcaatcggtgccatcggggatatcccagtactgacgaaaaaccttcggcgccatagcccgcaatctcgatcccgcaccacggaccccgccagctcgggaagcgcaagggcagccgcggctggctatcgcgagacttctcgggctgcgcgcgcaacctttcgggctagcgggccggcaacaagtgagcaactttattgataggcgcggacatggacatggatcgcgcgcacgcgccggggaccggcctggaggaagagagtagcacgtgcatccccaggccgattcctagagggtgaaactgaggacgactgcgatcagtgcagacagatttcgctagtcccagctcagggagtcctaggttagggactactagaggcggggactatctactaggggaggggccgggctcagactgggacgggcgggactccagttgataggagcaagacatgacgaaacaatgactggggggcggggcatggcggggatgtggccacacccagtgtcagaatctgcatagcgagtggtcatgccctgtggtcagtcaccaagctggagtctgagcagcgtgctactgttttgggccgtggacaggatcaggggcggggattatcgggaaagtgaccaatgacaatacgagaagctcagcgggacgtggcctctgttcaccccgcggctgtcccacgccctaggccggatgaagtacacaggcgcttgacttgggggcgtggctagaattggaggcataacctaaaagggacttgaccaatctgagactgtataagggatgaaggggcgaggccgtgcctggatctacccctgacaggccacaggttcggggggcgtggtcaggcttgctgtttcgcggagtccgggccaatcctggtgttagcttccaagtagggaggggacagtatcgaaggtgtgaccaatcttgtttccagagcctgagttgcgcgagccgccaaaggatgtggccagcctgggggcgtggctgtcaagatcttgtccaatcctagagtgagcccaaactcaggggcggagtttcatgatcccggaaccggtggtagtgtttgggtttgaggagagcacgacccagccctctggggtggggtctagcggggtcagcgaccaatcgcgccgaggtctagtggggcggggccctcccgggggcggggcctgtgccagttccgggccgcctgggggcgtggccgggcctgtacagcagcctgggccatgtcggcgccgccggccctgcagatccgggaggcaaacgcacacctggcagccgtgcaccggcgcgcagcggagctggaggcgcggctggacgcggcggagcgcacggtgcacgcccaagccgagcgcctggccctccacgaccagcagctgcgcgccgccctagacgaactgggtcgcgcc

SEQ ID NO: 20491 - DNA, 2300 bp, Homo sapien
gcacgcctgtaatcccagctacttgagaggctgaggagggagggtgagactgcagtgagtcgagatcgcaccactgcattccagcctgggcaacagagcaagaccctctctcaaaaataatagataggcatggtggcttagcctgtaatcccagcactttggaagggtgaggtgggaggactgcttgagcccaggagttcaagaccaaactgggcaacagggcaaaactgtctctacaaaaaaatacaaaaaataagccatgcgtggtggtggacgcctgtagtcccagctgcttgggagactgaggtgggagaatcacctgagctccggaggtcgaggtgcactccagcctgggcataggagtgaggccctgcctcaaaaataataaatttaggccgggtgcggtggctcacccctgtaatcccagcacttttaggaggctgaggcgggcggatcacctgaggtcaggagttagagaccagcctgcacaacgtgacgaaaaccagtctctactagaaatacaaaaaatcgaccgggcgtggtggcgggcgcctgtaatcccagctacacgggaggctgaggcaggagaatcgcttgaatctgggaggtggaggttgcagtgagctgagatcacgccactgcactccagcctaggcgacaagagcgaaactccgtctcaaaaaaataataataaattttaaaagttaaaatgctgatatgatcccctcctcccctgctgaagagcctgctatggctcccaatgcctacgctgggcggtctgtggtccctgcgtcgctcagcacctgtgggaaagtgggcctgtttgaagttagaggtccacacctgtgtcacttctcgcaactttacatactgattactaattcgagttttttggtgtttttatcaatccgatactcagtctagcgtctatacaagtgcacacggttccccctgcccttcctcgctttccagcctcggctctgcctccgcctaccgcctcggtgaagtccacctggccggccccgggcctcaccggtccttggcgcgacccagttcgtctagggcggcgcgcagctgctggtcgtggagggccaggcgctcggcttgggcgtgcaccgtgcgctccgccgcgtccagccgcgcctccagctccgctgcgcgccggtgcacggctgccaggtgtgcgtttgcctcccggatctgcagggccggcggcgccgacatggcccaggctgctgtacaggcccggccacgcccccaggcggcccggaactggcacaggccccgcccccgggagggccccgccccactagacctcggcgcgattggtcgctgaccccgctagaccccaccccagagggctgggtcgtgctctcctcaaacccaaacactaccaccggttccgggatcatgaaactccgcccctgagtttgggctcactctaggattggacaagatcttgacagccacgcccccaggctggccacatcctttggcggctcgcgcaactcaggctctggaaacaagattggtcacaccttcgatactgtcccctccctacttggaagctaacaccaggattggcccggactccgcgaaacagcaagcctgaccacgccccccgaacctgtggcctgtcaggggtagatccaggcacggcctcgccccttcatcccttatacagtctcagattggtcaagtcccttttaggttatgcctccaattctagccacgcccccaagtcaagcgcctgtgtacttcatccggcctagggcgtgggacagccgcggggtgaacagaggccacgtcccgctgagcttctcgtattgtcattggtcactttcccgataatccccgcccctgatcctgtccacggcccaaaacagtagcacgctgctcagactccagcttggtgactgaccacagggcatgaccactcgctatgcagattctgacactgggtgtggccacatccccgccatgccccgccccccagtcattgtttcgtcatgtcttgctcctatcaactggagtcccgcccgtcccagtctgagcccggcccctcccctagtagatagtccccgcctctagtagtccctaacctaggactccctgagctgggactagcgaaatctgtctgcactgatcgcagtcgtcctcagtttcaccctctaggaatcggcctggggatgcacgtgctactctcttcctccaggccggtccccggcgcgtgcgcgcgatccatgtccatgtccgcgcctatcaataaagttgctcacttgttgccggcccgctagccc

SEQ ID NO: 20492 - DNA, 2300 bp, Homo sapien
tcaaaaagttttcaaataggcccacaggccaggtgcagacgtttaacccagacagaagtgttcttgtttgtttttaagctttgaatcagtcacccttgctaaaaacctggcaatgcaaacacaaagatctggatttctggcaagacttggccaagcttgcctggagttcagggcaccctctttagccagggtgtgagtttctgttttttgtttttttttttttaagacagagtcccactctgtcgccctggctggggtgcagtggtgcgattttggctaactgcaacctccgcctcccaggttcaagcgattctcctgtctcatccttcagagtagctgggattacaggcgcccaccaccacacccggatattttatatttttggtagagaccggggaggggagggggtttcaccatgttgaccaggctggtctcaaactcctgaccttaggtgatccacccgcctcggccttcgaaagtgctgcagttataggtgtaagccaccgcgcccggccctagcctagcttttgtagcatgcaactgtctcctttttatacgccctaaagaatatatttttgaactccttgtttctgcgctgtccttcttagcccaggacattcagggtgctttgcttgttgtcaaaccagggaaaggagaaaactcctgtgcctttctgggccagcctgtcaccctggcctggtcggcagccattcccctacctcctcactcaggaactgtcacaccaggaaccggcgaggggcacagcctgtttcagaccagaaaggtcggaggccacccacggccttcaggatggcgcccgcctgcctgcctggcaacagtgacccctcagtgcagtaacaatgggcccattttctcctctggatgaacaaggaggggggttgtttgtacaaaggaaaggcaggctggggcctgtctgtgctcaagaataaaccggatgatttcctggcctgggggcaagagggaggccctctgtgttatttgtgcctcctggtagggtcctgctgggccaggtagaatctagggagtgtaggccaagcactctctacagcgattgcatctaatcttcgagtttccctgtagacacaggctttgtcctcattttacagctgtggaaagtgaggcccaggccgggcgcggtgtctcacgcctgtaatcccagcactttgggatgcgggtggatcacctgaggtcaggagttcgagaccaccctggccaacatggtgaaaccccgtctctactaaaaatactaaaattagccgggcttggtggcgggtgcctgtaatcccagctactgaacccgggaggcggaggttgcagtgagtggagattgcaccactgcactccagcctgggagacagagtgagactcagtctcaaagaaaacaacaacaacaacaacaacaacaacaacaacaacaaacagaggcccagaggtgtgaagggaacacactccgggtctggagggccagggccacttccaattctgggggaagttattgctgaaattctgttttctttctttctttcttttttttttaaagagacaaagtctcactgttgcccaggctggagtgcaatggtgtgatcacaactcactgcagcctcaaaatcctggtcttggctgggccagtggctcacacctataatctcagcactttgggaggccaaggcaggtggatcacctgaggccaggagttcaagaccagcctgaccaacatggtgaaactccgtctctactaaaaacacaaaaattaaccgggtgtggtggcgcgtgcctgtaatcccagatactcgggaggttgaggcaggagaatcacttgaacccgggagatggaggctgtagtgagccgagattgtaccactgcactccagcttgggcgacagagggagactccgtctcaaaaaaaaatcctgggatcaagctatcatgctacctcagcctgccaagtagctgggaccatgggcatatgccaccatgcctggctgcgtttttgcattttttctagagataaggtctcattacattgcccaggctggtcttgaactcctggcctcaagtgatcctcccgcattggcctcccaagaaattcttactaaacatttacaaatgagatgccaaaacagcacttcagtaatagtggttatattttatagttctctacacagaaaaaaaaatgctgcttgtaacactcatagacatgaaagtatttctctgcctatttaaataattctggattgcagtgagccaccaggattttggcagccagatgtcaccatgat

SEQ ID NO: 20493 - DNA, 2300 bp, Homo sapien
cctcagcctctggagtaggtgggattacaggcacccgccaccatacctggctaattttctttttttttttttgagacaaagtcttgctcttgtcccccagtctggagtgcaatggcacgatctcggctcactgcaacctccgcttcccaggttcatgcaattctcctgcctcagcctcccgagtagctgggattacaggcacataccaccacgcccagctagtttttcgtattttaagtagagacagggtttcaccatgttggccaggctggtctcaaactcctgacctcaggtgatctgtctgcctcggcctcccaaagtgctgtgattacaggcatgagccaccgcacccggctgactaatttttgtatttatagtagagacagggtttcaccatgttggccaggctggtctcgaactgctgacctcatgatctgcccgcctcggcctcccaaagtgctgggattacaggcgtgagccaccgtgcccggccagtttatttacttatttttaagaggcgggcgtcttgctctgtaacccaggctggagtgcagtggtgcgatcatagctcactgcagcctccaactcccgggctcaagtgatcctcctgcctcagccttccaagtaggtgggattacaggaacacaccaccatgcctggctaattttttgtagtttttgtagagatgggggggtctcactatgttgcacaggcgggtctcaaactcctgggctcaagtgatcttcctgccctggcttcccaaagtgttgggattacaggcatgagccaccgcgctcaggcaaggcaacttctgacaatataattgtgctgtgagcgaggtaaagccaggcttggagaaggctccgattgatgatccttgggtcggggcgaacagtgggtcctcaaacagggcccacgtttcaagtcctggaaaacccacctatcttagcgggcaggtatatccgatgtctccgttgaaggccttcagtgaggtggcttcgtctcttgaggtttatgtccaggatcagggctgctcttccactcggggtcacaacctctggctcaccaccttgtcaggagccagcccactaagtcacgtttcaggcctgaaaaccaacaacaaaagatccgtaaagacagaaatcctgggactggctcctaacaacggccagtgacaagctttgtggcagtgagcagaggtgtccctcaggctcagctcagtctctgtgggttgcaggacctgcccttggaggtgggcctgggtgggaggtcttagggccccaggacctgggccacctggggctttttttttttttttctttttgagatggagtcttgctctgtcgcccagactggagtgcagtggtgcaatcttggctcactgcaagctccacctcctgggttcaagcgattctcctgcctcagcttcctaagtagctcggattacaggcgcccaccatcatgcacggctaatttttgtatttttagtagaggcggggtttcaccatgttggtcaggctggtctcaaactcctcaccttgtgatctgcccacctcggcctcccaaagtgctgggattacaggcatgagccaccgcgcccagcccacctggggcatttttgttgctgtacaatagaaacaagttctctatatgttccccaggctggtccaaactcctgggctcaagtgatcctcccacctagacctcccaaagtgctgggatttcaggcatgagccgcagtggccggtcagaacctggggcccttttgaactttgattcctcagcaattttgtcagccctggctcgggctgagaagcccctgtgaagccagagagggaaagggacctgtccagggtcacacaggaatcatgcgtcaagcctccccagccacggacttgtctccatccagggcatttcagcccctgcagggcagtggcctgcccctcctccttggagccaggaagggatgcagtgccacagggatctggctctgtcccaggccctgtggggctggcagttgagtaagcagtcaggctgggcgcacccatccctcccccactccccactgcccagcacagtgcattcatgcagctgggccccaccccatctccagaggcaccttccactagcaacagtctccccaggcacaacacagctaacacaaggccccgcaggcaggactctgggacagacgcaggccaggtgagcatctgaacaaggggcagtcggccagggtgggcttgcgggagtccccaccttgacctctctcccttccagctgcccagagcccagaccaagca

SEQ ID NO: 20494 - DNA, 2300 bp, Homo sapien
gagcaggagcaggaggccaagatgcccgcgcctgagcctggggcagccccatccaacgaggaggacgacagcgacgatgacgatgtcctggctccttcaggggccaccgcagctggtgagtcgggtggtccctaccctgggggggatagaaagagctgcccgccatccttgatccagtgctgatctcctggcgggggtggccagacctgggaagtgcgggctccatcctgatgcggggctgctgcttccctgcaggtgctggtgacgaaggggacgggcagacgaccgggagcacatagcggccgggagcccggctgcacaccaggctgctgctttgtccgtctatccacccgcccacccgcccccaccccaccggcagcgtccaggtgcggggccgggaaccacacaccccactgggccggccacagtctggacccgcacgtcctgttcaaaagcagactcgggaactgcctgaatgtggtttgggacacgagacctcatcatattgatgagcgaacaaacaagaacatttcctccctcccctcctttgaattgaaatggcacattaagacttgtcacggcttctcactgggactggagacctcgttccttcaccccgcgtgtcgccagcctctgggtccagccagagcccctggcttctccgccacccacacccttcccaccctgctgtggggccctgcctttgtggggagcagccagccctctgcccctgcccagggctccccaactataggcctgggacccccgcccagcttggggggctgctcgtacgagtgtagacactgggcccattggacgtgctgttaactactatcttcatttcccacttcccctctctgattgggggtgtatattttacatctttttttctttttattttcgaaggctttgttttggtttcttaggttaagatgctctcgagcgttgagcaggcacagctctgtcgaggtccctgtcccccacctgtggttctggcctctgaggttgggggactacttgtttcccaccccaggttcctccaggccaagtcatggggtgatgaggagttggggccctgtctgtcctaggcctggagagtgcctgtctgggaaaaggtcactggacctggaagggtccccagggtcccctgactcccgtctccatctgtcacgtggttcaccatcatcaggcaccaggcgcaaactgcttcccgctgttggccatcccttccccagccacaggtgtccctgcccccaggacagtccagggccaggggcttctgtgagaggcagagggggaccctcaccaaatcttggtggaagagcccaggggctggtcccagaacaggcagtctcacaagcacgcagcacactggagtggacgcctgtgcccacccgagcctggagcatggccaagagccagcttgcaccacccacctgggaggccgaggaggaggtcccctgggcacagggcctctttgggacttcagaggaaatctcccagtcccactctcggagggttaagagaaggcctcctgcagctgtgccgtccacacctctaggtcgccagagccctggcccccagcccccagcaagcctgagcccgggaagaaccagaggccctcccgagagacccagtcacacgtctctgctttaagccttagccagctagtgacgagtacaacgagataacgcccatgtgttttggaacatttatgtaagattgtcatatgaaatgtatttgggaactacattaaacttttaactaaaaccctggcctctgcatgccccaggggcctcaggaagcccctgaccaggaacggcctccacctccccgggcgaggacctccagcagcctggggcctcatgctcccacccagcgtgtcaccagtgctggggtccagccacagccctgttctctccaccaccacccgcactttacccccacccctgctgcaaggccccgccggtctgcccccgcccagagctcccagcctcgggccgctcaccagaatgtagatactgggcccgctggacatgttacctgctatttttattccccatttgccatcttctgattgggggttgatgttttacagatttttttttcaaaggctttatttcagtttctgaggttaggatgcccctgtgcccctcgctccacacctgggcaggtctaaacttccttccaggatggcctccacacacagcctcccacctggggtcacctggcttcctgggggacccgcaagggaggggcagggagcagcagtccgggtgcggggatcgggggacctcggc

SEQ ID NO: 20495 - DNA, 2300 bp, Homo sapien
ttccttcggaaaaggaacatctggcggctcacccccgcatcctgcaggatctggctctcctgagtttgtttttttatgaccagtctgttacgggagaggcaccagctctgctaacacaggctgccagaagcccctggggctggactccctcatacaactattatagtaagaagggttgctgcaatcctcttgctgcccaggcacagcggcgcctccggggcacagcgggagaggggtcttccttggcctgctgaatcttgatttggagtctgaaaatttgggctgacaaggtgttttgggttttgttgtcatcgttttagtgtacaattgagtggttttagtacatccacagagttgtgcgaccatcacgtgattaattttagaacatttccatcatcccaaaaagaaacctcatccctgttagtcacagcctgcccccaaccccctcccttgagccctggtaaccgctcagctcctttctgcttagtctggcatttcacagaaatgcaatcagacagcatgagggggtgtttttcttttgatttacacctttaatttcttccaacaatgtttttgttttgtttgagacaaggtctcactctgtcgcccaggctggagtgcagtggtacagtcgtaactcaactgtaacctcaagctcccaggctcaagtgatcttcccacctctgcctcctgagtagctgggactacaggcatgtaccaccatgcctggctaagtttttaattttttgtagagttagggtcttgcagtgttgcccaggctgatctcaaactcttgggctcatgcagtcctcctgcctcagcctcccaaagcactgggattacaggcatgagccactgcacccggccctaacattgttttatagttttatcttgtgaaatgtattcccaagtattttattccttttggtgttattgtaaatggaattattttcttaattttgcttttgggtcattcactgctagtgttagaaacacaatcgatttttgtatattgatcttgtgtcctgtagcttgacaagggggtgaagcttagcacaaacgcagggctacctccaggagccataatgccacagtctctgtgccttgcccaggaacaggcttgcctgcctgagtcacaggccttttatgacaatccttcctgttgtggatcagattagaccaccatccccactccctgtatgggcacagttgccaagacacacagatgaaggggtccatgtggacaggtggctgggcgaggctgggctctcgagccatcccaggagctcgtgggcattcacctttccctctagttttgtgaatttgtcagcccggactctggcccagggggagctggcctcctccacggtggccaggagtgccccctcactgagacgggaagctccgcaggcacatctggaaaggggaggcaggctcactgtgtgccacctttgaccttttcatcacaaaaacctgtctcacttcccagacatctgtagtggtgccaaggttcttcctggccacagccgcatcctctgacagacaagccttctaggaaagggaagtggggcctgagcgcctgtgttccgtggctccctgacattctccagagccaggtacagggccgctgagcagctcggctcctgagcctgcagcaggtcatagacagctgggagggcggctgacgccccacctgcccccatggtcagcagctggcccaagagccatcgttcctcctgcccttgtctctcccctcctccaggcgccttccaggcctgctgatcggacgagacttctgttgtaatttggaaatgttctccctggttctccaggcccgaagtcactgaggccaagaccatagtcctctcctgcccttgccccccaggcccagccccagcccaggcaggcctgctgttgatattttgtcttgtgcttttagaggaaaggagcagtggcttccggttgaagccaccaacgctgatccacggccaagcccccagcgcaggtaggtcgtctacctccctggggcggggggtggctctctgacgtttttcagacctctgctaggccacaccagggcaccgcgggctcagcctgctttctagaaagatcacttgtaacttgacccacgagccctggaaagttcctttaaagagaggctgtctgagcagggaggttgggacccctgactgtgagcgtcgtgtgttcagaaaagtgggcagtggtggcacgggagcaggctaggcggggtgcatcgggcgggctccatgcccagcagtagcgcacttggttcagcctgt

SEQ ID NO: 20496 - DNA, 2300 bp, Homo sapien
accaaggtctgaaatcactccgtgcggtactgcgatctcactgactcaggtgtagccctgctcccggccctccgcggacagagctggggacacacctttgtccacatgatctcttactctctgcctgcctgcctgcctgcatgtggagatgacggacagagctggggacacacctttgtccacatgatctcttactttctgcctgcctgcctgcatgtggagatgacgccaggggcacgtgggtgcctcccttggtatattcctccctcttctggcactaagaaaccggcaccctctgtcctctgtgcatcaggcatcactccctgcccaccgcatggctgagcctcctccccaccctgcaccagcgccgtccacgcacagaccccagctccagccaggctgccttctcagcatttgatgcacacagtctcattcccatcccttccctggttaaatcggggctccctggggggcaagcatggcttcccacagacatcacttggggctctctgaggcaggcgaaaagcaccctcagacagggagcctgccagcttcccaggagggcaaaggctgccggcgggaggggtcctcttcctctctggagtgatgcgcatccctcagagactggtgcagcatcctctacaggcccacaccctttgggtatgtggcaggcgtcgggctctggccatgattcagcagcttgtgttgcgacctgtgttgcagaagaaaatttctggaaggaatgagaagagaccacccttgttttcgtggagcagggcctgtgacagggacctccagattttggctacccctggagcacgccttgtctgtctgcagctctggagagggccacgctctgggcctagcactagtggcaggtcggtggcagggattatccaagtctcctgcttccgcttggcagctcgggccagcccccaggctcccctcagcgttagcgccagcgctgcacggagcggagtgtggaagggcagtagtcagtctgtgaccaaaacatcagcgtggagagccagcttgaagagcttgctaaaaactatctaaattgtgaatttgaccttttaaaaatgtatctaaattgccagtcgtcttctgcatagctccgtgctttggaaatgtaattgagtgtttccttcggaaaaggaacatctggcggctcacccccgcatcctgcaggatctggctctcctgagtttgtttttttatgaccagtctgttacgggagaggcaccagctctgctaacacaggctgccagaagcccctggggctggactccctcatacaactattatagtaagaagggttgctgcaatcctcttgctgcccaggcacagcggcgcctccggggcacagcgggagaggggtcttccttggcctgctgaatcttgatttggagtctgaaaatttgggctgacaaggtgttttgggttttgttgtcatcgttttagtgtacaattgagtggttttagtacatccacagagttgtgcgaccatcacgtgattaattttagaacatttccatcatcccaaaaagaaacctcatccctgttagtcacagcctgcccccaaccccctcccttgagccctggtaaccgctcagctcctttctgcttagtctggcatttcacagaaatgcaatcagacagcatgagggggtgtttttcttttgatttacacctttaatttcttccaacaatgtttttgttttgtttgagacaaggtctcactctgtcgcccaggctggagtgcagtggtacagtcgtaactcaactgtaacctcaagctcccaggctcaagtgatcttcccacctctgcctcctgagtagctgggactacaggcatgtaccaccatgcctggctaagtttttaattttttgtagagttagggtcttgcagtgttgcccaggctgatctcaaactcttgggctcatgcagtcctcctgcctcagcctcccaaagcactgggattacaggcatgagccactgcacccggccctaacattgttttatagttttatcttgtgaaatgtattcccaagtattttattccttttggtgttattgtaaatggaattattttcttaattttgcttttgggtcattcactgctagtgttagaaacacaatcgatttttgtatattgatcttgtgtcctgtagcttgacaagggggtgaagcttagcacaaacgcagggctacctccaggagccataatgccacagtctctgtgccttgcccaggaacaggcttgcctgcctgagtcacaggccttttatgacaatcc

SEQ ID NO: 20497 - DNA, 2300 bp, Homo sapien
tcggcaggcgcggtggctcatgcctgtaatcccagcactttgggaagccaaggtgggcagagcacctgaggtcagaagttcgagagcagcctggccaacatggtgaaaccctgtctccacaaaaaaacacaaaaactagctgggtatagtagtacacagctgtaatgccagctactcagaaggctgaggcaggagaatcacttcaacccgggaggcggaggttgtagtgagtcgaaattgtaccactgcactccagcgtgggcaacagagttagattccaaaataaataaaagaaagggaagggaaggaaagggagggagggaacaaggggagggagggaggaaccatttttagctcatagactatatctggcccacagattgtagtactcctcgctctcttttagatcatactcaaaaaggtgcagagctgggactccaacctaggtaagacctgaaacacaaggtcccaggcagagagacgaccaagtgcaaagacccttaggttggaatgagcttgtgctccaaggatggaaagacccacgcggctgaacagcaatgagcaagggggaacaaagcagggcatgggagccaagttcaggggacttcataaacctgaatacaaggtttaggatattccaagttcagctgagagccctctggaagcactgagtggccttgatatttccattttcagtctatgtgtatatatatatatatacacacacacacatatatatgcacacgtgtatgtatatatctgtgtgtatatatatagataaaaacaaagtatatatgtgtatatatatgggggaggttcttgctgtgtccctaggatggtggcagtggcactgtcacagctcactgcagcctcaacctcctgggctcaagtgatcctcctgcctcagcctcccaagtagctgggaccacaggcttgcaccaccacatccgggtaatttttgtgtttttgtagagatggggtcttgctctgttgcctaggctggttttgaactgagctcaagcgatcctcccaccttggcctcccgcagtgctgggattccaggggtgagctaccgcgtctggctgattatatttttcaaagactcctcagcctgcggccatgtgcagaaccaagcctggggcttcaaaagaatgcagcaaaggatagcagagaggccgctgtccaagtcttccatgagatagatacggacgatgtggcctagggtggtgacagcctgggggtgacaatgggtggctctgggctgtattttggaggcaaggccaagtccgaaggatttgctgagagattcatagcaggtgagtagagaacaactccagggtgtccaggaccctcccatgagccttgtgagtgaggctgatggtcccattttacagatgggtaacctggaggcgcgcggttcccctcccatgagcttgtgaagttgattctcgtagctccgaggggtcgagtccctcgcgccggctccccccgcccccaacgccagcacctgggtcccagggctgcgccccctcctagagcctgaccacgacccccgcccccgccgatgagctctgatttaccccccaatcccaagcaccccgcgccctctcgccacttcccccgtggtttcaggaaagcgtttgccgaaggtaccggctcctaaggcgggtaaactgaggtaggaggcaacgcgtctcccgcccgcgcgtgtgggaagcccccgcaggcccggcgatttacctggaggaaggcctcggctgcggcgccctgaactgctcactgtcccaccgcgggggaaccccggaaaacgagtgggaaaacgagtgcttcaagacccgcctcgggccgcgcggtgccgcctcactaaaccttagtcgctgccactgcgcatgcgcccttcccggccctttccccgccctctcagtcggcgggaaaaggaggcgggagatggctcgtgcgcaggtgcgtgctaggagcgcggctcgtcagggcaggctgctctgcagggcaggcgatccggggctcgcctccgcgcggcattcagcgcgcaggcgcgagctggccgcctcacacggagtcggcttgttaagtgcgcacgcgcgggagtttctggcagaaagcaggcgagcctgggccggcgcggggccttgtgggagggcttaaggaagtaaaatggcggacctggcgaacgaaggtaggggaggcgccgttggggaccggctggcggccggggaacgggcggcgggaggactaggggccacaagcccttggggggagcaccgcagagtgcaagggtttcg

SEQ ID NO: 20498 - DNA, 2300 bp, Homo sapien
tgaccccaacccatagctgcagtgagacgcagtatgacagtatgaccactggcaggggagggacagcgtggacagtgagggacagggggaaacacggaggcgccgggagcaacatggagggaggggacccatcgaggctcagggatggggagcaaaaccccagccccactgttgggcaaaagtcccgcagcccggctctctgctcgctcccgtggctgagtgagcccacctgggccaggccacagctcacctgtcccccctccctccacagtgacgaagaccccgagggcgccgtcctgcccaaggacaagcttatctccctgtgtcagtgcgaccccatcctcaggtggatgaggagctgcgaccacatcctctaccaggcgctggtggagattctcatccccgacgtgctgaggccggtccccagtaagtgacccacggccccgcccggcgctgctccatcctctcttcctgcctcctctgtcctttcttacatgtacgtcttcagccacctcagaccatcgctttcacagaaaacccaaaagtggccgggcgcggtggctcatgccagtgatccccacactatgggaggctgaggcagacaaatcgctgagcccaggagtttgagaccagcctgggcagcatagtgagaccctgtctctaaaaaaaaaaaaaaaaatttatctggggccaggcaaggttgctcacgtctgtaatcccagcactttgggaggctgaggcgggcagatcatttgaggtcaggagtttgagaccagtgtgaccaacatgctgaaaaccatctctactaaaaatacaaagatttagccgggcatggtggcacacgcctgtagtcccagctactagggaggccgagccaggagaatagctttaacccaggaggaagaggttgcagtgagccgagatcacaccactgcactcagcttgactctgtctcaaaaaaaaaaaaaaaaaaaaaatgagctgggcatggtggtgtgtgcctgtagccctagctactctggaggctgaagcagaaggatcacttgagcccaggagtttgagaccagcctgggcaacatagtgagaccccatttctaaaaaaaatacaaaaattagctggtgtggtgttgcatgcctgcagtccagcgacccaggaggctgaggcaggaggatcacctgagcccaagaggtcgaggctgcagtaagctatgatcgcaccactgcactccagcctgggcaacagagcaagaccctgtctcaaaaaaaatccctaagtgagagccgctgtgggccgtagaatgtgtcccctctggcatgcgttatttgtccttgtctctgactcgaggggaaggtcacagtggctctggtgagctctacctgctgtcaggacacagccaagagtagctgggctgggctcggtgctttctagaaggttcactgggggcatgcaggccggcctctgggagtagcctgtgtgcagccctggagccgtcactgtgcgggaggccttggcccagggccatgtggggttgctgcgcaccctggtcttgcagacgaccaccagccaccttcctccagcctcccttaagccccactgtgacacatcctgagtgccacccctgtaggaggggcagggacataaactcagaagaagaagctgggacatggccctggactcctgcagcctgttagggtagaggctgacctttaacccccagccagaccccacttcccagcaccgtgggattccaggagacatttacaccccagcgccccaccctgtgatttcccacaggacttggtggggtggggagagagtgacaggcacagtgaggaaggaagctaggcccacggcagagatcactcgtgcccttggagacctcccagggcctccagctcctgaggcaatgacagcacccaccacgagggagccctcgggccaggcccgtgccaagctccccaaaaccctgggggtcgtcaaggaagctgggcacagaggcctctcttcataaatcacagcatcaggaccacaggccatgccccgcagtccatccacaaacatccgggcccatggaccgtgcccctcaggccatccacaaatatgcatgcccgttagtaccaggcagctctccgtcctgttgagtaaactctatgctccctttgctggaagatgggaaacagcaaaagtattgcatttctcatttggcctggccttgcctgtctgcctgaaaactgttcagggcaatgcctcgtctgagtttctatgttatggtgggagtttggggtatctttccttttgc

SEQ ID NO: 20499 - DNA, 2300 bp, Homo sapien
ggactcctattgtgtgtttgttggtaagcttggtggtgtcccacaagtttcttaggctcagctcatttttcttcattcttttttctttccgctcctcagactgggtaatctcaattgacccatcttcaagttccctgattctttcttctgcctgctcaaatctgctgttgaacctcccctagtgaagttttcattccagctattatactttcaactccagaaattttatttggttcctttttacaatttctgtctccttattgatattctactggtgaaacatcactctcatgtgtttttttgttgttttgttttgtttttgttttgatatggaatctcactctgtcacccaggttggagtgcagtggcgtgatctcagttcactacaaaccccgcctcccaggctcaacagttctcaggcctcagcctttcaagtagctggaattacagacgcccaccaccacgcctagctaatttttgtatttttagtagagacagggtttcaccatgttggccaggctggtccctgaactcctgactttaagtgatccacccaactcaccctcccaaagtgctgggattacaggtgtgagccaccacacccagcctgtcatggttttttatagtgctttgtacatgatttcctttagctctttaagtatattttatatagttgatttaaactctttgtttcataagtccagtggctcgattttctcagagatagtcctatttatttatttctacatatgggccatactttctttttttttttttgcgtgcctcataatttttgtggaaaactggatattttgaatagtttaacatggtgacgctgaatattggattcttctgttctccccagggtttgctgttgctgcttataggtgttgttgatcgtttgtttcatgacctttctgaactaattttgtaaaatctgcatttttttttttttttgagacagtctcactctgttggccaggctggagtgcaatggtgtgatcttggctcactgcaatctctgcttcccggattcaagcgatccttctgcctcagcctccccagaagctgggattacaggcatgtgccaccacacccacctaattttttttggtatttttagtagagacagggtttcaccatgttagccaggctggtcttgaactcctggcctcaagcaatccacatgcctcagcctcccgaagtgctgggattataggcgtgagccaccgtgcccggccaaaatctctattcagttaccttagtggtcagctagtgatctgacgaaaatttccttaaatgccaagtttcatcttttttttttttaattaagggttcacctgtttgccataatcttttaattcatttccagagttctgataaagtcgattctgacaatttttgcccattttttgactgcttttgtgaagggatgggttctagagttccttactctgccattgtcatggatgtcagctcaagattaatggattttaatgtaactgaggatgaaaagctcgttgatatggtttcagattccacattgcagctaacctttaagaaattaccagctgtcaagtgttgctatagtatcaagtaaaaatatccccagttatctgaaaaggctattaaaacagtgctccttttccaactatatatctgtgtgaggccaagttttttcaatgtacttcaactaaaacagtatacaataacagatggagatacagaagtagatgtgtagagttgtcttctgtaagtcacgcactctacagatttgtgaagatgcggaatcattccactcttcttttggttttgttgtttttttttttaatttggaaagtgtacctattcttcaagtgttaacctataatgggtttattattttttaatgaattaatacatctttttaaaaattatctattttgatttctaataagggaaataatacatttaacttttaaaaacaaaagcaggcagggtgtggtagcttatgcctgtaatcccagaactttgggaggccgaggtgggcggatcacttgaggccaggagttcaagaccagcttggccaacgtagagaaatcccgtctctgctaaaaaatacaaaaattagctgggtgtggtggcacatgcctataatcccagctactcaggaggctgaggcatgagaatcacttgagcctaggaggcagaggtggccctgagccgagatcacatcactgcactccagcctgggaaacagagtaagactctggctcaagaaaaagataagtaaataaagctctttttcaggggtgggtggt

SEQ ID NO: 20500 - DNA, 2300 bp, Homo sapien
gcccgcctcagcctcccaaagtgctgggattacaggcgtgagccaccacgcccagcctagatgagttagaattcttaagattttgttcaaaatagaatctagcacctgaatgaacatattctttaaaattcgcagagagagaattttcacattcaggctttctctgctcctggatttctaccgtggaatgaaataagccataaagaagacagaaatacaaagcgaatggcaccggccacatgaaacaggctggaggctcatcacagtgtgcagaggtccactgtggccgtgtgaccacctcgatctggaatctaaaagttaggagcacagcaaaaagaaatgattatggttttaaaacacacaattcagggccaggcatggtggcacatgcctgtaatcccagcactttgggaggccaaggtgggtggatcacctgaggtcaggagtttgagaccagtctgagtaacatggtgaaaccctgtgtctactaaatacaaaaaataataataataataaattagccgagcattgtggcacatgcttgtaatcccagctactcgggaagctgaggcaggagaatcgcttgaacccaggaggcagaggttatagtgagccgagatcgtgccatcgcacttcagcctgggcgacaagagcaaaaatccgtcccaaaaaacacaaaaaaacaaaaacaaaaaaacacaattccgcaaaaacaaaaaggcagacagtgaagcggtttatttgatgtagtgtgtatggtcagacatctttagcttttatttcttgcacatatggcagtggggagggcgtcttggaagcccatctgaggtgaggatcagacgccgtcgccctgccagcagttgtggcctaattgatatgtttccgtgcccacttgaaattgtccaagaggagtcagccctcaggtcttcctgccaagcccctctctcaggctctcccaggcctaggtggactctgccttcctctgcagcagccaccatggacaggtctcagtgccactcacggccaccatgtgtgtcccaggtttcatcactgtggtccctctctgaggacttgccaggaccctgtgaattctccaagcacacggcgcccagctcacctggaatcagaatgcccttgcgctggcatccttattagcaccatcttcatccttagctccactcctgcaacacaggggatggcgtgtcctcacccatcacccctcgtgatgtatatatggcagtcactgctacctgtgacattcagggttcatgccgggaaatcacagcactgcagccaatgactccgaaagccccagctctcaataaacacacaaaacactcctgttcctccctcgactcgagttcactttgacccttcccattttgatagctttgtgtggccaatcggtactcccagaaaaatagcaaagccacactgtgcagatttgacttaggaggctggagagcagtggggtcagagagcgagggacccagacacagggcacctggactcgagtattctgtagccagaggcagcacttgagccctctggcttcattaacctcatcagaaaatggaaacaagtccgggttatactgcagaagcgaggggcgccacagagtgctctcccacgcagtggtgcggatggctatccagagggccccagcagtcccctctgtactagggacgatcagtgtcaccttgctgcagactacagacccacagaggcaaagctgcctgggcgggtgaaggtgcatgtgcttccgtgtatgtgtgtgtgcatacgtgtgtgtgtgcccacaattcgtgcatatgtgtggtgcatgggctgagtgtatgtgcacacttgtgtatgtatgtgcattgtttgtgtgcctgcacgtacctgccgtgtgtctgcccaggtcggtgtgagtgtgcaagtctgaccatcaccccgccgtcgcctctgatcagtcctgcctatgttttaataaaaagcacatgaacagacaaacagcatcttacattctgtgtgtatcctcagcactgacctctgacaagtctaactggccttctctcccttcccttttagagggtgttggtccaggcagccagctccaatcccaaaggggcccagatgcagccgatctccctccccagagttcagcaggtaccccagcaggtaatgacaagcaccgcagcaccgtgcaaaccggggcgcagttagcactcagcaatccagaacaatctctgaaggatgcatccttttctgtggctgctgttccttgttgtaagcttcagtttcttagccaaaagact

SEQ ID NO: 20501 - DNA, 2300 bp, Homo sapien
tggagtgttataaagtttttgttaaatagttttatgtatttaaaataaattaagagaagaaaaggaaaaatataaaatatataaaaatacggttttttataattacctgcgtatttatcattttaagtgatatttactcctaatagatccaaatttaccatctggtattaattcctttcattctgaagaacttccattagcatttctcatggtaggcagaaaattttatcaggttttgtttatgcaaaaaatgtctttattccaccttcagtttttaagaatagttttgctggagatagaattctgggctgatagggttttcccccccagcatattaaaaatgtcactccattgtcttctggttgccattgttattgatgagaagccagtcatcatctgtgcccttgttctccgaatataatatgtagtttttctctgactgcttcttttaacagtttaaccatgacatacctatcttggctttctttgtattctttttagggtttgttgagatttttggacctctaagttgatatccatcacccaatgtagaggtgtttggccatttttcaatatttttttctcttacattctctttttctcttctgggactctcgttacatatatattagacagtttgttctattcatgtttcttcatatattttctcttcattcttcagattgggtaaatgctttttatctattgttaagttcactaactctttccattatctttaaccagctgttgagtgcatccagttaagtttttgtttcagttattgctctagaatttctatttggttctccttttatactttgtttcttgattgagattcccatatgttcattcattatgtatataacttcctttaagttcttgaagttatttttagtagctgctttagtccttgaatgctatctgtatcatctgggttatcttgcgtttggttataattaactgcttttcttttttctttttatttgttactctttcttttgagtgtatgttacactttcctgtttcttttcatagctcatggtttttactgggtcctggacatcattaatgatgtattgtagaatctgtaggttcatctgagttcccctgaaggcaagtgacttggctagattcaaactctccctcctgcaacaggcagcagctgaaatcttcacttaatttttttatctttgcactgctggtttttccccaagacccctggtatctcccccacacctttgtggtgtagttgcttagccaaagattcaggtgtattttgtaggaagatttgagggctcaccccttctgtggctctctctcttccagaatctccacaccccagcattcagaactctgtcctctgacccttcaggataacgaggctgatgctttctggcacccaagcatttgtggactggggcatgcccacaggcaaaaagccacagactcattggtctgacctataagacaacacatggtaaatagtgtgttaaattaggggaacaggctgggcacggtggcttatgcctgtaatcccagcactttgggaggctgaggcaggcagatcacatgaggccaggagtttgagaccagcctgaccaacatggtgaagccccgtttctataaaaatacaaaaattagccaggcatgatggtgggtgcctgtaatctcgtctattcaggggactgaggtgggagaatcacttgaacccaggaggcagagccaagatcatgccattgcactccagcctgggtgacagagcaagacttcgtctcaaaaaacaataataataattaataaaaataaattaggggaacacattcatgtgtaaatgcctgtgatgtggaacaacttgctttctggaaggtgcattctggccatggtggacagaccacggtctcgccatttatccccaacactctcatggcctcttcttacttaaataaggtctggagtttggagcaaaattatttccacctgcggaacaaggaactggtcttagtcaagtcagcattctgactttatcactggtggactcctttcacaaagagttctagtcaaattatctcctagtatcactgatgctacccgcttggcttcagacgggaacagcatggtggatggtgtgcaaatgactgatttaaacatttaaaggaaactgtaaatacaagcagcttgtaacagaaaaattccaaaggtcagttctgtcaaagacagagagtgagttgaggactcaggaaatacactatgggaaatttacaatcttttgaaagagtagaaggtaggaggtgcgggctgtg

SEQ ID NO: 20502 - DNA, 2300 bp, Homo sapien
gcaaatcaccgtcaacattttaattaaaatgaaacagaacaggaaatatcagagtgcgttaaagtatcatttcacggtactttagttacagtatcatttgttttagttatagatatgtttgtgtggactgagcccctaggtaaaatgtatttcctgctgtatgctgtggtcaaaaatgtttgaaaaccacccatctagtgatcaagagcatggactttggcactagactactagggttccgatccctcacaagctgtttgacactgggcaaattcactcattctttctgggcctcagcttcctgatctgaaaaatggggaaaggccgggcatggtggctcatgcctgtaatcctagcactttgagagtccaaggcgggcggatcacttgaggtcaggagttccaggccagcctggccaacatggtgaaaccccgtctctactaaaaatacaaaaattagctgagcgtggtggcgggcgcctgtagtcccagctacttgagaggctgaggcaggagaatcacttgaacccgggagacagaggttgcagtgagcgagccagatcgcaccactgcactccagtctgggtgacagagagagactctgtctcaaaaaaaaaaaaagaaaaaacaaaacaaataaaaacggggataatgcctagcatctttctaaagatgcgattgtaagatttaatgagtttgcatatttaaaaaatgcttagatcactttcaggcacatagcaatttaatcagtgctcactaatatgatttcttgttgaatgaatgagtggggctgaagcctaatctcctgccttttctcagtacaagttgttttctcctattcttccagccccttgtctcgaataactatatgtttacctctttattctgtttgctgtcaatgttccctcactagaataaaagttctatgaggatctgtctgtttctgtcctactcgtagctgaatctaccagcttgagaggagggctggtgagtttggcaaacattttctgtaaaggaccgtatagtaaatatcttaggcttcgcgtgggacatgccgtctttgcgcaactactccactccgcccctgtagtgtcaaagcagccttccaagctgttcaaggaaatgggcgtggctatgttccaataaagctttatttacaaacccaagcaggcagaatttgacccgcaggccgcagtttgccaatctttaaactagttcaaaatactgggcccaatacaataaaagagagtctcctatcaggttcacaccccacaaaagctccttttgatagtttctttttttttctttctttcttttttttttttttgagacggagtctcgctctgtcgcccaggctggagtgcagtggtgcgatctcggctcactgcaagctccgcctcccaggttcgcaccattctcctgcctcagcctcccaagtagctgggactacaggcgcctgccaccacgcccggctaattttttgtatttttagtagagacggggtttcaccgtgttagtcaggatggtctcgatctcctgactccgtgatccacccgccttagcctcccaaagtgctgggattacaggcgtgagccaccgcgcccggccgatagtttcttttaaccatgtaaaaaatatatatatatttaaattttcagctgggggtccgtgaaaaacaggcggcgagcgagagtttgctgacccctgatcagactgttcccacatgtcccacactcctcctgtggggtaaacggagtcccttgggtcccctaaaactggactttcccaaaacgcgccaccaacccacggcgccgcgcgcgcgaccggttcgccaaccctctgagccgcgcgcgcctcccgccaagacccgcccctcttcgcggccattggccgagtctcgcactctttttcaagggggaacgcctcctccttccgacagactctgcagacagccaatggaacgccgtagggtctcgcgccccgccctcttgggggcccgttggaggcgagcgtgggcgggccgttaggaaggtggggcgcggagcctggtaaccgttgccggtaacaacgccccgccccgtcgggcgggcgggctgcgcgaggctggctggcggcgggagccggaggaggagcggccgccgccgccaccgccgccgccatagagactgtagccgtggagactgttacttaccaacggggaccaacacgcagcagccgctgccgccgccgcgggagccgctgcccgaactcccggcccgaactccaggtgaccgatgcgaccgccccgggcccagcccggcc

SEQ ID NO: 20503 - DNA, 2300 bp, Homo sapien
ttgtgtgaacaggtgtgattgtgggagcatgttatgagtgtgagtgtatgtgagtgtgcttgtgattgtgtgcccatgggaaggtctgtttgtgtgtgagtacctgtgcacgtgagagtgtctgagcgagcgagcgagcgtgtgtgcaacttgcataaatctgtctggcaccagcaaagtggctcaactgtctttagagacagaggtcccttccctcctgttggggacctcttgacctgctccctcccctccagcttcacccctgtccaaggaggctgctcctgatcccaggattctactggatggggggttggggaagggtgtcacctcctttcctttataggcatgaccaggcatggcccccaccacttatgcccacatcccacagggcaggatgtagtcacatggacacgccatgcagtcagggggcctgggaaacattctctctctttaggtgagagctctggggaagaagggctgaatggacattggtggacactggctgtcctggcacagctgcccaggtgctctgcagagtagatatttgtgaaacattaagaaggccctggtggccaggtgcggtggctacacctgtaatcccagcaccatggaaggttgaggcgggtggatcacctgaggccacgaggtggagaccagcctggccaacatggtgaaaacccatctctactaaaaatacagaaaattagtcgggagtggtggtgcatgcctgtaacctcagctacttgggaggctgaggcaggagaatcgcttgaacccgggaggcagaggttgcagtgagccaagatcacgctattgcactccagtctgggcaacaagagccaaactccgtctctctctctctctcacacacacacacaaaaggccctggagacaaaggaacactccttgtccttttctcctggcacagcacaagattctgttgctacatctttatttactgagcatctagtatgtgctgcacctggcactgttttgtcttttttgttttgagacaaggtcttgctctgtaggcctggctggagtgccatggtaccatcacagctcactgcagcctggaactcctgggctcaaacaatccccccacctcagcctccctactagctgtggttacacttgcgcaccaccacgcccggctaattttttaaatttttctgtagagacggggtcttactacattgcccaggctggttttgaactcctggcctcaagtgatgctacggacttggcctcccaaagtgctgggattccaggcacaagccactgtgcctggtagtggacattgttagcagtgactaaagcagagaacgagaagggggaggccgctgtaaacacatgaagacaggcagcgtaagagaaagtcacgagggcaggaataacatccaggcatacttcagatcccagctcaagaaaccactcccaggccaggcgcggtggctcacgcctgtcatctcagcactttgggaggccaaggcgggcggatcacaaggtcaggagtttgagaccagcctggccaacatggcgaaaccccgtctgtactaaaaatacaaaagattagccgggcgtggtggcgggcgcctgtaatcccagctactcgggaggctgaggcaggagaatcgcttgaacctgggaggcagacgttgcagtgaactgagatcgcaccattgcactccagcctgggtgacagagcaagactcccgtctcaaaaaacgaaagaaaagaaagaaaccactcccagactccctgcctgggcgggatcctttgatcaagccctcaacatgccttggggctctcttcacaatggtaagtttgcatttgtttgtgtgattctaggcctcctcttattttcttgaacaggcctcatctggctttgttcatctttatgtctccagcatccagcacaatccctgccattagggtcatggcttcataaaaacgtcacgaatgcaacgcagaagtgcatgcatgcatgaataaatgaatgatgcatgaaaagagcaatctccctgtcctggaagcagcttcccctaggggtgggggtggggtgcggaggcaggggcagccagtgatgtcacaagaggtggctgggatggaacgttctggaaggttgaatggggtagaaggcctgttgtggagggaaaccacccatcctcctgcctcccaccaccaccatcatcctggctggacggagagggtgacgggggctgggaaggggcagctcatgttcaggtttccaggaggggctacctgttgactgtctttgcaggaagaagaaaacacct

SEQ ID NO: 20504 - DNA, 2300 bp, Homo sapien
ccatagtgtgttctgctaggaagaggacaaacaggtatgacatgagttttgggaaccaccgatgcatcacttaagaaagtaattttgtgagcagtggttcatgcctgtaatcccagcactttgggaggccaaggccattggatcacttgaggccaggagttcaagagcagtctggctaacatggcgaaatccagtcttgacaaaaaatgcaaaaattagcccggtgtggtggtgtgcacctgtagtcccagctacttgggagactgaagcatgagaatcacttgaacctgggaggtggaggttgcagtgagccaagatggcgccactgctctccagactggacgacaaagtgagacagtctcaaaaaaagaaaaaaacaaacaaaaaaagaaaagaaaagaaaaagaaaaaagaaaagaatttttaaaagctctaggccagaggtggaggtctgtccttcctgaaccaagtcaggaattaggagtcaaaggaagccaggcaggagaaagtgttgtatttcactgagtctagctaggatttcattgaatctggaaactgtacccaaatttcggagagaataaaatgtgagaaaacatatggccagtagtgatcagagaatgccatcaatgaaaagacacatctcgactccagagatgtgaaaaagtgaagaaatgagtgactcagagtcatgaaatcatgtattcaagaaacagtcacagtggtccttgagctgaaatgaacctagccatctaggctcacccctcccagggactcccctcctctccaggaccctcctgccaaaagctgatacagcaaactgcagctcattcaaacatgtaggaaatttaaagtttcgacaatagccatacaaagacactacaatgaaaaaaaaaaaaaaacgtaagacagcagctaaatttcactgtacacaaataaaactcactggataatttcaacacaatgcaaaagaaaattgtaaccaaggccaggtgcagtatctcatgcctgtaatcccagcactttgggagaccgaggcgggcagatcacgaggtcaggagatcgagaccatcctggctaacatggtgaaaccctgtctctactaaaaaaatacaaaaaattagctggacatggtggcaggcacctgtagtcccagctactcgggaggctgaggcaggagaatgacgtgaacctgggaggcagaggttgcagtgagctgagattgtgccactgcactccaacctgggcgacagagcgagactctgtctcaaaaaaaaaaaaagaaaaaaaaagaaaattgtaaccaaacattccaacataaaactaaaaatgtaatgaagcaaacacagctagaaaggaagaacacaaagcaaacatacaagcactcagggaagagacagcaggacactagaaaaaaatgaaacaggaagggatagaacttaggcaagaaatagaagagaacaacaaaagcatctagaaatgaagacaatgacaagaaatgaagaaaattatatagtagcatgggcttgaaatcatcacacttctaaaagaaaaaataattagcagtgggatgtatataaaataatacataaatatattaatacttttacttaagtgggggcttaaggttgggcatgggggctcatgcctataatcccagcactttgggaggctgaggcaggaagatcaattgaggccagaagttcaacagcagcctgggcaacatagcaagactctgtctctacaaaaaaaaaatggtttttgtttgtttgtttgttttgagacagggtctctctctgtcacccaggctggagtgcagtggctcagtcttggctcactgcaacctccacctcccaggttcaagcgatcctgccacctcagcctcagcctccccagtagctgggactacaggtgcatgccaccacacccggctaaattttgtattttttggtagagatggagtttcaccatgttggccacactggtctcaaactcctgacctcaggtgttctgcctgccttggcctcccaaagtgcccggattacaagcatgaaccaccacacctggcccaaaaaatgttttaaaagttagcccgggctcggggcggtggctcacgcctgtaatcccagcactttgggaggccaaggcgggcggatcacgaggtcaggagatcaagaccatcctggctaacacggtgaaaccccgtttctactaaaacatacaaaaaaattagccaggcgtgatggtgggcacttgtagtcccagctacttgggaggctgaggcaggagaatggcatgaaccc

SEQ ID NO: 20505 - DNA, 2300 bp, Homo sapien
ggaatgctggcttaatttgagttttccataactggaaaatgccacatacacaaccttcccctctacacccacctggctgctgtggatttctgtcctggttctagcaggtccagcattaagtgaataaagcaatatctgaattatttctgactcctagtttcattgaaggtgaagtctgtggaggatttattgttccagttgctaggtctagaagattcaaaaccaggttcctgacatgcttctcccaaattggatgcccagctccacttggagatctttatttgggggagtaatcacagatcctcctctgcttataatcctctaattctctagcggttttctgttggagttaaataaactccaaactcctcatctttgcctccaaggctccgctgatctgggcctcaccattctttcatgccccctcccctatcatactctcttgggtccccactctggccatcctggactttttgtatccctcagacatcccaagctgttgcctgccccaggctccttgaatgtctgtttcttcttctctctggaaaactcctgtccagctgctatacgggcttctgccatcttttctctccaatgcatgccagaggcgtggttatgattagcaaaatggatgttgcaagtaactttttcattggattggctagaagtgtcatagagagaccccatcccgctttctttggcatgaacagagtataaaaatctcgcaggggccgggcgtggtggctcatgcctgtaatcccagcactttgggaggctgaggtgggcggatcacgaggtcaggagatcgagaccatcctggctaacacagtgaaaccccatctctactaaaactacaaaaaattagccaagcatggtggcgggcgcctgtagtcccagctactcgggaggctgaggcaggagaatggcatgaacccaggaggcggagcttggagtgagctgagatagcgccactgcactctagcctaggtgactgagtgagactccgtctcaaaaaaaaaaaaaaagaaagaaagaaaagaaaaaagaatcccgcaggtcacctgaaccttaccgtgctaggtatgggtagagggctctgcacttgtccaggttccagccaacttcatgaaggatttttattgcctgactccgagtaaaaggttagctaaatctgggctgcaaggtgcaaagtcctggaaaaggaagagccatgagggacttcttttagctcatcaaccaagatccacaattctgtgtagcataatttggtcagagatgtgttgtctcgggcagactattgtcatcctctaccgacactgttggaagctactgatatggactacaaagaatccaggagtcctgaaaccaagtcatttggagtcagtcaagaccaatagcagcattttatagtgtgggcaggggaagaaaagaggctggaggctgggcacagtggctcacgcctgtaatcccagcactttgggaggccgaggcggggggatcacctggggtcaggagttcgagaccagcctggccaatacggtgaaaccccggctctactaaaaatacaaaaattagctgggcatggtggcacatgcctgcaatcccagatactcaggaggctgaggtgggagaatggcttcaacccgggaggcggaggttgcagtgagccgagattgggccaatgcactccagcctgggcgacagagcaagactgtgtctcaaaaaaaaaaaaagaggctagagttgctggagagagcttacttaggacatctaacccagctttagtctttcccagggctgggttgccatgaagcccacagggaactttctttcagattccacagagcagcctagagcccctaaaagcgatcatccagtacagactgccaatgaagaagaacaacaacttgtactctgtaagtgtgggaggtgggcactggggaaaggggagggcggggccttgcaagaaaagtgggcgtggcctaagtggaaggtgagcagagggaggaggtcggacctggcaagggtgggaactctcaaaggaagtaggtggggactctcaaaggaagtgaaaggtgaggaaaggaagtgggtggggccttgtgaggaaagtgggtgtgacctttcaaaggacgtgaaatgtgagcagagggagggggtgtgaccttacaagggaagtgggtgtggcctttcaaagaaagtgggaggtaagcagagatggaatggggcctcacaaatgtggtaggtgggggtttgcaaagggatgtgggtggggcttcataaatgtagtgggtggggct

SEQ ID NO: 20506 - DNA, 2300 bp, Homo sapien
accataataatggccaggcacagtggctcatgcctgtaatctcagcactttgggaggccgaggtgggtgaatcacgaggtcaggagtttgagaccagcctggccaacatggtgaaacccccgtctttactaaaaatacaaaaaattagctggatgtggtggcaggcacctgtaaccccagctactcaggagactgaggcaggagaattgcttgaacccgggaggcggaggttgcagtgagccaagatcgcaccactgcactccagccctggcgacagtgagagactgtctcaaaaacaaaaacaaaaacaaaaaagaggccaggcgcggtggcttatgcctgtaatcccagcactttgggaggccgaggccggtggatcacgaggtcaggagatggagaccatcttggctaacacggtgaaaccccgtctctactaaaaatacaaaaaattagccaggtgtggtggcgggcgcctgtagtcccagctactggggaggctgaggcaggagaatggcgtgaacccgggaggcggagcttgcagtgagccaagattgggccactgcactccagcctgagtgacagagcaagactccgtctcaaacaaacaaaaccataaaaataataaatagtgaatgctggtgcaatgctttgtgtgtgccagagctattcgatgtgtgtaaactcactgaatccatgcagcaaagctgtgagctagctgctgttatattttatatatttacataaaaatgctgatataaaagaaaatattttatattaaatttaacataaaagggccgggcacggtggctcacacctgtaatcccagcactttgggaggccaaggagggcggatcacaaggtcaggagatcgagaccatcctggctgacacggtgaaccctgtctctaccaaaaatacaaaaaattagccgggcgtggtggtgggcgcctgtagtcccagctactcaggaggctgaggcaggagaatggcgtgaacccgggaggcagagcttgcagtgagctgagatcgcgccactgcactccagcctgggcaacagagcaagactccgtctcaaaaataaataaataaataaataaaagtgtagcacgcataaaatttatccataaacagacgttttatatactgtacatttataaaaactatactttaaatgtatatataataatacatatttttatatgtttacttttttatttttttaactttatttttaccggaggatccagtttactatgggtattggaatgacttttctttttttttttttttttgagacagtcttgctctgctgttgcccaggctggagtgcagtggcaccatctgggctcactgcctctgcctcccgggttggagtgattctcctgcctccagcctcccaagtagctgggattacaggcatgcaccaccatgcctggctaatttttgtatttttcgtaaagacagggtttcaccatgttggccaggctggtctcgaactcctgacctcaagtgatctgcctgcctcggacacccaaagtgctaggattaaggcgtgagccaccgcgcctggcctttatatatatatatatatttatatgtaaagttttcatatagggaaacagaggcacaaaggcacaaagttttcgtgcaagaaaacgtagctaatggctgctctgggatctgaaccagggcccctaagtctgcagcttttcatttctggctctcaggcagcctcagggaatccgttaaaacaaacatgcgagtcagacaagtggcagtcacaggagagtaacactgcgcaggcgcagaagggatgtagtggcgcgcaggcgtaggaggcggggggagatgggggaggaaggccctgcagcggcgcgcaggcgcagaagcaagtgggccggagcggcgcgcaggcttaccgggggaagaaaggcgcgcaggcgcaggacgcggggaggggcgggggaagaaaggccctggagcgctgcgctggcgcaggaggtgaaataagtggcgcgcaggcgcaagagggtgggtgcagaagaggcgcgcaggcgcaggaggggcgggaggggcgcgcaggcgcggaccgcctggcggtactttgaagaaagacttctcgacgccgagacactgctggtggtactcgatgtaggtgagcaggtggcagctgttggagccgggcgcgatgttgttggcgtacttgatggccgtgctcgcgaccatgtcgtgcacagtgaggagtgtcttgttgctaacttagtccttgctgagccgcagtcgcgcctccccgtcgcgctc

SEQ ID NO: 20507 - DNA, 2300 bp, Homo sapien
gagagcttggacctctccccaccaccagatacccctgtttaggaccacaccctctagggtcaggggggccgatgtgactgatggaggcctgctgtccagagcaaaccagggtcaggcggccaggggagcatcggagggacgggcggccatggaagccctagggcagtgctgggagaagagggcaggttttcagcaggcagctcctcctccccttgttaaagccacagaaccaagtcagaggaccacagcccagcaaggcccattggctggggggctttgtgtcccgggtatcccggagcactcttggcctgctcgggcggcccccaaagggcctctgggtggcctggtttccttggggttctttcctcttggtggccacacacagtatttttaagttgaggttcctgcgcagaggtgaatggagctgttgggggtgtgtgggctcaggcaccgactccgtgcggggcagaggcttgagcctgggggtggggtgggggccgtggtggcggcaggggcctgatgcgcccccgtgtgtcggttcaggttgagcttcagcgacagcgagagtgacaacagcgccgactcctccctgcccagccgtgagcccccacccccccagaagccacccccgcccaacagcaaggtgagcctggggcctgcaggcagggggtgcaccagaggccgggcttagccctgggccgggctgtcctaggagggtttgtggggccttcggggctggggagggtgtgggccacagctcagcagagacctgggttccctgcaggtgtcaggccggaggagccccgagtcctgcagcaagcctgagaagatcctcaagaagggcacctacgacaaggtgggggggcacctacgacaaggcggggaggctacggaggggtgggtggtgggagttgcagccagtggaggaccccagagccccccaacaccccacagttggactcttcctgggcaggagcagggacagtccttcctcccctcccggtgtggccttggagctgaggggctgcccctgcagccttgggccttccttggtttggatgtggctacctctgtcctgtgctgggatggactgggtcatgggtggggctgggcatgggagcaggaagggtccagggcccccacacgctgctgagacctgccccccctccccaggcctacacggatgagctggtggagctacaccggaggctgatggcgctgcgggagcgcaacgtgctgcagcaggtatcgcccccctgagggtcctgcccggcagaggtcggggtgcctgtgaggagtgtgggctgcgggggcccctggtgctgccccaggagcccctacctctgttagggaacagggcaaccccacccttggccccctgcccctgaagccacctgccaccaccttacagattgtgaatctgatcgaggagactggccacttcaatgtcaccaacaccaccttcgacttcgacctcttctccctggacgagaccaccgtgcgcaaactgcagagctgcctggaggccgtggccacatgaccctgggccgcgtgccgggcccccaccgccggggtcctgggaggctgcagccaggcctcgcctgccctcctctcccgtctcgcctgcccgcagcactgccttagcgacagccctgtcctcgcccgcacagcccgctgcactttcctcggcggctccctgcccactctccccgctccatcgccaggagccctggggccgggctgggccacacgggagccgccccccgggctctctgggctcccctcagagagcggctggtgttgaaggcagctctgggcagagacagggccgggggcccctcgcccagccttgggaccagcccccactgctcggcgggctgtgcggcgtcgctgccccagcctttctgagcagcggatcgacggctggggggcatctccagcctcccgaatggttcagaacacaccctccgcccaccctggacctcagaaggccctgcctgtgtgtctgcgtcgtcctccgtgtagacctagcgccggctcctccccggctcgcgctgcgctggggtctgtgctgtatagttctctctattatatatgtgtgtgcactgtctggtcaagagcagtgtccatgtgcgtttctgtggcagcagtgcacgtggggtgggtggggggtgcgtacggtggggcttgtaggttaagatgtctctgcggtggtgtggggctggaggccgagccaggcacggcagctggccctctccaggcgcatggaggaattctccctttgccgttccaaggatgcc

SEQ ID NO: 20508 - DNA, 2300 bp, Homo sapien
gcctcccgagtagctgggattacaggcgtgcaccacctcaccttgctaattttgtatttttattagagatggggtttctccatgttggtcaggctggtcttgaactcctgacttcaggtgattcgccttcctcagcctcccaaagtactgggattacaggcgggagccactgcacccagccgatccaaaactttttgagtgctgacatgatgctcagaaaatgctcactggagcattttagattttggatttttgggatgctgaaccagaggaatgcgaatattccaaagtctgaaaaatcccaaattcacaacactcctgctcccaaacattttgggagtatatatcacttagtgctatgaaggcgttgtgttagtatcttctggaaagtctgatgccattcggtcctcatcccattatatgtgacctgtttttttctgtggaaacatttaggatgtttttatgtttttaggacgcttgctttatgacatcatgtttttttttgtttttttgtttttttgttttttttttgctgttcactatgttttgtgacatttgagtgtctttcattttagctctgaaagtttccttctatttatttgacagtttccttccatctgtttatttcctctctttttttctttctgggatcctcatttttttttttttttttttttaacagagtttcgctcagtcacctaggctggagggcagtggcactatcttggctcactgcaacctccaccgcctgggtgcaagtgattctcgtgcctcagcctcccaagtagctgggattacaggtgcgcaccaccacgcctggctaattttttgtatttttagtagagaatgtcatccaggttggccttgaactcctggtgtcaagtgatcctcccacctcggcctcccagagtgcctaggattacaggtgtgagctgtggtgcctggctgtaatttccccttttagaagtatcttatttttatttgttggatatatatctccttgaatctgaggacattgactcttggtttttattttttttctttctttttgtcaaactctctgtggtctccaaattatttgtttgctcgggctctttcctcctggtgggagctcctgagcgttatgtgatgggagggtgggttctgcctatccacaggcctgaaggctcacgggcctcctgatttcctaatgagtaaggccttcctcggggtctggtttccacgctgcaagtttcagcttccccctgatagttggctccttgagacacagaaccatctcaatttctccagagggaaacctgaaacttcctggggtggggaggggtggagggggaatgggcgggaaggaggatgggcaggagggagggatcccagggctcctgtgcccaacacagcctttcagtttgcccttttgtttttttttaataaccgctttatggagatgtaatttacacatcataaaattcactcttgtaatgtgtacagttagcgttttcagtatattcacatagttgtgcggccatgaccactgattccatcactgctgtctaattccagaacattgctgtcaccccagggagaagctcaggccccgcagtggcagtcgctcccctgctcccaccctcctcccccaccgtgctccctttccctcccccagctttcatcctcactcctgccctccgctcagccagtccaggaccttcagccttctggcaccagtggctgtccctgccctgcggcgcccccatggcagactctgagccgtcgcctccttgtcctgccccttgcccatcgtgtcctcgtccgacttctgcctttcagaaactggcaggtggcttgaatctcctccctcctgccttcactctcacggccttattcctgtcctcttgcttcctgtgggctctcaggcaggagagtgggccggtgcgtctccctgttctcccctggttgaattgaagcactcggccaactgccatccctcttggcgctgtctggggggatagaagttcttcaggcttggagtacccgtcacaggacaggattccttcttgaaggcgtggggaccatgagataagatgtgacagtcgatttgggaagcacgtgacctggaggtcagaggcagagggacatggggtctgtttctcgaaggaggtggccctgctgtgggcctttgtggctgggtgggattcagactatgggcgagtggggagaagacgaggcatgggtggagtctgagagcaaatcccaggccactgcccatgcccgtgcctcctctgctggggacaggccacccttcctct

SEQ ID NO: 20509 - DNA, 2300 bp, Homo sapien
tgtaaatgacaacccgatttttaatgacaagaaggaattaaaataactgcacaaggatccccaaatcacaggcagaagtcctaatgtccaagagacaagtggcttataaagtcctgaaaaaatggggttatgcctatttcccacataaacacagtttacaggtcattgtaaaattttgtgatcctcaataaatcaaaacagttttttgagagatgggtattatttaaaattttgtggataacatgagattctctctttaaaaattatatctttgttcagggcgcagtggctcatgcctatagtcctagcactttgggaggccatggcaggaggattgcctgaggccaggagttggagaccagcttgggcaacatagtgagatcgctctttctataaataaataaataaccaaactagccgggcgtggtgacatgagcctgcagtcagtcctagttgcttgagaggctgaggtgggagaattgtttgaacccaggaggtctaggttacagtgcgccacgattgtgccactgcactccagcagagacctcatctcaaaaaaaaaatctttattgacaaataataactgtatatatgtatggggtacaccttgatgctttggtacatgtatacattatggaataaacaaatcaggctaattgacatatccatcaccacatatacttatcaattatttatggtgagaacattcaaaatccacttttagcattttttttcttttttttctcttttttgagacagagtcttgctctgtcactcaggctggagtgcagtggcatgatctcatctcactgcaacctctgcctccctggttcaggcgattctcctgcctcagcctcctgagtagctagaattacaggcacacaccaccacgcccggctaatttttgtatttttttagtagagatgggatttcaccatgttggccaggctggtcttgaacttctgacctcaggtgatccgcccccctcagcctcccaaagtgttgggattacaggcgtgagccaccgcatctggccgcttttagcaattttaaaatataaaattacattattatgtagtcaccttgctgtgtgatggatcgccagaacttattcttcgtgtctaactgaaaacatgtgactctcttgggtcatttgaatgtagcacgatttcaaatttgtatcattcaaattagcatgaagaatcacacagtactgttcttcaacctatttcacagatgcacaaactgagactcagggaaaggtgaagaaggggctgaccaggtttgccaaggattatgcaagattagaaaattaatctccactttgggaggttgaggcaggcggatcacttgaggtcaggagttcgagaccagcctggccaacatggcaaaaccccgtctctactaaaaatacaaaaattagctgggcataatggcgagctcctgtaatcccagctactcgggaggctgaggcagtagaatctcttgaacctgggaggtggaggttgcagtgagctgagatcgtgctagtacactctagcctaggccacagagcgagacgtgtctcataaaaaaaaaaaagaaaagaaaattaatctccagttccagagcccagggctcgttccattacatagcagcatcatgaggtcaggaaacaaaagtgtccctaccgggggggctgggggatccctccacagggctcgaacccgtaacctcagttccagcccccgggacgctcccgccctggaggctccagccacgaggcagcgccccctgcgggccgcagcgcgcaggcgccgcgcgcccgtcccgcccccgcccccctccacgtgcggcgcacacctcgcgctcccctccgccaggctcgcctcgcgcctccctccctccctcctcccgcccctccggtcccggcctcccattggctgcgggcttcgtccctccggccgcagcccggcaggcccccgccaggcaggaagtcccgcgccacaagcggccgtccgcgccgtcgattggcccaggtggctgtcagtcgatgcggcgggccctagtcggcggcgggggcccgtgatcggtgcgcgacccgggctggcggtggtttccggttccgcggggctggcgggcgagcgggcggccgggatcggcggcggcggcggcggcggcggcgcttgacagacaatgagggcggcggggcggcgttgagcggcggcggcggcggcggcggcggcgagcgacgcggggcccgggggcggggcggggcgccagccatggacaatcaggtgaggagcggccgcgccgcccct

SEQ ID NO: 20510 - DNA, 2300 bp, Homo sapien
tcactgtgttagccaggatggtctcaatctcctgaccttgtgatcctcccgccttggtctcccaaagcactaggattacaggcgtgagccacagcacccggggtaggattgttaagaacattaaatgaaggccgggcacagtggctcacgcctgtaatcccagcactttgggaagtcgagacgggcagatcacaaggtcaggagtttgaggccagcctggtcaatatggtgaaaccccgtctctactaaaaatacaaaaattagctgggcatggtggcaggtgcctgtagtcccagttactcaggaggctgaggcaggagaattgcttgaactagggaggtggaggttgcagtgagccaagatcatgccactgcactccagcctgggagacagagtgaggctccatctcaaaaaaaaaaaaaaaaaagaacgttaaatgagataatactgaaaatcaagcacttaaaaaaagaaaaattatataatatataatattaattattatattaaattatattaatcacattaaaataatatactaaaatatttaaaatattatataacaatagtatttttaatataataattttatattttaatataatattgctattatataataaataattatattattattgttatgcacacttgctaaccgcttgctaaggccaggctcttttattataataataataattattattattcccacaaagttgacttaaagttcaaggtcagcttcagtaagaaaaccctgtaatcccagcactttgggacagagcaagactccatctcaaaaaaaaaaagaaaacccattaccatccatcaagtgcctactctagcataggcagtgggctaagcctttgtacatgctttatctctgtcttcctttgttacagttggctctgtcaccatcgtctccatatgacaggtgagcaaacagaggatcagagaggtaaattcacttgcccaaggtcacacagcttaaagtagaggaactcaggccaggtgaggtggctcatgcgtataatcccggcaccttgggaggccaaggtgggcagatcacctgaggtcaggagttcgagaccagcttgaccaacatggtgaaatcctatctctactaaaatacaaaaaaaattagctgggcatggtggcaggtgccagtcatcccagctacttgggaggctgaggtaggagaatcgcttgaacccaggaggtggaggttgcagtgagctgacattgcgccactacactccagcctgggtgacagagccagactgcatctcaattttaaaaaaaaaggccgggcacggtggctcacgcacacctataatcccagcactttgggaggccaaggcaggtggatcacgaggtcaggagatcgagaccatcctggctaacacagtgaaactccatctctattaaaaatacaaaaaattagccggtcgtggcggtgggcgcctgtagtcccagctactcgggaggctgaggcgggagaatggcgtgaacacgggaggcagagcttgcagtgagctgagatcatgccactgcactccagcctgggcaacagagcgactctgtctccaaaaaaaaaaacaattagctaggcatggtggcagcatgtgcctgtggtcctggctacttcagaggctgaggcaggagtattgcttgagcctgggagtttgaggctgcggtgagctatgatgatgccactgtaccccagcctgagcaacagagcaaggccctgactctaataaataaatacatacatacataaaagataaaaacagttccctccactgcccccaccccgattcctattcctgggtaatctggatgggaggcctcttccctgcctacttctgccccctgccctgcctggacagtgccagtcccacggcttatgctcagggctgctgtcactgcacagccaggctgccctggtgcaactggggagcggcccagcaggtttttcctcccagtctgcctgccgcggggcaccgggctgtcctctccccgcctcatcagggcccagccttcccaagctcgccttctctctgccgggcgcagccggctggtggtggccactgagacaagatgcctagcatcttcgcctatcagagctccgaggtggactggtgtgagagcaacttccagtactcggagctggtggccgagttctacaacacggtgagtgcgtgggtgtgtgaaggagtctcgccagatgccggttcgaatcccggttcctccccatacagccttactggggaatcttgctggagtggttcacctgtctc

SEQ ID NO: 20511 - DNA, 2300 bp, Homo sapien
cttgttgcccaggctggagtacagtggtgtgatctcggctctctgcaacctctgcctcctgggttcaagtgattctcctgactcagcctcccaagtagctgggattacaggcattcaccaccatgccgagataattttgtatttttaatagagacggagtttcactgtgttggtcaggctggtctcaaacccctgtccttaggtgatccacatgtcttgggctcccaaagtgctgggattgcaggcatgagccaccacaacacctcgcctgaatctgctgtgattcgaaggactgccccgggaaaaaaaagaaaaaaacacttcaagtagactcccatgtgggaggacctgaagacttctcagacttccatggtccctgatctaacacagcaataaatcattcaaactgagcactttttacacatttttggaccctttctgaggactttctgcacaaacctaggaggtaggttatcattatccccactctgcagatgcctccaaagccctctacctacctcctttatcacctcttcatctcttggttcaatgtgtatttaatgagcacctactgtgtgtcaggcactattctagactttggggatgaagcagtgggcacctcttagatagtgacattgaactgaatgatgaaaaagaatctggcttgagaaggtgtggcaaaaaagagaagtcccaacattaccagcaatcttcctacttccaccattttgcccattctttttcctctgctggaaatgcctttccccagctaacaaactcctacttatcctgcaaagcccaattccaatacctgcttctcctaggaatgctttccggtctgatctccaggaagaatccacaacacccttctctgggctcccacaatctactccacaggtggccaaaaaatgaatgaggaggtctcagtagaagtcggccacaccaggctggaagctcttcaaggccaagacccaggctaagtcctctctgggacccctcttccaagatgagctgtgggaacactgcagcttttttttttttttttgagacggtgtctggctctgtcgcccaggctggagtgcagaggcgccatctcagctcactgcaagctccacctcccaggttcacaccattttcctgcctcagtctcctgagtagctgggactacaggtgcccgtcacctcgcccggctaattttttgtatttttagtagagacgcggtttcaccgtgttagccaggatggtttcgatctcctgacctcgtgatccgcccacctcagcctcccaaagtgctaagattacaggcgtgagccactgtgcccggccctgcagctatttttaaaataaggaataagtggggtgtggtggctcatgcctgtagtcccagcactttgggaggcaaaggtgggaggatcacttgaggccaggagtttgagaccagcctgggcgacatagtaagaccccatctctaatacatatatatatatatttgccagatgtggtagcacacaactgtagtcccagctactctggagagcaaggtgggagggagggttgcttgggcccagaaatttgaggccacattgagctaggatggcgccactgcactccagcctgggccacagagtgagattctgtctcaaaaaaataaaaataaataaagcagaaacagtagaaaacgaagacgaggccgggcgcggtggctcacgcctgtaatcccagtactttgggaggccgaggtgggaagatcacgaggtcaggagttcaagaccagcctggccaaggtgaaacccatctctactaaaaataacaaaattaaccgggtgcagtggtgtgcatctgtaatcccagctactggggcagctgagccaggagaatggcttgaacccagaaggcagaggttgcagtgacccaacatcgtgccaccgcactccagcctgggtgacagagcaagactccgtctcaaaaaaaaaaaaaaaagaagacgaattggtcggtaaggggactcgaactggagactctaaaacttctccagccctgcccactcaatttacttcattggctcctccctttcaggctccgtccctatccccgcctcacccttaatggcgcccgcccagactcctggaagtgagcggcctagcgagcgagctcccaggcgcaaagcacgccggaagctgtagttccgccatcggacggaagccgaccggggcgtgcggagggatgtggcccggaatattggtagggggggcccgggtggcgtcatgcaggtaccccgcgctggggcctcgcctcgccgc

SEQ ID NO: 20512 - DNA, 2300 bp, Homo sapien
aacagtgaaaccccgtgtctactaaaaatacaaaaaattagctgggcgtggtggcaggcgcctgtagtcccagctactcgggaggctgaggcggcagaatggcgtgaacctgggaagcggagcttgcagtgagcggagcttgcagtgagcggagatcgcgccactgcactccagcctgggcgacaaagcgagactctgtctcaaaaaaaacaaaatgtaggcggcatcagcatgtaggctcattaacagtcagactgagacctggctattggattcggcattgtggatgtcactggtggccttaaatcaggccttttctggtgctgtgggagccaaaagccaggctggagtggatccagaaaggataggaggaaacatatcagacatagacaagtctttcgaggaattacactatcaaggggagcagagggtgggggggcagatgtagctggagggagaaatggggtcaatatttttcaaaatgcaagcattcgggccggggtcgggggggcgctacgctcagcagttacagtgttgcagtttgcattatgcacatttaaaatacatacaaaagtacccagagctttgagaggctgaggggagaggatcacctgagcccaagagttccaggctgcagtgagctatgatcgtgcccttgcactccagcctgggcaatagagggagaaaataataaaataaaggccgggcatggtggctcaggcctataatcccagcactttgggaggccgaggcagacgggtcacctgagatcaggagtttgagatcagcctggccaatgtggtgaaaccctgtctctactaaaaatacaaaaaattagccgggcgtggtggcaggcgcctgtagtcccagctactcgggaggctgaggcaggagaatggtgtgaacccgggaggcagagcttgcagtgagccaagatcccgccactgcacttcagcctgggtgacagagcgagactgtgtgtcaaaaaaaaaaaaacccaaaaaccaaaaaaataaaaaacaaaaattagttgggcgtggtggcagcttcccgtaatcccagctactcgggaggctgaggcaggagaatcgcttgaacccggaaggcagaggttgcagtgagccaagaccgcaccattgcactccagcctgagtgacaagagcgaaattcggtctcaaaaacaaacaaaacaaaaaagctgggcatgatggttcgttgcctgtaatcccagctactcgggaggctgaggcatgagaatcacttaaaccccagaggcagcggttgcaaatcttcagggcctgagatcgtgccactgcgctccaggttgggcgacagagtgagactctgtctcaaaaataaacaaataaaaataaatataaacaaaagtagagaaaacagggtaatgagaccccacgtacttatcacaccaattcaacaattaattcacggtcaaagatgattcttccctacccgccccctccctgcccccacagcctggatttatgtggaagcaaatcccagagatcttttttctgtaaatatttttttttcagtttgcgtttgtaaaaaacgatgactcttttttttttttttgagacaatgttttgctgtgtcgcccaggctggagtgcagtggcgggatctctgttcactgcaacctccgcctcctgggttcaagcaattctcctgcctcagcctcctgagtcgctgggattacaggcacgcgcgccaccaagctcggctcattttttgtattttcagtagagacgggttttcaccatgctggccaggctggtctcgaactcctgacctcaggtgatccacccgcctcggcctcccgaagtgctgggattacaggcgtgagccaccacgcccggccgaggaatcaaaaagacaaccataatgccattttcaaacctaaagtaatagtgatacggagacggggaaatgaatgatacctcgctctgacctttgaccataagccctaactctggatagctggccccaccacacacataatcgtggccttgacgtcagtcccctgaccccggacccttatctcggcctgactgtactctgcccttaacctctagccctagtcgactccataaccgtggccttggccccagtccccctgacttccggacttcagaccagatactgcccatatccccttatgaagtcttggccaggcaacccctagggtgtacgttttctaatgattaaagaggcggtgctaagctgcagacggacttgcgactcagccactggtgtaagtcaggcgggaggtggcgcccaata

SEQ ID NO: 20513 - DNA, 2300 bp, Homo sapien
ccggagacaggggcatgatgtcctaatcctccaggcgggagccaccatggagggttcccgtggactcagtcccctgccaagccacctttcccagcactcacatatgctccacctggcacatgatacacgtgggggctcctgagccccagcaccctgacttagtggggagggaccccaccggggtcccatgaagccccctgacttccactccaggcagcaggtcgggggaacaccagttgcctgccctggccgccagcacagcactcgtaaatcagggggtgtctggggcgtcggaaatggctgtgtggaatgtcggggtggggtaggctgggggtgagcccttaactcttagaagggtggggtgtggggcagaaggagcagatgcctggattcgagggtgcaggagatgggctggtgcagacgtggggcctcctggctgcaggggccggcagtgaagaggttagctcccagcccaggcagggcataaatttggggcacagctcccactctcaggacctgcccgtcacaatggccgtagggaagttcctgctgggctccctgctgctcctgtccctgcagctgggacagggctggggccccgatgcccgtggggttcccgtggccgatggagagttctcgtctgaacaggtggcaaaggctggagggacctggctgggtaaggacttccagggaccctctgtgacttcccaactttccccagccctgaccctgctcactgtcagcgcccttccctcccacaggcacccaccgcccccttgcccgcctgcgccgagccctgtctggtccatgccagctgtggagcctgaccctgtccgtggcagagctaggcctgggctacgcctcagaggagaaggtcatcttccgctactgcgccggcagctgcccccgtggtgcccgcacccagcatggcctggcgctggcccggctgcagggccagggccgagcccacggcgggccctgctgccggcccactcgctacaccgacgtggccttcctcgatgaccgccaccgctggcagcggctgccccagctctcggcggctgcctgcggctgtggtggctgagggtgcccggcctggcacccagaagctgcagtgctgggggagctcggctgacttatttattggagacctggatgcagagacaacgaggaggggagtgggctggggcgaccagcagtgagtgcaataaaggacaccactctcccggccttgtgactttgaccatgtgtccagccagccacacctggagctccctatgggccagtgccatcctgggttcccctgcaaatcccggccccagcaagcagccactgcaatgtcccagttaggctgtccattccccaactttattcacaaatctggtgtctgtagaaagctgggggtcagcaggctgggggcggctgtccagactcccctggccccatgccctcagggagggagcggcagatcacggagatgcgccggccccggggaatccggcgttccccaaagaaggactcttcatcccgaaggatctcatgggagaagtcataacgggctgagcccctgcaggaagaaacaggctgtgactgggtgcaaggagggcagcccctgctccaggcagacctggattccagcctcctggattccagccccctgctgcctcccacacagaccctggggtaaaggcgtcttcggggagggctggattgagggaaagtacccagggcacagggtgggcggatggcacattcttggaggggtgggtgctgcctggatggaggtacctaaggatgtagagggagcccggctccagcaagagttccagccactcccccggctcctgggtgtgcaccagccgcataacgctgggagacaggagagacaggccggcgatggtggccccgcagaactgcaaaagaggcgtggggatgggtcaggatctaaccgggcctgcctaccccctggctgggagtgccaaggcaccgtcctctgcccaccttgatgctgtccacgtggggcttgatgtagccgcgggcttccaggtccagcacgtgcacggaggagagcagggtctggccggggccaaaggcggccgcctgcacgcgctgcaggatggcccggctggcttctgaccagcgcgacttctctgtctctcggaagccgtggatggcctgcacagagagctcggttaagcctgggagctcccagagggaacaaggaaactgaggcaaggaggggcagaaaacggcaaggggctggtttccctatgtgactcttgaccctgccctcaactcaa

SEQ ID NO: 20514 - DNA, 2300 bp, Homo sapien
gtcgcccaggctggagtgcagtgacatgatctccgctcactgcagcctccgcctcctgggttcaagcaattctacctcagtctcctgagtagctgggatgacaggcacgccccaccacggtccagctaatttgttttttgggtttctgagacggagtttcatgctgctgcccaggctggagtgcagtggtgcaatcttggctcactgcagcctctgcctcctgggttccaagcgattctcctgcctcagcctcccgagtagctgggactacacccagctaattttttaatagagacggagtttcaccatgttgaccaggctggtcttgaactgacctcaggtgatctgcccacctcggcctcccaaagtgctgggattacaggcgtgagccactgtgcctcgcctaatttttgtattttcgttagagacagggattcaccatgttggcctggctggtctcaaactcccgacctcaagtgatcctcccacctcaccctcccaaagtgctgggattataggcatgagccactgggccccgccaggcttttttgagacagtatcgctctgtcgcccaggtttgagtgcaatggcacaatctcagctcactgcaacctccacctctcaggttcaagcaattctcctgcctcagcctcccgagtagctgggattacaggcgcccaccaccatgcccagctaatttttgtatttttaatagagatggatttcaccatgttggtcaagctggtctcaaactcctgacctcaggtaatccacccgcctcagcctcccgaggcatgagccaccacgccaagcccaggcttttctttccatcggaaaattatcatctcaataagcacttcagtaagaaaaaccacaacataatcatcgaagcaatccctcacggatggagttgaggccacttccagactttcctaatatgaagaaggcatcagatgtccctgtgctggctgtttcacttgcctgtgtgggaggaaccccgcaaacagggctcctggggcagagggtgtaatttacaattccccagtagcagctgctcatccaaagagctgctagcaatttacacccccaccaacagcacagggtgcacctgggtcacacgggttgtgtgtgagggttttctgattttccccaatcttgtgggtgcttagagtcaagcaccccttcggacaatcacaagctgtttgcttgtttttgcattcgaagctacgggcactgccttacactctaagtgcccatctctttcctcaccaagccgagtaggaggggttctgaggagctcccctgtaccggtgaggggactgggctcacacggggctgggtatggaagcctcgagagcccttatctgtctgcatcgtgctagacgttaccatgacctggacagcctccatcgccccgggggctctgacatgctcagatcccaggatggggctgcagttataggggtctcaggttggccttcccgagacaggcgtccctgtccccttgtgtccccacccttggctgtccccaggcctctcccttttcctgttttgatgctggctcagccaggcccggagacaggggcatgatgtcctaatcctccaggcgggagccaccatggagggttcccgtggactcagtcccctgccaagccacctttcccagcactcacatatgctccacctggcacatgatacacgtgggggctcctgagccccagcaccctgacttagtggggagggaccccaccggggtcccatgaagccccctgacttccactccaggcagcaggtcgggggaacaccagttgcctgccctggccgccagcacagcactcgtaaatcagggggtgtctggggcgtcggaaatggctgtgtggaatgtcggggtggggtaggctgggggtgagcccttaactcttagaagggtggggtgtggggcagaaggagcagatgcctggattcgagggtgcaggagatgggctggtgcagacgtggggcctcctggctgcaggggccggcagtgaagaggttagctcccagcccaggcagggcataaatttggggcacagctcccactctcaggacctgcccgtcacaatggccgtagggaagttcctgctgggctccctgctgctcctgtccctgcagctgggacagggctggggccccgatgcccgtggggttcccgtggccgatggagagttctcgtctgaacaggtggcaaaggctggagggacctggctgggtaaggacttccagggaccctctgtgacttcccaactttccccagccctgac

SEQ ID NO: 20515 - DNA, 2300 bp, Homo sapien
cattgacagcgaggcctcctcagccctcttcatggcggtaaggcccagcccggtggcgggggaggcctgggcgtctgtttgcagactcacccacctcccaaccctgacctctgcagaagaagaagacgccacccaagagagagcggaagccgtcgggagggagctcaaggggcaacagccgcccaggcacgcccagcgcagagggtggcagcacctcctccaccctgcgggcggctgccagcaaactcgagcaaggtgagtgcccgtggcctccccgctccccacagccacagccacagcctcctgacctctgttggggctcaggacagagaggggatggagatgcgggtggaggcctgtctctccctgatccccttgaaccctaatcctggcactgcccagcctggggtcctgcccaggggttctgcctcctgcctgcaagactcagccctgaccccactcccacagggaagcgggtgagcgagatgcctgcagccaagcggttgcggctggacacgggaccccagagcctgtctgggaagtcgacaccccagccaccatcaggcaagacaacacccaacagcgggtaagttgacgaggacagcagggggcagggcaagggctactggggacaatctcactgatgccaccttccccgtcctcccatcctcagcgacgtgcaggtgactgaggatgccgtgcgccgctacctgacacggaagcccatgaccactaaggacctgctgaaaaagttccagaccaagaagacagggctgagcagcgagcagacagtgaacgtgttggcccagatcctcaagcgactcaaccccgagcgcaagatgatcaacgacaaaatgcacttctccctcaaggagtgaggcttggtccaatacatggctctgccccccagaacttaaggctctcactgccccttcgccatcctagagtgaggctctgtccaatacatggctctgccctccagaacttcaggctctcagtgacccttcgacatcctgcttgctccctgactcccagggccccgtagttagcaattctggaaaagttaagccatctcctcctctggcccttccttctggaatcttcagatgcctgttaggccttcttattgtcctcctcctcctggctcggcctccctcacactgaccaagggcctgtgctgcccactgggtaacttctacagttctcccttccacttccctaagtctctcttcagctgtgacttatccaccacatagcccagtaagtcttcagttttggctgggcatgatggtgagcgcctgcagtcccagctacttgggaggctaagcccagttcaaggctgcagtgaactatgatggtgccactgcattccagcctgggtgacagaatgaaatcctggcacaaaaaaaaaaaaaaagtagccaggcatggtggcgggagcctgttgtcccagctgttccgtaggctgaggcacgagattcacttgaacctgggaggtggaggttgctgtgagctgacaccacgccactgcactccagcctgggtgacagtgagactctgtctcaataaataaaaaataataataaattgctcagatttctttgtttcctttttagatctgctactctgtttggataatgtcttattccttatgttttggtcccatctttcatggttttatttttatttatattttaggttttgagacagggtcttgctctgttcaccaggctggattgcagtgtccaccgtcttggctccctgcaacctccacctcttgggctgaagcgatcctcccaccttaacctttcaagtagtgcacaccaccacgcccagctaattttttaattttttgtagaggtgaggtctcactgtattgcccaggtcagtcttgaactcatgggctcaagcaatcctcccacctcagcctcctgagtagctgggaccacaggcgtgtaccattaaatgcctggctaatgtgttttgtttttgtttttgtttgagacagagtttcactcttgttgcccaggctagagtgcagtggtacaatctcggcttactgcgacctctggttcctgggctcaagcagttctcctgcctcagcctcccgagtagctgggattacgggcgcccgccaccgcgcctggctaatttttgtatttttagtagagacggtgtttcagcatgttggccaggctggtctcgaactcctggccataggtgatctgcctgcctcgtcctcccaaagtactgggattacaggcgtgagccactgcacccacccacgcctggctgatgtt

SEQ ID NO: 20516 - DNA, 2300 bp, Homo sapien
actccgtctcaaaaaaataaaataaaaaaaaacaaagacgtgaacttgagcaggccaggcccttcacacacggcatctccttaaagcatcctgaggactctatcatcccattttacagtggagggaaccgaggttcagtgagaggcagggacttgcccacgctcccagtctcatcccatactccccttctctctgttccagccccatatcctactccccttccctctgtcccagccccaacccatactccccttctctttgtcccagccccagggggcttcagttctttgaatttgaaactcacttctcccttgctgtttcctctgcttggaaaatccctgcctgccccagttccttctggccacaacttccatctggccttctctagcctccatctagagcttccccccatcactccttgtctgagacacctatttcctccacagcaatggccacagtctgtcatgatcttctctgtttactcgttctttttttttccttcttttccttcttttttttttttttttttttttgagacggagtttcgctcttgttgcccagactggagggcaatggcgcgatctcggctcaccacaacctctgcctcccaggttcaagcgattctcctgtctcagcctcccgagtagctgggattacaggcatgtgctaccacgcccggctaatcttgtatttttagtagagacggggtttctccacgttggtcaggctggtctcgaactctcaacctcaggtgatccgcccgcctcggcctcccaaagtgctgggattacaggcatgagccaccgtgcccagccgtttactcgttcttgtctcccccaagccagacactccatgagggcaaggactatttctgcctccctcattcctatattcctaggggttggcggttcctgacatttagtggtggatgagaaataaatgaaaacagacacatcgacggtgtctgtagttcatggcccaacttttgtgtcttgcccgccttccctttgcttagccaactcctatgcatccctcagtgcccaactgaaacctcccctcttctctgagccctcagagccccgctgtgcttctcctgctccttcctgggttgtagattcccatgctgtgactctgtctcttccacgacactgtaaccctcgagaggacactgtaatcctccgtggggagctggtttgacagattcaccttgcggggccccgaacccaggaggtgctggagtatttgcgaagtggagcaatgaatggttgcgccgtgagcatgcgcagttgtgttactgccatgattcgggggatgtgtgcatgcctggaacggggtaggggatcctgcatctccctcctgttctcggcagcttccttcccttccccccaggaagccagccagccgcccccgcgacgttacccttctcctggggcctcagagccctgcccatctcgggcagcttggacttgcaaagacccatccggccagcagctcttggggtggtcgcgccccgaccccgcccaggctctgacccctcctggctcggctcaacgtcacaagggtccccgccccggtcattttgcgggaatgacggggtccaccccttcggggtagggggaggaaatgaaccccaaacagacccatggggagccaagcggcggttcgacccgacccgagtaggcctcggttgctatggtgacgcggccttctgggccccccaggtccagagcggcaaggcgcatgcgcaaagtgcctgggagcccgcaagggggattcgtctccctcttcccacccaggatgccccacggtccttgggtgctgacgtcacgagagagggcggtcccccatttgatgaagttaaccgcgttatatacaagagcgccagcgacagaggcccgttagtttatctcagactcggcctaggtttgctgagtctaaaaagggaccgcggtggaccttttgaggtgaccatagccgccgaggagcataagtgactgcgcactgaggtggccacagtcgctaagaaggttgccatcgcgacgcggctgctcgagggtttcgcttccgggttaggcggccgcagaagcgtagaccgagtagcttgagcgcctcttccggttaccttttcccagcgccagaggcgcctagggttggggtcctcgctcaggcacagagacccgacaccgagcggcggcttccccgggatcgagggacgcgcacgccagaggagacgaaaggaacccgggtcggaccagatcggaaccactgaccattgcccatggcggccctagtgagtgtgg

SEQ ID NO: 20517 - DNA, 2300 bp, Homo sapien
aggctgaggctggaggatcccttgagttctggaggtcgaggctgcagtgagctatgatcgtgcctccacactccagcctgcgcaacagagagagaccctatccccactcccacccctcaagaaaatttcctaaaattaatcctgataactactactcagaaactcccccactcctcctcaaactgaccaatttcctctaagactcttcaaactgttttcctactgacccctggggcccctacccgtggcttcagcacctgtccgcaacattccagactcctaggaggcccggtcatctctggcctagtcctgatcttgcctgtgtccctgcagataccgtggagggctcaaatcccaccatgcgcggagtcctccagcggatcctggcccagcagggctggctagggctgtaccgaggcatgacccccacgctactgaaggtcttaccagcaggtggcatcagctatgtggtgtacgaagccatgaagaaaaccctgggcatataggctgtgagctggacgacacagcctaggcagaaatgggacaggaggacctgatgacccctggccccaaagagccctcgaggcctcaaggttcaggccctggggcagtttttggtggcaaaagcaggctgggggtgggggtggggctctgggtcagaagattcctgaagctggggttggtggtgggtggaggggggcagtgctgggtcagaaaactcctgggactccctccccagggtgcagcctgagacaagaaacgtggactccagtctggccccttgtgggtcgtcctggctccagggcgaaatggtgaacatgtcacacaacaaggaataaagagatggtttttgctgaacgtgtctggatacttgggcctaggagtggaactgggtgcatgagatccctggacccagtaggggagctggggaccttgggcctctgggtcctgaatgggaatttgtgtccaggagaggaagtgaggacctaggataggagcttgaggcttggatcccagggccttaggcgaagggagtgaggggtgtgaagtgaggggtgtgatcgaggctgtgatccctcgatcccggttgttggaacggttctggactcgtgagtggggctggttccttgagtcctgcaagagaactggacgctctagatggggggtcgagagagaagaaggcccgggggatcccgagtttcctgctttccggcctccccacctccggaagcgctcgatctctaaggcttcaagcgggccacgtgccgggcctacccaaccaggctgccggtgagctaacccagacatcaggcctgagttcgggcagccgattgccaccgcccacgtcggctgccattcactacagttcccgctaatcccctcgctgtctggtggccgactccgccccaatgcagcggcgcttccactggctcccaccaaaagtgggcgctttgatttccttcattcccatttgtccagaccagtgtcagtcaccgaacacccacccatgtcgctcagccattggcttagaagtcagggatagaaaaggattctggttaacaagggaagcaattaaagtccaaagccaacctcatcacccagaactcgtcaggaattggattaattggctgcccatctttacaagcaccacctctcacgtgcattcattggcttgtgtccacgactatcaaacctaacgcccacccagccggtccataggagtcttccactaggcccggccttacagtccacgtgactcttcagaaccgtcaatctaattctgaagccgccccgcgaatctggcactcgcgtttcattgggcctcctgccttctcagatctccttcatttgcccgcccagcacgggcagctcgcagctattgcctctgagagctgtcagtcactctgagcctcccgcccactgcccctcattgcactccgattggccacctcctacagagctcgcgattggtgtccggggtgcggcggctgcctcccattggcccgccggagtcgtccgtcacgtcggcggcgggaggggcgactctctcccccctcgtcgtcctcccagcggctgggttcccagagtgctccgcggccgtgtggagcgaggccttgttcccgcgttgagccgccgccgccgccgccgcctcctcagcttcagcctccgcgccaggcccggccccgccgcgccatgtcggactacagcacgggaggacccccgcccgggccgccgccgcccgccggcgggggcgggggagccggaggcgccgggggaggccctccgccgggcccgccagg

SEQ ID NO: 20518 - DNA, 2300 bp, Homo sapien
ctgactactttttttgttttttagagactgggtcttactctgtcacccaggctggagtgcagtggcacaatcatagctcactgcagcctctaattcctgtgctcaagggagcctcccccttcagcctcccaagtagctgggactacaggtgcacatgaccacacctggctaattttaaaaaatttttgtagaaaaatttcttgctttgctgcccaggctggtcttgaactcctggactcaagtgatcctcccgcctcagcctcctgagtagctgggattacaggtatgcaccaccacacccagctaattttcgttatttttagtagacacggggttttatcatgttggccaggctggtctcaaactcctgacctcaggtgatccacctgccttggcctcccaaagtgctagaattacaggtgtgagccaccacgcccagccaaaaataatttttaaaacttagccgggcgtggtgtccgcacctgtgttcctagccactcgggtggctgaagtgggagaaccacctgaacagagaggtcaaggggattgaccttaagtgtgccactatactccagcctgggtgacagagtgagaccatttcccatcagctgtttagcaaccttaattctttttttttttttcttttttttttttttgagacagggtctcgctctgtcacccaggctggagttcagtggcaagatctcagctcactgcagcctccacctcccaagctcaagcaaccctcccacctcagcctcctgtgtagctgggaccacaggcatggaccaccatgcccagctaatttttgtattttttatagagacaggggtctggccatgttgcccagggtggtcttgaactcctgggctcaagtgatccacctgccttgacctcccaaagtgctgctattataggaatgagccacggcgcccagcctagcaaagttttgttgttgttgttgtttgtttgagatggagtctcgctctgttgcccaggctgcagtgcaatggctcaatctcggcccactgcaacctctgtctcctgggttcaagcaattctcctgtctcagcctccagagtagctgagattacaggggcacaccaccaaacctggctaatttttgtatttttaggagagactgggtttcactatgttagtcaggctggtctcgaactcctgacctcagatgatctgccaacctcggcctcccaaagtgctgggattacaggcgtcagccaccacatcaggcctagcaaccttatttgtatctgcaaacttaattcccctttgccatgtaacaaatgtaagtcagcccaggctgctataaggaaacactaaagagcggggtcttaaactgcagacatttatttctggaggctgggaaatccaaggttaaggtggctggctagctcagttcctgctgagggatttcttcctgccatgccttcttgctgcgtcctcccatggcagacagagagagagaaagagctctggtttgtcttttccttatagggaactaattccatcttgcaggggccatcctcatgagttcatctaaccctgaggacctcccaaaggccctgtctccaaattccaacccactgggaaatagggcttcaacataagaattttgcggccggaagcagtggctcacgcctgtaatcccagcactttgggaggctgaggtgggcagatcatgaggtcaggagatcgagaccatcctggctaacacggtgaaaccccgtctctactaaaaaataaaaaaattagctgggcgtggtggcggatgcctgtagtcccagctactcgggaggctgaggcaggagaatggtgtgaaccccagaggcggagcttgcagtgagccaagatagcgccactgcactccagcctgggagactgagcgagactccgtctcaaaaaaaacgataataataataattttgacaggacacaattcaatttataacgataacatatttattggtttgggggatcaggaggtggatacttgggggaagggggccatcacgctgcccaccacacctaggaaggtcacaggggcgtttgtgacttcatcctcctcttggtcccccacacaatcctcccactagacactcccgcatggtagctggagcagcaaacaactgcttagggatttgaagccaggtgtcctaacttcctccatgggcgctcagcctggggaacctcagaacacttgctctaggatccagacactgtttaggagggtcaagaccttactcatcaaagccccgcctcccccccaacctccgcctcca

SEQ ID NO: 20519 - DNA, 2300 bp, Homo sapien
acttcctgttgcattcgctggaaaatgtggaggacgtgctgtatttctggaagcattccacggtgaggtgggggtggctttccccagctgaaggctgtgccctcttccccaggggggccttgctccgatctccccagggcttggatgggctggaccaggactttccagaaggagaaggcactggcagcagctgacggatgagggtctgttcctctcttcctccacttagggttcaagggtcccatttgggacatctctgctgtctgattgaagcgcagcccttgagacttacatcggggcctctggggacagcgtgtgggggttgcgggtacagggaagaaagagctcaccagatggggtacaaggcctcccaccttccacccacacagctctcttctgctgggttctctgcctggataaaagattctacggctgaacagaatcgttcaaaaaccacggtcttggccaggcgcagtggctcacacctaaaatcccagcactttgggaggccgaagtgggcggatcacgaggtcaggcgatcgcgaccatcctggctaacatggtgaaaccccgtctctacaaaaatattaaaaaaatgagccaggtgtagtggcaggcacctgtagtcccagctactaggaaggctaaggcaggagaatggcgtgaacccaggaggcgggagcttgcagtgagccgagatcgtgccactgcactctagcctgggtgacagagccacactccgtctcaaaaaaaaaaaaaaaaaaaaaaaaaaaacacggtcttcagaggatccaatgggagccactagagagggtagtgggggtttgctctagatccctagttcctgggtgaaatgtctatgagcaatgtgtctggtaggatctgatggcatctggagggggatccgtctgtgggatctggtgagaacctctttggagatccagagactcccaccccagacgattcatggggaccttggttagaaattctagactggaaatgattcctgcacggggactccatgtggaggagatccctgtgagatttcgtgggtccctgagaaggatctgctggggtctttataggggaggtgcctggtaagatcttgtatggccctgaagggatcttttggaatcattatatggaaaacccttgagtgggatccttcagtagaatctcatttgccctgagggatctttttttgctgttacagacaaggtcttactctgtttcccaggctgaaatgcagtggtgtgatcatagctcaatgtagcctcaaactcctgggctcaagcaatcctcccatcttggcctcctgagtagctgggactacaggcacatgcccggccaatttttgtagagaggggatcttgctatgttgcccaggctggtcttgaactcctggccccaagggattctcccacttgggcctcccaaagtgctgggactacagatgtgaggcatcacatctagcctggagggatctttatgtggcagatacttgaataggatcctttagtgggatttggcagatcctttggtgggatttagtaggatattgggatcttctaaggaggctgctaggttagatgctttggtgacacctggtaggacccaacaggactcttctggggtctccaagcaagagtcattggcagactctagggtatcctaggattcatagaggagactcccctatttaggactgagtcacatctccctgtccccaccatggcatgacacccccaacacctgtatctttaggtcctggacattggcgagtgcctgacagtgccggacgagttctcaaagcaagagaagctgacgggcatgtggtggaaacagctggtggccggcgcagtggcaggtgccgtgtcacggacaggcacggcccctctggaccgcctcaaggtcttcatgcaggtgaggggctctggagagacctgccccctcccccaggcctgacacctgggaggggacctccaagctgttgtctccccattcaggtccatgcctcaaagaccaaccggctgaacatccttggggggcttcgaagcatggtccttgagggaggcatccgctccctgtggcgcggcaatggtattaatgtactcaagattgcccccgagtcagctatcaagttcatggcctatgaacaggtgagggcaggtacagggaggaatgtgcttgccatagggaagactgggctgtacataaagatttacgggattggcttgggggtgggtggtgaacacaggtccccaggatcaggcatctgctcctctgcatgaatgcctgca

SEQ ID NO: 20520 - DNA, 2300 bp, Homo sapien
tctgcggggaggccccgcctaggtgggagaagaggcggggcgggcgggctcagcccaggaggcgctgaccaataggaaaccgactttgcagccgcgccgcgcgttgattttctgtttcccagtcagagtgggaaccgagaaaggaagcgcgcgggcgggaagaagggacagtgggagagcatcgctcctggatcttctgtttctgcggccgagcggggaaggtgtaaggcgcgggcgggcagagagcgagcgagatggtgcacggttcttgcgtgcgtctgggaaaagcgagaacttgagttcctgaagattagtgggtgtggcggggaggtcaagtggaaggggattatgaaacccaatccccgacagcgctctaccttgcccccttgggcaaagggggaaagggtaaactgaggcacgcagaggcggaactctgaaaccagacctgagaccactgagctccctagcccgtcttcccagaaggaactctggtgttcctcggctgtgcaataccagaccatcccagacattccctccccacgcccccagctccgccctcggtcccctccccccaatgcaggtcgggggaggagacgcaagttctggcgcgggcggcgacggctagccgtcaccacctcccgcaagtgccagagccgagcggactgcgcggaggctgcggagccggcggccgcgggagctgaccctgcggggtcccggggggggagggggagccgcgaagcccccactgaggccgccgctgccgggcctcccctcccccccgggcgggcgccatgcgggggagcccgggcgacgcggagcggcggcagcgctggggtcgcctgttcgaggagctggacagtaacaaggatggccgcgtggacgtgcacgagttgcgccaggggctggccaggctgggcgggggcaacccagaccccggcgcccaacaggtacccccacccccagggacctcctcccctcccggccccgcccgctcccggttacccaagcccctgaactgggcggccggagccaccagggactacctgtggctggactccagaacctgtgtctctgtctcgttccccctacccactcgtgtttggcctaacgggatcgctcaagacagggacgccgaggccccaagcctgcagttccgcggccaacacccgatccccctgctgcggggcagggggcgtctgcctgggaagagatgggggcgctttcctgcccactgcccgggacacaccctcctccagactgcacagcccatgacgtgccctgctctcacctccaggagacacaccctccatcctctgggcacctactgccctggcctgcagctgccccgatccctgtgtttacattccctggcctgccctttcatgggccgttcacgggcctggctcactgtcccgggctgccccagccagggacccaatcctgtctgcggtcacccgcagctgggaatgcacctataacaagactttcctcccgctgcccccacctccactttgcaggtccttcccacacctgtagccccagatcgctctaagagaaccacagcaaccctgagagcagtccaacctcccacttcccaaatgggaaaaaccaaggcctcagccactccgcttggttctctcctgccccacatcgcccagggcttcctccaaagggaacccctgggtcccccatgtggacagggttttttaagaggcagctgggttcaacaggaatgagatacctaaaaaaataacaaaaactaaaaacaagagacagctggaaggacaggctttacagatgagaactgaggttaccatttcctggttctgtgaccttgaactggtgacttgaccttgcagagcctcagtttgctcaccaggaaaactagaccactcacacccaccgcacagacctgtggtggctgtagggatctggctgagaagttagctgactgagggagaagtggggtgacgtcttctatccccttcctcaaggcgctgggggctctgggttcctaaggcataaggtgacatgcgtcccctccagatcaggagcaggttcctggagccacctctatcccctttccctctgtcagggtatctcctctgagggtgatgctgacccagatggcgggctcgacctggaggaattttcccgctatctgcaggagcgggaacagcgtctgctgctcatgtttcacagtcttgaccggaaccaggatggtaaggtcgggcgacctgcctgcaggccccaagggatagggctgtgggggccctagagacatcagtggggttagaact

SEQ ID NO: 20521 - DNA, 2300 bp, Homo sapien
cgatcctcccatctcggcctctcaaattgctagaattagaggcctaagccaccgagaccggccaatgctgtatctttggataaaggatgatgataataacaagaccccctcctgaggacccttgggtgacaagtgatgattaaagaataattaggccaggccgggcgcggtgactcacgcctgtaatcccagcactttgggaggctgaagcgggaggataatctgaggtcaggtgttcgagaccagcctggtccacaggtgaaaccccccccccccgtctctaataaaaatacaaaactcacggctgcggtcgggcatggtggctcatgcctgtaatcccagcactttgggaggccgaggcgggcggatcacgaggtcaggagtttgagaccagcctaaccaacatggtgaaaccccgtctctactaaaaatacaaaaattagccgggcgtggtggtgtgcgcctgtaatctcagctacttgggaggctgaggcgggagcattgcttgaacccgggaggcggaggttgtggtgagctgagatcgtgccattgcactccagcctgggcaataagagcgaaactccatctcaaaaaaaaaaaaaaaaaaaaaaaaaaaaaaaaaaaaaaaaaaaaaaaactcactgctgcgtgcgatggctcacgcctataatcccagcactttgggaggctgaggcgggcggatcacgaggtcaggagttcgagaccagcctggccaacatggtgaaaccccgtctccactaaaaatacaaaaattagctgggtttggtggcgggcgcctgtaatcccagctactcgggaggctgaggcaaaagaatcgtttgaatccgggaggcggaggttgcagtgagccgagatcgcgccattgcactccagcctgagcaacaacagcgaaactccgtttcaaaaaaaaaaaaaaaaaaaagataattaattctttctagggtatagagtgatggttaaggatcccagatctctttaaaccctgttttgccccttagtggtcatcaggactggggagaatgacttaacctccgcttccttatctgcaaagtgcgaacgccagtaccacctaccttatagggttttggcaaagacgactcgagaggtgagtaaaagccctggcatgtgcaaagcactgaatcaaagtgagatttgttatcgagtattcgctgtcaagtggtctgggctcccttccccctaatggtggatcgagaaactgcgcccgaaactagcagtagggacattccgcaggtgcagcgagtgcgacaggctggggccctgcctccagcgctcgaccactgggatcctcaaccccgcgcccgggtcactgagccaccccctccccacgccgctcagcgtctgattgcggccgcggcccctttaagatctcctggcaggcggtgggactgcgggctggaggcagtcgggggtctgcggggaggccccgcctaggtgggagaagaggcggggcgggcgggctcagcccaggaggcgctgaccaataggaaaccgactttgcagccgcgccgcgcgttgattttctgtttcccagtcagagtgggaaccgagaaaggaagcgcgcgggcgggaagaagggacagtgggagagcatcgctcctggatcttctgtttctgcggccgagcggggaaggtgtaaggcgcgggcgggcagagagcgagcgagatggtgcacggttcttgcgtgcgtctgggaaaagcgagaacttgagttcctgaagattagtgggtgtggcggggaggtcaagtggaaggggattatgaaacccaatccccgacagcgctctaccttgcccccttgggcaaagggggaaagggtaaactgaggcacgcagaggcggaactctgaaaccagacctgagaccactgagctccctagcccgtcttcccagaaggaactctggtgttcctcggctgtgcaataccagaccatcccagacattccctccccacgcccccagctccgccctcggtcccctccccccaatgcaggtcgggggaggagacgcaagttctggcgcgggcggcgacggctagccgtcaccacctcccgcaagtgccagagccgagcggactgcgcggaggctgcggagccggcggccgcgggagctgaccctgcggggtcccggggggggagggggagccgcgaagcccccactgaggccgccgctgccgggcctcccctcccccccgggcgggcgccatgcgggggagcccgggcgacgcggagcggcggcagcgctggggtcgcctgttcgagg

SEQ ID NO: 20522 - DNA, 2300 bp, Homo sapien
tgctgggattacaggcgtgagtcaccgcgcccggcctggcctaattattctttaatcatcacttgtcacccaagggtcctcaggagggggtcttgttattatcatcatcctttatccaaagatacagcattggccggtctcggtggcttaggcctctaattctagcaatttgagaggccgagatgggaggatcgcttggggtcaggagtttgagaccggcctgggcaatatagcaagacacccaactctacaaataataataataattattattattttttttaaaaaggaaagaaaacaaagatacagtcgtgagggcatatttagttcacgcccagcctctgcctagacaggtgtgctggaacaggtgtgccccagacaaatgagtctcttctaagaggctccccagcagaggttttcatttacagttgttccttgcaggtgccatacagcatggagtgatacagaggtttttttccatgtaagtgcccctaaataggtgttttctcacagatacattcttgacaggtgggcctcagtgtatgtgagcccctgccctgatggttttacccacagatgtgtgtcaatgtgagtgtgccccgtgcagatgttccaagttcttcccctcacttgagctcaattccatacaggtgttcctcctacaaggtgctttctcttacctcacaggtatgtttctgagcaggtttccctccacccatgaatgcattctacagtctcccgccccgtaggtgtgtttcagttaagtatacacccatctgggtatgtttccatacaaccgagtcccatacaggtttacgtaaatgcaggtgtgtctcatacaggtatttacaagacactgacacccaggaattcccccaatgcaagtgccgtacatttcataggtgagccatgcagatatgttcctaaaacaggtctattccacatcagagtgccttagttagctgtttgtgatgataatgcaggcgtgttctatagagatactgtccaccctggtggtatgtatccatttggttatatttcttttctttttttgacagtcttgctctgtcacccaggctagagtgcagtggcgtgatctcggctcactgcaacctccgcctccagggttcaagcgattctcctgcctcagcctcccaagtagctaggattacaggcgcccaccactacgctagctaatttttgattattttttagtagagacggggatttcaccatcttggctaggctggtctcgaactcgtgacctcgtgatccacctgcctcggcctcccaaagtgctaggattacaggcgtgggccaccatgcccagccttggctatatttcgtatagctgtgattcaatgcagatttttttttttttttatgagatggagtttcactcttgtcacccagggtggagtgcaatggtgcaatctcggctcactgcaatctctgtctcctgagttcaagcaattctcctgcctcagcgccccccgagtagctgagattacaggcacctgccaccacacccggctaatttttgtatttttagtagagacaaggtttcaccatgttgggcaggctggtctggtttcgaactcctgacgtcaggtgatcctcctgcctaggcctcccaaagtactgggattacaggcgtgagccgccgcacccggccatctgttttctgtatgttcttatatgtgaacacctgtgcagttgtcttctgtacaggtttggttccacacaggtgtttaccatacagctgtttttttgtttttaaaatttttttagagacagggtctcactttgtcacccaggctggagtacagtggtacaatcatagctcactcactgttacctccactcctgggcccaatcgatcctcccacctcagcctcccaagtagctggggctacaggtgcgtgccatcacatctggctaattttcttattttttgtaaatatggggcctccgtctgtgggccaggctgatctcgaactcctggcctcaagtgattctcttacttcggcctttcaaagcgctgggattacaggatcacgccaccgcccccggcttattttcttctttttatttatttgtttatttatttatttattttttgtagagaatgaggcctcgctgtgttgcccaggctggtctcggactcctggcctcaagcaatcctcttgcctcggcctctcaaagtgttgggattacaggcgtgagccattgcgcctgggcaggtattttttctcattaagcgctccccatccaagtctgccctaggcaggagtgcctag

SEQ ID NO: 20523 - DNA, 2300 bp, Homo sapien
aaataggtgttttctcacagatacattcttgacaggtgggcctcagtgtatgtgagcccctgccctgatggttttacccacagatgtgtgtcaatgtgagtgtgccccgtgcagatgttccaagttcttcccctcacttgagctcaattccatacaggtgttcctcctacaaggtgctttctcttacctcacaggtatgtttctgagcaggtttccctccacccatgaatgcattctacagtctcccgccccgtaggtgtgtttcagttaagtatacacccatctgggtatgtttccatacaaccgagtcccatacaggtttacgtaaatgcaggtgtgtctcatacaggtatttacaagacactgacacccaggaattcccccaatgcaagtgccgtacatttcataggtgagccatgcagatatgttcctaaaacaggtctattccacatcagagtgccttagttagctgtttgtgatgataatgcaggcgtgttctatagagatactgtccaccctggtggtatgtatccatttggttatatttcttttctttttttgacagtcttgctctgtcacccaggctagagtgcagtggcgtgatctcggctcactgcaacctccgcctccagggttcaagcgattctcctgcctcagcctcccaagtagctaggattacaggcgcccaccactacgctagctaatttttgattattttttagtagagacggggatttcaccatcttggctaggctggtctcgaactcgtgacctcgtgatccacctgcctcggcctcccaaagtgctaggattacaggcgtgggccaccatgcccagccttggctatatttcgtatagctgtgattcaatgcagatttttttttttttttatgagatggagtttcactcttgtcacccagggtggagtgcaatggtgcaatctcggctcactgcaatctctgtctcctgagttcaagcaattctcctgcctcagcgccccccgagtagctgagattacaggcacctgccaccacacccggctaatttttgtatttttagtagagacaaggtttcaccatgttgggcaggctggtctggtttcgaactcctgacgtcaggtgatcctcctgcctaggcctcccaaagtactgggattacaggcgtgagccgccgcacccggccatctgttttctgtatgttcttatatgtgaacacctgtgcagttgtcttctgtacaggtttggttccacacaggtgtttaccatacagctgtttttttgtttttaaaatttttttagagacagggtctcactttgtcacccaggctggagtacagtggtacaatcatagctcactcactgttacctccactcctgggcccaatcgatcctcccacctcagcctcccaagtagctggggctacaggtgcgtgccatcacatctggctaattttcttattttttgtaaatatggggcctccgtctgtgggccaggctgatctcgaactcctggcctcaagtgattctcttacttcggcctttcaaagcgctgggattacaggatcacgccaccgcccccggcttattttcttctttttatttatttgtttatttatttatttattttttgtagagaatgaggcctcgctgtgttgcccaggctggtctcggactcctggcctcaagcaatcctcttgcctcggcctctcaaagtgttgggattacaggcgtgagccattgcgcctgggcaggtattttttctcattaagcgctccccatccaagtctgccctaggcaggagtgcctagtgcacgggtacatacataccccgtgcgtctccacacctgtgcgctcccacagatatgctcgcaatgcaggtgtaaggtccccctcacacctgcgcgcttccgcggtctccctccccgcatccccattaagggactggggtcccgttacaggtgcgcccacagcgcggccccgcccccttcttgactccgccctctcagcgaggctcaggtgcacaagccggaagtgcgctctcccaggtgagtgactaaactttccgggtcacgtgacagggcggagccggtggggtcggacccacagaacgaccgacggaccgagggttcgagggagggacacggaccaggaacctgagctaggtcaaagacgcccgggccaggtaggaaggcaggacgcaccgctaggcctgccccctcgcccgtccaccctgcccgtcccgtcccgtcccgtcccgtccccttcctttccccagcccaggaacgcgctcctgggagttaa

SEQ ID NO: 20524 - DNA, 2300 bp, Homo sapien
gccgagatcgcgccattgcactccagcttgggcaacaggagcgaaactccgtctcaaaaaataaaaataaaaaattagccaggcgtggtggtgcacacctgtggtcccagctactcaggagagcaaggtgggaggatcaactgagcccaggagttcgaagctatagtgagctatgatcgcagcactgcactccagcctgggggacagagcaagaccctgtctcaagaaaaaaaatttcttttagatggagtcttcctctgtcgcccaggctggagtgcggtggtgcgattccgcctcactgcaacctccgcattccgggttcaggcgattcttccgcctcagtctcccaagtagctgggactataggcgcggcccaccagcccggctaatttttttttttttttttgtacttttaacagagacgtgttttcactatgttggccaggctggacacggactcctggcctcaggtgatccgcatgcctcagcctcccaaagggttgggattacaggcgcgagccaccgcgcccggcctacaaggaaaaatttaaattaaaaaatttaaaaagccgggcgcggtggctcacgcctgtaattgtagccctttgggaggccgaagcagcaggatcccttgagcccaggagttcaagaccagcctgggcaacatagggagactttgtctctattattattattattattattattaatttcttttaaagaaagaaaaaaaaaaactcccaggactgacctgagcccttggctcctcccagaccactcaaccttagtcatagccctcggaatccccaatccccacatctggctcagccacccccgcccctccacgtcccacccaggtcaccgaggcagaggaacttcttcaaaatctgtttcagcagtccctgtctgggccccaggcctcagtggggcttgagctggtgagtagctcccattccctgggcgctggaccttaggtggatgggaaggctgcgtcccagccatcatgaccacagagtcgtgcctcttccccagggcagcggagtgacggtctccagcgggcagggtatccccccccctacccgggggaatagcaagccggtgagcggggctcggggaccctggaaggtcgggggtccaggtgaggccagcctcctgactgattgatccccctgccaatacccccaccagctttcctgcttcgtggccccggactccggccgcctgccatccatccctgagaacgtgagtggggaggggtctctgggggtgagaacaggtcccgaaacccggaccggggatgcaagatccaggggcccgtccacgcccagagcgactctctgatcctcagaggaacctaacggagctggtggtggccgtgactgacgagaacatcgtggggctgttcgcggcgctcctggccgagagaagagtcctgctcaccgccagcaaactcagcaccgtgaggcggggtccgccgggccggggtgggagcagggcctggctccgccccggggggcgggacaagggggctgattcctggctctaaccctactgcgcgagacccgagggcgaagtcctggccccgccccttcgaaggtcttggagagttgaactctggccccgccctcgtgggagggggctgcgctgcagctcctcctttttgggagtactgtgctcaggctccacccactatgggccgcaacacgtctggctccacccctccggaccctcagggacactgagaactagggacttatacacgtgggaatccagggacccagggacccagggactcagggactcagagatctgaggacccagggacccgaatacccagggacctaggaacacagggactcagataacaaggggcgcaaaaaactagagacccatactcccagggaccctgaaacccagggtcaaaggcagacgtggagactggctccacccctaggggcggggccaaatgattgccttccggctccacctctttgggtggggttacgtcttggatccacccctaggggcgggacaagggcggtctacgtcatagctccacctctttcggggtggagtcagtggaggctcagtccttgctctacctgcatggggaagactcaggggtgttgcctattaactgcgccccttacagagagggatcaggacggtatgagtcctggcttcacccgcttaaagcactgtaagtggccaaattcctggtctccacatgatttctaaaggggttcgagttgtcactcattatccagcagtggatggggagggggaacaggagactgggg

SEQ ID NO: 20525 - DNA, 2300 bp, Homo sapien
tgtgtaggtgtgaccctgactatatcatgttctgtttttgtgcctgcagatatgttcacatatcctgtctcaacatgactacgtctgtccacctgtgtgcctgtgtcttttttgttgtttttgtttgttcctgtgtttgtttggagatagggtcttacaccgttgcccaggctggagtgcaatggcacgatcacagctcactacaacccccaccacctgggctcaagggatcctcccgcctcagcctacagaatagctgggactactgcacctggctaaagttttaatttttgtaaagatggggtcttgttatattgctcaggctgatctttaactcctggcctcaaacaatcctacctcagcctcccaaggtgctgggattactgagccactgcctccagcccctgtgtctttcatagtctgcagcacggcttgagtgtgtcgggctgtcatgagtatctggctgtcatgtgagtccagctgtgtctctctctgcatgtggccgggtcttggctataactatatctggttattacttgagctatgtctgtgctgtgtttccatctatctgggtctatttctctgttattctgtttgtatcaatggctgtggtctctgtgtaactgtttattgtgtctctgtctgtctctgcatttgtttgtttgtttgtttgctttgtttttgtttttgtttttgagatggagtctcactctttcacccaggctggagtgcagtggcacgatctcggctcactgcaacctctgcctcccggattcaagtgattctcctgcttcagcctcccaagcagctgggattacaggcacatgccaccatgcccagctaattttttgtttgtttgtttgtttttgattttttgagacagagtcctgctctgtcgcccaggctagagtacagcggcgcgatatcggctcactgcaaactccgcctcccaggttcaaataattctgcctcagcctcctgagtaactgggattacagatgcccaccaccgtgcctggctaatctttgtatttttagtagagactgggtttcaccatcttggccaggctggtctcgaactcctgacctcgtgatccacctgcctcagcctcccaaagtgctgggattacagatgtgagccaccgcacctggcctgtatttttttttaattagagacagggtttcaccatgttggccaggctggttgcaaactcctgacctcaagtgatccgcttaccttgtctttctgcgcacaatgggtgtgtaactgtgactaagttgtttttttttttttttgagacaggatctcactttgttgctcaggctggagtacagtagtgcaatcttggttcactatggcctcaaactccccaggctcaggcgatcctcctgactcagcctcctgggtaagctgggactataggtgcgtgccaccaccgccagctataatttttgtagcttttatagacacagggtttcgccatgtttcccaggctggtctcgaactcctgggctcaagcggtcctcccaccttggcctctcaaagtgctgggattataggcgtgagccactgtgcccggcctgggactatgatccagctgtaggactccctatctctccatgtctgtcgtctctggctcttctgcactcggtttgtctgtgctgatgacttcctgagcgtgtaactgtctgtgtctgtgtctgtctgtccgtccctgtgcctgtacttcgtgctctttgtccccatccctggcccccccaccgtccactttacaggtggctccctctggtggtccaccagtgaccgtccaggccaaatggaccaagggaaagagacggggaggcatttcattaatagacagactgtgaatcttggctgctgcggagcggggaaggagagatgagggcccaggcacgatggggggaaccagacacagtccagcctggcggggacggagctgggggtctgccttcccaggctgaccacttattgcccacccatccccaacataattagcaggcaggatgcctgggtttctcacgggggtgggggcagggcctctgtccggggacgtcacccgttaaacttcctctctcagccacacaggaagctgagccggcttggggcccagcatacacaggcccccaggacccctggggagagggccccgctgggctggccctgcagggaccatggaatccagagctgagtaagagccaccccatccctcattctctggtacaagattcccgggccaggcctgagccggggcagaggggagctggggctggagcaggccc

SEQ ID NO: 20526 - DNA, 2300 bp, Homo sapien
tttgggaggccaaggtgggcaggtcacgaggtcaggagttcgagaccagcctggctaacatggtgaaagcccgtctctactaaaaatacaaaaattagctggtcatggtggtacgtacctgtaatctcagctactggggcggctgagccaggagaatggcttgaacccaggaggcagaggttgcagtgagccgagatggcaccactgcactccagcctgggtgacagagcaagactctgtcaaaaaaaaaaaaaaaaaaaaaaaattagtggccatggcaaatgtgaggtcccaaccacatggccaagatggcttaccccacctcccaccagcaatacaccaaagtccttgagtgggaaagtcaaggatgggaggcgaggaggagacttcctgggagggcgggactggaggctgtccaaggaagcagccccaggaggcttgaccttcacatgaggggcagcacaggaagtccagtccagcctctgataatacttagactcgagaaagatacaatttattgttgactctgcaggaggggagactatcgccaccttgttaactgggtcatcgcataatcagaccctggagggtgggccttcctcaccaccccaacttgcaaatgtgaaattcagacacagagaggagcaccagggcaaggtcatacacctaatgctacaggaaatgcagaggcaagggagatggtgggtaataaattataatactgagctgggcgcagtggctcatgcctggaatcccagcactttgggaggctgaggcaggaggatctcttgagctcaggagttggagagcagcctggacaacatagcgagaccccatctctacaaaaaatcttgaaaattagccaggcgtgatggcatgcacctgcagtcccagctacttgggaggctgaggtgagaggattgcttgagcccaggacattgaggctgcagtgagctatgagcatgccactgcactacagcctgagggacagagcaagaccctgtccgaaaatatatatatataggccgggcgcgttggctcacgcctgtaatcccagcactttgggaggcagaggtgggcagatggcctgaggtcaggagtctgagaccagcctgaacaacatggagaaactttgtctctactaaaaatacaaaaaaattagccgggcgtggtggcacatgcctgtaatcccagctactcgggaggctgaggcaggagaatcgcttggacctgggaggctgaggttgtagtgagccgagattgggccattgcactccagcctgggcgccaagagcgaaactctgtctcaaaaaaaaaaaaaaaagggtatagatatagataaagataaattacaatactggagaggaggggtgttattttgggaaagcgaggcagccctggggactcactgtccccctcccaatatgaacccagctgtcttactcctccactctcctccttaggccaggctgggggtgaccccacctgggacgagctcaatgcccagtagaggtgtaccaggggagcccaccagcatctgcacccaatcatgggaggaaaatcgtggttttactatgcagcttcaggacaagccctccaggaacctaccgccccccacccgcaaaccagatcgccgctccggagcccccagcccactgggagggctcgcggttactgcaaggattctggcgaatgaggtctaaatagaatgagaaggggggctgcggaccgagaaactgaggcaaggcctggggcgggagggtggaggctaagggggaggggcaggacttctcagatgcctgtttaccaggcgctcccctcccttcctccgcccaatttctgcgggtggccaagcctggctgggggctgggacgggggagactgcactggtggctccctaaggggcctcacccccaaggcaggggtcggagcacgtggcgtcccggacttctctgggaggccccctggggagggaggtccctgcaccacctccccccaccccagccccctccatcatcccggggcgggaccaaggggcggagcgggagggtgaccggccgtgacgcgtgccccgcccgctcatatagcggctcccgggggcgcagggaccgtgctccgccgtctccgccgcatcttccaccctcgccgccgccgcagctccccgcgctcgtgccaccgccgccgcgtccaccctcagcgccaccgccatgcgggagatcgtgcacctgcaggccggccagtgcggcaaccagatcggggccaaggtgctcggggaacggggcccggggaggcagtggcgg

SEQ ID NO: 20527 - DNA, 2300 bp, Homo sapien
gaccaggacttcaacaccagccaagggctttccccgggtcacgtccctctccatctgggagtgcttcctcttttggggccaagttttcaccgcttcttggcccatcctcccagccccggattggccgcctccagcaggccagagcagatgggaaatgtgtttcctccaactcgctcaacactgtccctttcttgcaaggggaatttctccacctggactctccgagcttctgcttgtagggtcccgaggggctcctgccgggaaccatccagtgggtgggtgggggcaggccagggaaggcccaggggtcccggggaaggtggccaggagggctgagcatgacactcagggttccactggggggttggggatcagggggcagatgctccaggagtgagggtggttgaggcttggctgaagcctgacccttcttaggaagtgctggatgtgggggaacccgggggagtcctagtgatggggggctagggggtgctgagaggaggggaaggagacaaagagagactaaagaaggaaaaggagagagacagggagagacagagagtcagagagagacagagggaatcagagacagagagaaacagggagagagacagaaagagtgagagccagagacatacagagacagggagagacacagagatgcataaagagagggagtcagagatggagagagacagagataacggagccagagatagggagagtcagagacagagagaaagaaacacacagactgacacagataaaagagccagagacagggagaggcagagacaaagagagatacagagacagagataacagagccagagacagagagacagagacagagataacagagccagagacagggagagagtgtcagagacagagacagacacagagataacagagccagagatagggagagtcagagacagagagaaagagacacaagacagacatagataaaagagccagagacagggagaggcagagacaaagagagatacagagacagagatagcagagccagagacagggagagagtgtcagagacagagagacagacacagagataacagagccagagatagggagagtcagagacagagagaaagagacagacagacatagataaaagagccagagacagggagagagacacagagacagagacatagagacagagataacagagccagagacagagtcagagacagagacagagagagccagacacagagacagagagagagagtcacagccagagacagcgacagagataacagaagcagagagagggagaaagataacagagccagagacagtcagagacagagatagagagacagagataacagagccagagacagatacagagacagagataacggagccagagatagggagagagagtcagagacagagagagatatatagacagagataacagagccagacatggggagagagagtcagaggcagagagagagaagacagatagagagacagagccagtgataacagagccagagacagggagagagagtcagagagagatacaatgagagacagagataacagccagagacagagttagacagagagatacagagacagagataacagagccagagacagggagagagaattagagacagagatagagagagacagagacagagataatacaggcacagaggcacgcatagacataaattggcagagagagagaaagatctctttccacccactgcagaggcaatcaacagagacagagaaagacgttaacggggagacacagagagcaaaggagactgagtcagcaagagacccacagagataccgggaaagagcggcagagagggagaaccagggcgatggagagacagcagggagaaaggaacctggagccgagcttggaaggccggaaacggaaaggagagcgaaaagcggagagagatccgagtggagaaaattccgcagagtcacggggacgaggggaaaggctctgggctgggaaggggcgtggccgcgggcggaggggcgtggccgcgggcggaggggcgtggcctccttttgtagccaagcagctataaaaagcggcgcgctgtgtcttcccgcagtctctcgtcatggaatacgcctctgacgcttcactggaccccgaagccccgtggcctcccgcgccccgcgctcgcgcctgccgcgtactgccttgggccctggtcgcggggctgctgctgctgctgctgctcgctgccgcctgcgccgtcttcctcgcctgcccctgggcc

SEQ ID NO: 20528 - DNA, 2300 bp, Homo sapien
tcacccaggctggagtgcaatggtgtgatctcggctcactgcaacctctgcctcccgggtttgagcgattctcctgcctcagcttcctgagtagctgggattaaaggtgcccaccaccacacccagctattttttgaatttttagtagagatggggttccaccatgttggccaggctggtctccaactcttttttttttttttttgagacggagtctcactctgtcacccaggctggagttcagtggcgtgatctcggctcactgcaagctccacctcccgggttcacgccattctcctgcctcagcctcctgagtagctgggactacaggcgcccgccaccatgcccggctaattttttgtatttttagtagagacgggggtttcaccgtgttagccaggagggtctcaaactcctgatatcaagtgatccgcctgcctcagcctcccaaagtgctgggattacaggcgtgagccactgcgcctggctccttcttggtgtttcttgactttcatctgcctcattcagtttctgtttctgttttcacacggctccttctctatgagcctcttttctctccacctgagggcccactctaatccagtatgacctcatttaagcctaattatatctgcaaaaaaaaccccgtaatttcaaaatgaggtcatattctgcagttccaggaggccatgaattctgggaggacaccgttaacccactacagccatcgagaacagcagcaggaggctggatgcggtggctcacacctgtcatcccggcactttgggggacctacgcagcaggatcgcttgagcccagatgtttgagaccagcctggtaacatagtaacaccctatcctctaccccccccaaaaaaaaaattagccgggcatggtagcgtgtgctggtagacccaactatgcaaaaggctgagatgggagggtcactgaagcccaggagtttgaggctgctgtgagctgtgtggcgccactgcatccagcctgggcaacagagcaacactctgtctctaaaaatattaatttaggccgggcgcggcggctcacgcctgtaatcccagcactttgggaggccaaggcgggcagatcacgaggtcaggagatggagaccatcctcgctaacatggtgaaaacccatctctactaaaaatacaaaaagttagccgggcgtggtggcgggcgcctgtagtcccagctacttgagaggctgaggcaggagaatggcgtgaacccgggaggcggagcttgcagtgagccgagatggcgccactgcactccagcctgggcgacagagcgagactctgtctcaaaaaaaaaaaaaataaataataaaataaaataaaaataaaaaataaaaatattaacttaatttaactttaaacaaaaaagcaggtggtctccaagaatgcaggagataactgaccgggtgcagtgtctcatgcctttaatcccagcactttggaaggccaaggcgggtggatcacccaaggtcaggagttcaagtccagcctggccaacatggtgaaaccccatctctactaaaaatacaaaaaattagccaggcatggtggcgcgcgcatgttactcccagctactcgcgaggctcagacaggagaatcgcttgaacccaggagatcgaggttgcggcgagctgagatggcgccactgcactccagcctgggtgacagagggagacctccgtctcaaaaacaaaacaaatcaaaaaaatgcaggagaggggtacacgaatatttggggagcacccccaattcttggatgtctgctgtatccccagtgcacagcacaatctaatccctaataaatgtgcagtggaggtttgttgaataaatgaatgggccccagaagaatgaggtggagaggggaataggaagattgaatgtctcctgcctgaaggtcgggcggggaggggttgggggcaggcaactctgaggctcacccggggccactgcctgcatcctggcaactgcctccacccactttaggatcttcagactggcagcggttggagggaatttcccctcgccaattgctcaagtccctcccctcgaccggccggacatccccagagaggggcaggctggtcccctgacaggttgaagcaagtagacgcccaggagccccgggagggggctgcagtttccttccttccttctcggcagcgctccgcgcccccatcgcccctcctgcgctagcggaggtgatcgccgcggcgatgccggaggagggttcgggctgctcggtgcggcgcaggccctatgggtg

SEQ ID NO: 20529 - DNA, 2300 bp, Homo sapien
tttgtctgtctctacagatctctttttttttttttttttttgagacagtctcatgccattgcccagcctggagtgcagtggcacaatctcagttcattgcaacttgtgcctcccgggttcaagtgattcttgagcctcagcctcccaagtagctgggattacagaagtgtgccaccacacctagctaattttttattttttatttttgtatttttgatagagacagggtttccccatattggccaggctggcctcgaactcgcgacctcaggtgatccacatgcctcagcctcccaaagtgctgggattacaggcgtgagccaccgcacccagcctatagatcccatctctatctctctgtgtatcttctattggttctgtctctcgggagacacctgaccaattcagggagggctcctgtgagaagtttcttgagtcaagacgcagatgagcagggggagcctgctttggagatctagggaagatggttcccagcagcaggaagaggaagtgcaaagacccaggatatctgtctggggcagagtgagcaaaagcacgagggtccaaccacagaggccccagtgaagggcacttcgtgtcttagcctaagctcaggggcaagctggcagcaaactgtatctataaagggccacataagtgtttttggctttcagggccaagaggtaaaatcaaggatattacaaagatacttatgaaacaagacagaagccaagtgcagtggctcacgcctgtaattctagcattttgggaggctgaggtgggcagatcacctgaggtcaggagttcgagaccagcctggccaacatatagacaacatatatgttacaacatatataatggccaacatataatacaaaaattagctatgcatggtggtgggcgcctgtaatcccagctactcaggaggctgaggcaggaaaattgcttgaatccgggaggcagaggttgcagtgagccaaaatggcaccactgcactccagcctgggtgacaaagtgagactctgcctcaaaaaaaaaaagaaagaaaaaggctgggtgcggtggcttatgcctgtaatcccagcactttgggaggccaaggcaggcggatcacgaggtcaggagattgagaccatcctggctaacacggtgaaaccccgtctctactaaaaatacaaaaaattagctgggtgcggtggtgggcgcctgtagtcccagctactcaggaggctgaggcaggagaatggcgtgaacctgggaggcggagcttgcagtgagccgagatcgcaccactgcactccagcctgggcgacagagcgagactccgtctcgaaaaaaaaaaaaatccacgcttgaatgcatgcacactcatacatggacctccccacacacatgaacacacccgtgcaagtgcgcacacacacatacacgcaccaatgcacaggcacacacacatgcacacacctgcacacagcacatatatgcacacccacttgcacatgtgatgcatgttcacacatacacacacgtgcacatgcatgcatgtacatggaccacatgcacatgcacacagatgaccatacacatatgcatgcacctgcccacatatgcacgcacatttacatgccagcacatgtatgatacacaggcatgcgcctgcacatgtgtacatgatacacacttgcatgcacacaactgaatacacacattcacatgcacacactgcacacatatatgcatgcagacaagcacacacacagagcacacatccactcctttattccactcttgtgtttttcactgcacttgtcacatcaaaacacaacagaaggccgggcatggtgcggctcacgtttgtaatcccagcactttgggaggctgaggtgggtggatcgcttgaggtcaggagttcgagaccagcctgaccgacatggtgaaaacccatctctactaaaaatacaaaaagcagccaggcgtggtggcacgcgcctgtaatccccgctacttgggaggctgaggcaggagaattgcttgaacccaggaggtggaggttgtagtaagctgagatcgcgccactgcactccagcctgggcaacagagcgagactccatctcaaaaacaaaacaaataaacgaacaaaaaaacccacaacgtattattttcttgtttacgaggtttcttgtctctctggctccaccagaagaggagcagggacccttcttgctgttgttcattgctgcatcccccacaccgagagcagagcctggcatgggcagaaagtcctcagtcgatatttggtg

SEQ ID NO: 20530 - DNA, 2300 bp, Homo sapien
ggcgtgacaatggtgtgggcgtggcatgggcggggcagtcgggcggtcgcgcgcacgcgcagggaaagcactcacttgggcttctctccccagaaatcggaggagagaccccacatgaggtagtgtttcttctcctccagcttcagggcttctctgcacttgatggggctgatgaacgtgcgctgctgtccaacctgcacctcatccgagcctggagtggaggggagagggaagaagctgagtcgtggggaggaagccagggaagagccacgggaggcagcgtgctgagcctgacctgacttgatggtctgctcaatggccatgatgtactcgtcaaagtcattggacagctgaaccttgaccagtcgggtcttgtacactgtgggggagaggcagacagtttgggtggtgggctaggttgaccatgaggggcaccctggtttgcaagtgcacccgggcatgtggctctctctcccaagcagaaagttgcagaatcacagccagtcacactatggcccacccctcattacacacacaaccatagagggtcccatgtcaccatccacacacagtcgtgctcataggcatgcacagaggtcacagccacccacaatgtctagtaacatactattcatactatgcaatgagagtgactcatatgcacaaaatactgtagcctcatggccatgcacacaaccatagccacggaaaactacagtcatatacgtaacttcaggacctcacactcactgccatctacaaccacacagcctcacacaaccacagccacacacaactacaacctcacagccacccacgcaatgatgcatacaaccacatctaccttttctcacatgagcatacctaggccactcacagtcatggttccccacacaatcatggcccctcacaatacatgctctcacacacaccacagtcacccacacccacagcctgaagccacaccatgacaaccacacctaccacccaccacacaattggacacacacagctaaacatgcgtgacccccacccatcacccactcaccatagtccactcctggctcacaggccttgtccagccgttcttccagggtgaccttgtcatccgacttttgtatgaagcaattctctgcagggtggggtggagacagggtctaagtcccactccttatctggggcctactgcccatgggtgtggccagccctgggagcctaccccccttggtatcccctgggtatgggtctgggggtccctgaccatgggatagatgacctgggtaagtgtggcttgctcagacccacctgttcccggctccagggaactcaccctcagcacagcggcacagttcatcacggcagagcttgttcagctttccatcctccttttccggatggtagaaccgggtacagctttcctctgcgggcagatgtgatgtgaagatgagaggataagggcctccctccaaagaccatgcctgggaggcccagatccccagttctcagtcttcagacctggagatgctaggtcttcaacccctcagatccctcagaccccaagaccccctctactttctgatctttgggattctcagacccttgagtctcttagactctcaactcacagaagcctgggaccctcagaccccaaattcatagattcctgggacacgcaggcctccaaccctcatatatctagaatccttagacccttattttcagaaccccctgcaactcacatattcctaagaccctgagacccctgaacccatcagacccccaagtctcagatccctagaaccaactcatagatccttgggactctcagaccctgggaccttcagattactaatcctgaaatccctggcctgcttagaccatcattctcagatcccctcagaacctcagaacctcaactcatagatccttgggaccctcagacccgtgggaccttcatactacgaatgctcaaatccctggactccttagaccttcattctcagatccccacaattcatatatacctgggactctcaggcccctggaaccatcagaccccaggccctaggttggctgctcacccaggttgtaataggcgtagaccttgactgctccaggctggataagctctacattaaagtattggtgaactttgaaagctagacagtcatcctcagagtgtgagacctgagggggaaggaggagcttggtcagtggggtgatgtgggagggagtccagcattgtcttgggagctgaggcagtggtggagaaactgaaggatcaaggaggaagtggcaaa

SEQ ID NO: 20531 - DNA, 2300 bp, Homo sapien
agactctctcctcttgatgggtctagactgcatcctcagggtcgctagacattcagtcttacatttggactttctgatggattctagacatgttctcagcatctccaagtcctggtgtaagtttctgtctctcggagagttctgaacatgtcctcagagtccagtgacctccagttatcacccctgcactctctagtaggttctaggccacattttgatgtcccagctctgatttgaacctctttatcccccactggattctagccactttcccaggctcccagatcaccatctttctctcttgtgggttctaggccaccttcatggtgttccaagccttggctcaataccaaaaggacgcccctgaccaccaggaactgaaccttgatgtgtccctccaactgcccagccgcagctccaagatcacccaccgtatccactgggaatctgccagcctcctgcgatcagaagaggtacagtcacccagccaagccctcctcactctggctgtctccccctacactagccagggtttactgggaagcaagagggagggccaggtgaccatcacaggcagcagaaggcttaattcccaacatgctctcttctctcttttcactctgcagaccaaggaaaatgagggtttcacagtcacagctgaaggaaaaggccaaggcaccttgtcggtaaggaacagaaacccacacctgcctggcccatgcccctctgccccagagggaccatctcctcttgtccccagcagtcctagtcctgtgggctgacattgtgtctcctctcccatcttaccaggtggtgacaatgtaccatgctaaggccaaagatcaactcacctgtaataaattcgacctcaaggtcaccataaaaccagcaccggaaacaggtaaaaggaatcaaggccttatctgtcaccttcctcctacccctcttctaatgtcttccccgctcctgaatcaacacacaggtataccctctcccatctttctctcttctgtgtttctagaaaagaggcctcaggatgccaagaacactatgatccttgagatctgtaccaggtaagaagctaggtcaccggggttcatcttggccatccctctatctctagcaagaattcttgcaaataatatccatgatattcagtactttccaagtacactgtgtatctgatactgttctaagtatccaccatgaggtagacaacacagacagtccttgctttgcatgttaatgtgagaccacagcaatgaccacgtaagctgagactgtcaaagcatcttagtaatcaatggaggaaagtacacaatcattccatgacctttaaagttttctttttttctttttagagagatagggtcttgctctgtcagccaggctggagtgcagtggcacaatcatagctcactgtaacctcaaactccctggctcaagcgatcctcctgcctcagccactcaagtagctgggactacaggcgtgtgccatgacacctggctgatttttattttttattctttctagaggcagggcctcactgtgttgcccaggctggtctcgaactcctagccttgagcattcctctgccttgggctgccaaagttttgggatcacaagcatgagccactatgcccagcctaaatgtttctattacaacatttaaaattatcatactgccagttataaagatacagggaaatggccgggtgtggcggctcgcgcctgtaatcccagcactttgggaggctgaggcgggcagatcacgaggtcaggagatcgagaccatcctggctaacacggtgaaacaccgtctctactaaaaatacaaaaaaattagccgggcatggtggcgggtgcctgtagtcccagctacttgggaggctgaggcagaagaatggcgtgaacccaggaggcggagcttgcagtgagctgagatcacgccactgcactccagcctgggcgaaagagcaagactctgtctcaaaaaaaaaaaaaaaaaaaaaatagaataaaacaaaataaagatacagggaaatgaaattcatagtaagatgagtatttgactacaccgtaatttaaaacattagaacattgagatgcaaggtgtatttgttgttttttttttcctttgtatgacacttacggagagtactttagttcaaaaaaatgcttgccttcttctctttgtataatttacaacatggagtaaacatcttttctatgccttagtaccttgtcttgctcctttctaagtttggatcagcttccaatattttatcctttgagcttt

SEQ ID NO: 20532 - DNA, 2300 bp, Homo sapien
ttagggccgccatattcccaggaaaggactctgattggctcagcctgggtcagatgactatatctggaccaatcagctaaggacaggaagtaggtctcagggggcagacatggctgtttccactgtggccacgtgaatggaagggagaagaagttcttacaaaaggagtggatgtcagagaggcaaatgggcaggaataaaagagatttgtttctgctacaacatagcaacattgtagcagagtatagcacaggctgtgaaaccagactcctggggtcaagagtgtgctgtaatcccaactactcaagatgctgaggcaggagaatcacttgaaccagggaggtggaggttgcagtgagccgagattgcgccactgcactccagcctgggcaacacagcaagactccttttcaaaaaaaaaaaaagtgtgctataactagcttgctggagcccagtgttaaatttccaggaatttttcaagctggtcattaaatacaattattattaaaaactaaatattaggccaggcacagtgagcctgtaatcccggcactttgggaagccaaggccggcagatcacctgaggtcaggagttcaaaaccaccctggccaacatggcaaaaccccgtctctactaaaaatacaaaaattagccgggcatggtggaggggggcgcctgtaatcccagctacgcaggaggctaaggcacaagaatcgcttgaacccgggaggcggaggttgcagtgagccgagattgcgccatgcactccagcctgggccagagcgagactccgtctcaaaaaaaaggccaggcgcggtggctcacgcctgtaatcccagcactttgggaggccgaggtgggcggatcacgaggtcaggagatcgagaccacggtgaaaccccgtctctactaaaaatacaaaaaattagccgggcgcggtggcggacgcctgtagtcccagctactgggaaggctgaggcaggagaatcacttgaacccgagaggcggagcttgcagtgagccgagatcgcgccactgcactccagcgtgggcgacagagcaagactccgtctcaaaaaaaaaaaaaagcaacaacaaaaaacccaaccaaccaaccaaacaaacaaagttataaaagttacagttaaataaattatattaaacacaaaggttagaaacactcaaactcatcgcttcctaaacgccttactcccataatctatactcttggggttacttatgtctgttggatctgtatagtgaaaatactatataatactgtggtactgcaaagctcttcccaactctacattcaacgacaccatattggtaggttgaaatcagtgatggaagtatttacatcatggaaatgagaaaacagtacaaatcatgtcttcccccatccccagaaggctgtgtttggatcctaactctgccacttatttcctaggtggtctttgcaaaattactgcatctctcagggctcagtatgctcatcaggttttatgagattaaatgtgtgggtatctgaatgacacaaagtaagtgtgagctatgatgatgaagaagataaagatgatgatgacgatgatgatgatgactggatgaggtgttcacagtggtatactgaatctggcgcatactagtttatgagtaacaatttggagaatgtctccccaggactttgttcagtgatgtcgcattgacaccgtgaaattggcccctggtgggagtatttacaccacagaaattgtaaatcattataaaccaaggatccctcaaccctcccactggagagctggctgttaaacttttaccagcacaccacggggtacgtggatttctccagatacataatagatatgcagcaacaaggcagctcatggtggctaaaatatctgggaaattctcaaaaatggacaaatctaagacaggtgtgtcccaaggacagaaatccctgatgctcaggaagtgctgctcgaatgatccttactaacgtgacagcaatgcccacatgaccggagaatctgatcctctttctcatagagcctgccaggcagcatcactaaagcaggagacttccttgaagccaactacatgaacctacagagatcctacactgtggccattgctggctatgctctggcccagatgggcaggctgaaggggcctcttcttaacaaatttctgaccacagccaaaggtgagggttggcctggaggggtgaagggagatgcatggctgaagttcagggcgggagatactgagctgggatgcatggcttttagctgagctggga

SEQ ID NO: 20533 - DNA, 2300 bp, Homo sapien
catccacctcgtatgcctgggcagcaatgctgcagaacgtcagaggaatgccagttaaaatgacaccggctgccggggtgtggtggctcacttctataatcccagcactctgggaggccgaggtgggcggatcacctgaggtcaggagtttgagaccagcctggccaacatggcgaaaccctttctctactaaaaatacaaaaaataaaaaataaaagaaaaaaaaaattagccaggtgtagtggcgcatgcctgtgatcccagctctttgggaggctgaggcaggagaatcacttgaacccaggaggcagaggttgcagtgagctgagatggcgccactgcactccaccctgggtgacagcacaagactccatttaaaaaaacaaaacaaaacaaaaaaaatgacaccagggtaccagttttcacccataaggctggcaaaaatcttcaagttcatcaacatgcccttgtgatgaggctgtggaagaaactgacaattcatttcatgcagggctcataagtgtgtaaatcaatacaacttctgtgcaggggaatttggcaatatctagcaagattaccagtgcattcagagattgacccaacatatttcctttcattgcaacgacaactctatgaagcaggtggtaagggtttccttttccatgaacaaactgaggctcagggcggtaatcagtagcttacccaaagatcacagctagtttcagagctagaaaataacgcaggttcaagcttattcactgcagagagcctggtgtgaagccacagatgtcagtctctccatcaagaagaggctggtggctggacacagcggctcacgcctgtaattccaacactttgggaggccaaggtaggtgggtcacttgaagtcaggagttcaagaccagcctggccaacatggtgaaaccccttgtccactaaaaatacaaaaattgccagacgtggtggtgctcacctataatttcagccattccggaggctgaggcaggagaattgtttgaacccaggaggtggagggtgcagtgagctgagatagcgccactgccctccagcctgggtgacagggcaagactctaaaaaaaaaacactcaaacaaacaaaatatcccccaaaaagtaggaggctggttactttctcacaatataacaagaggcctgtaacctgtaagaatgaggcagttctttgctcactgaggtgaaatagcctctgaggtatattgttcatgaaaaaacgaaacaaaacgaaacccaagatttaactgaagagaccaggaagaatagtatgtgctatgtgctgtccacagggcacagtagttcacaccagcactttgtgaggctgctgcgggaggatcacttgagcccaggagttcaagactggactgggcaacatcgtgggacccccatctccacaaaaataaaaaaattatccgggcatggtggcggccacccgtagtcccggctacttgggtggttgagccaggatgatcacttgaccccaggaggttgaggctgcagtgagctgtgattgcaccactgcaatttagcctgagtgacagaatgaaaaaaaaatttttttaaaggaaaacacaaaaagaatatgctgtcaacagggatgggaggaagaccacctttactgctatacacatttgtaccttttagatgttgatcaatatgaatatattatacacacagacacacacacagacacacacacacacacaaacaatacaatttaatatcctaagaggatattgacattagacaggtacaaaagctctagaaatgaggactttcctcagtgatgacttttttcaccaccaaagtcactcaggcatcctgacaagggtaagtgaggggagcctccttggaaaataaactcacttggatagtgaactcctgcacatacctcaaagcccatctgaaatgtcccctcctacaggaagttttccctgaccctccaagaagcagagttctatttcactggggaaaacatttcttcttcttcttttttttccctgccctgcacatgagctagaaaacatttcatgaaactgggagtttctgtgctgggctctgtccctcccccattctacttcccctccctcagcatggaagcctctggaagtggggctctgactcccagcctacagagagattcctaggaagtgttcgactgataaacgcatggccaaaagtgaactggggatgaggtccaagacatctgcggtggggggttctccagaccttagtgttcttccactacaaagtgggtccaacagagaa

SEQ ID NO: 20534 - DNA, 2300 bp, Homo sapien
gtggatgggcaggtctgccctttgcactccccatgccgttttcccactgcccctctatccatccatccatctcttaaaatcactgcccggtctcttacaggagggacctctgcagccagcaagcccaagtcaacacccgcagtgattcaggtttcggggaggcggggcaggagggaagatgcacaccccagggccctgcggggacccagaaccagctgatggaggggctctgtcccttcagggtcctagtgggaaggacaaggacctggtgttgggcctgagccacctcaacaactcctacaacttcagtgtgagtgtttgcagcgcctgcggcccttccgtcaccccagagcacgggacccccaagctgagccctcctgcagccctaccatcgccccagaccatgggacccccaagctgattgtcgccccagaccacgggtcccccaggctgagccctcctctctccccgcccgcccagttccacgtggtgatcggctctcaggcggaagaaggccagtacagcctgaacttccacaactgcaacaattcagtgccaggaaaggagcatccattcgacatcacggtgagcggagtggagggcagcagggccagggagcgccccctgcaggccactgcgggcccagagtgcctcaccccgcttagcttttcccagccctcccgggtgcgaagtaggagctgttatacccatttgagagacggggccaactgaggctcagagtggatgagtggcccagtagaaagtgagagagctggagacccccactcgctgctctcccaggccagcggtcgggctgtgcccctgccgccgcccaccactgccccctccgcaggtgatgatccgggagaagaaccccgatggcttcctgtcggcagcggagatgccccttttcaagctctacatggtcatgtccgcctgcttcctggccgctggcatcttctgggtgtccatcctctgcaggaacacgtaatgcccctgcccctgagggtcccccacgtcccttcaccagacccccatccctatgctctgctgatgccccgcacccccatctctccctgaccctcccaccaggtacagcgtcttcaagatccactggctcatggcggccttggccttcaccaagagcatctctctcctcttccacagcgtgagagccttggaccggggagcagcggggggtgggctgaaaggcccacccgggccatcccccaaatctctgcagaccctgggcctgtgggagggccatccgccagctatccacgtgtccacccattttaccagtgtggccagtcacccatcccctctgtccaccagtcctgcggggcagctctgtccaccactgtcccttggttcagctgtgactgtccgtctctgattgtccaactattcaccccttcagctgtgactgttccctccattttttcagccccgattaccagttttgagtcccacccaccgtcctcattattcaactttctgaccacccatctgatggtgacggtccgtgttcctaatcccccaccaccaccatcagcctcccacccctctgtgcgcctcactgtccgtctgtccatccacccccagatcaactactacttcatcaacagccagggccaccccatcgaaggccttgccgtcatgtactacatcgcacacctgtgagtgtcccccactctgctgggcagctggggggaggcaggcaggggagggttggccccccacctcatcatcacgccctcccctgctccttcaggctgaagggcgccctcctcttcatcaccatcgccctgattggctcaggctgggccttcatcaagtacgtcctgtcggataaggagaagaaggtctttgggatcgtgatccccatgcaggtgcggatggagcagcctccggagcagggcggggagggctgcacagggcagtgggggcaaaggggagcgtgccaggcagtgcccacccacccccgccgcctgcgcaggtcctggccaacgtggcctacatcatcatcgagtcccgcgaggaaggcgccagcgactacgtgctgtggaaggagattttgttcctggtggacctcatctgctgtggtgccatcctgttccccgtagtctggtgaggaccctgcccccgggctgaggctctgccctgtgcacatgggcgatgtccgcgctgaccgtaccctgtgtcctccacttgtcccaggtccatccggcatctccaggatgcgtctggcacagacgggaagggtgaggccctgcgcctgcaggccctctgctcatggc

SEQ ID NO: 20535 - DNA, 2300 bp, Homo sapien
gggccaagacactaaaaccccaaactcaagaagtccttcctcaaccccattgcaggggcaacctgaggtcaccccgttcttgcgagccggcccggctccaggcgtctaggttcgtcccactaatggtctggtccctccggccacagggcggatgagagggtttcgatccaacccaggacgcgccttcgccaaggccaggtccattaactcccgcaccgcatcctgccttccctcccccagagtctccgctgggaaactgaagacaggccgtccttggggcgccaggcccaggcctttccccagctgccttccagttcgcgcctgcatctgcccattttccagtttaacctggtttcattctcagtactgcccctgagattccgactccgcccctcccccagacatctgggccatctgggccctggagaagggaagtctgtcacctctcccataaaagtctgttcacaccttgtaaatccctttgaggtgctggaatgaaagaggagaggaggcactggggattcccactcccattctctccgggctttggcgctttctctgcagcctcagacaaggctgggcgtcttgcaggggggcccttgggtatacgttccccttacacagagcacccaggctcccagaacagagagatacagctgagcccaggaggagagccttgggagcccacactgggactgatgtctctgctgagacctggccccacctgctggtggcttctgagctagaaaatgtctgattgcagttgggcaattgaacccagtgagttctgtggctagtctcaaatgggggctcagcctagcaaagttctgagttcacctctgctcagagactcaaactggaattggggttcagtccaggtcagcaccaccgtggggataggggatagaggccagaggcttaaccagaaggattagcaacccggtaaggggtcaggtccaatctggagtcagggctagtccagatcggtggcctaaaccagagattaagcctcagtgtgtggtgtgggggacgagggggtgtcagagtttcaggctgaagttaggactcaacttgcagagagggagttcacctggggtcagagttcagcccggagtccggtctagcctggaatctgggggtggggctccaattgcctcactctggaataaaaggcttagcctaaggctggggtctcagcctggggtcataggtcatcctagggtcaaactttaacctgaggccagctttaggcctctctgtggaccaggaagattaggaaaacaggtcaggcctgaacagatgcgtgtgtttaccaaaagcctcagctctggctgggagccacatccctggctcaagaagaggaagtccgtccttggggatactgggaaaggtagtttatttaatgctttgtggcccttgtctgctcccgctgcattctgggtaatgtagtcccggacagttaagagtgggtggagaaattccgctttaagggccggatatcagatccatgacaattggttagataaactgctcattaaatcacatccggacaatctttatagcgattggtgagagtgagctgggggttaagcgttatcggctctcccattcggaaccggtgctgtccgtcggtgacgcaagcaggcgggcttgcggagaggcaattgctgattggttggcggactggaaactccgaaaggccgggccccgccgtgcggcgattggctcatcggtgggcgggcttgggcgccagaggcggagtcggggaggaggtggctccagagatggcagtgagcgagaggagggggctcggccgcgggagccccgcggagtgggggcagcggctacttctggtgctgctgctgggtggctgctccgggcgcatccaccagctggcgctgacggtgaggcccgccgcgcgagggtctggggtcggtggcgcaactttgtctcggagaagccccctggcttggagtggtctcgtccgccctcccccgtccccgaggcggtggagtggtccggcgccccccgtttccgggcccggagtggtctcgtcccgggatccccttcggtcctccggatggagttgccgggtccgcctcgctggggtcggccccctcccttcgggggcgaggctccatctcttggggactacaccccccttccccccaactgggtcttagtcctttaaattcttggaatcacttttggggcgctagagaccctggagccgcacagcggggtcctggggggctatagagtggggtcctctgggcacttaatgggatttggggggttct

SEQ ID NO: 20536 - DNA, 2300 bp, Homo sapien
ccgccgccctccccggggagactcagccgagggcggtgcgcctggccccgccccgccccgcccggccccgcccaccccagactcttccccgcccccctgcacgctctgccacgcccccacccgcgcggagcccaagcactgcgattcgggggcggggcccaacggacgctccgcccccttttaaagcaacgttgccactcgacgccgctggaccgaccccttaaagaacccccacccattttttccaaatccccggggtccctctcgtcctctcatcttccttccccgctccaaacggttcttcccatctccttttcccctttccccgcaattattccttaaagggccaagacactaaaaccccaaactcaagaagtccttcctcaaccccattgcaggggcaacctgaggtcaccccgttcttgcgagccggcccggctccaggcgtctaggttcgtcccactaatggtctggtccctccggccacagggcggatgagagggtttcgatccaacccaggacgcgccttcgccaaggccaggtccattaactcccgcaccgcatcctgccttccctcccccagagtctccgctgggaaactgaagacaggccgtccttggggcgccaggcccaggcctttccccagctgccttccagttcgcgcctgcatctgcccattttccagtttaacctggtttcattctcagtactgcccctgagattccgactccgcccctcccccagacatctgggccatctgggccctggagaagggaagtctgtcacctctcccataaaagtctgttcacaccttgtaaatccctttgaggtgctggaatgaaagaggagaggaggcactggggattcccactcccattctctccgggctttggcgctttctctgcagcctcagacaaggctgggcgtcttgcaggggggcccttgggtatacgttccccttacacagagcacccaggctcccagaacagagagatacagctgagcccaggaggagagccttgggagcccacactgggactgatgtctctgctgagacctggccccacctgctggtggcttctgagctagaaaatgtctgattgcagttgggcaattgaacccagtgagttctgtggctagtctcaaatgggggctcagcctagcaaagttctgagttcacctctgctcagagactcaaactggaattggggttcagtccaggtcagcaccaccgtggggataggggatagaggccagaggcttaaccagaaggattagcaacccggtaaggggtcaggtccaatctggagtcagggctagtccagatcggtggcctaaaccagagattaagcctcagtgtgtggtgtgggggacgagggggtgtcagagtttcaggctgaagttaggactcaacttgcagagagggagttcacctggggtcagagttcagcccggagtccggtctagcctggaatctgggggtggggctccaattgcctcactctggaataaaaggcttagcctaaggctggggtctcagcctggggtcataggtcatcctagggtcaaactttaacctgaggccagctttaggcctctctgtggaccaggaagattaggaaaacaggtcaggcctgaacagatgcgtgtgtttaccaaaagcctcagctctggctgggagccacatccctggctcaagaagaggaagtccgtccttggggatactgggaaaggtagtttatttaatgctttgtggcccttgtctgctcccgctgcattctgggtaatgtagtcccggacagttaagagtgggtggagaaattccgctttaagggccggatatcagatccatgacaattggttagataaactgctcattaaatcacatccggacaatctttatagcgattggtgagagtgagctgggggttaagcgttatcggctctcccattcggaaccggtgctgtccgtcggtgacgcaagcaggcgggcttgcggagaggcaattgctgattggttggcggactggaaactccgaaaggccgggccccgccgtgcggcgattggctcatcggtgggcgggcttgggcgccagaggcggagtcggggaggaggtggctccagagatggcagtgagcgagaggagggggctcggccgcgggagccccgcggagtgggggcagcggctacttctggtgctgctgctgggtggctgctccgggcgcatccaccagctggcgctgacggtgaggcccgccgcgcgagggtctggggtcggtggcgcaactttgtctcggag

SEQ ID NO: 20537 - DNA, 2300 bp, Homo sapien
ccgactccgcctctggcgcccaagcccgcccaccgatgagccaatcgccgcacggcggggcccggcctttcggagtttccagtccgccaaccaatcagcaattgcctctccgcaagcccgcctgcttgcgtcaccgacggacagcaccggttccgaatgggagagccgataacgcttaacccccagctcactctcaccaatcgctataaagattgtccggatgtgatttaatgagcagtttatctaaccaattgtcatggatctgatatccggcccttaaagcggaatttctccacccactcttaactgtccgggactacattacccagaatgcagcgggagcagacaagggccacaaagcattaaataaactacctttcccagtatccccaaggacggacttcctcttcttgagccagggatgtggctcccagccagagctgaggcttttggtaaacacacgcatctgttcaggcctgacctgttttcctaatcttcctggtccacagagaggcctaaagctggcctcaggttaaagtttgaccctaggatgacctatgaccccaggctgagaccccagccttaggctaagccttttattccagagtgaggcaattggagccccacccccagattccaggctagaccggactccgggctgaactctgaccccaggtgaactccctctctgcaagttgagtcctaacttcagcctgaaactctgacaccccctcgtcccccacaccacacactgaggcttaatctctggtttaggccaccgatctggactagccctgactccagattggacctgaccccttaccgggttgctaatccttctggttaagcctctggcctctatcccctatccccacggtggtgctgacctggactgaaccccaattccagtttgagtctctgagcagaggtgaactcagaactttgctaggctgagcccccatttgagactagccacagaactcactgggttcaattgcccaactgcaatcagacattttctagctcagaagccaccagcaggtggggccaggtctcagcagagacatcagtcccagtgtgggctcccaaggctctcctcctgggctcagctgtatctctctgttctgggagcctgggtgctctgtgtaaggggaacgtatacccaagggcccccctgcaagacgcccagccttgtctgaggctgcagagaaagcgccaaagcccggagagaatgggagtgggaatccccagtgcctcctctcctctttcattccagcacctcaaagggatttacaaggtgtgaacagacttttatgggagaggtgacagacttcccttctccagggcccagatggcccagatgtctgggggaggggcggagtcggaatctcaggggcagtactgagaatgaaaccaggttaaactggaaaatgggcagatgcaggcgcgaactggaaggcagctggggaaaggcctgggcctggcgccccaaggacggcctgtcttcagtttcccagcggagactctgggggagggaaggcaggatgcggtgcgggagttaatggacctggccttggcgaaggcgcgtcctgggttggatcgaaaccctctcatccgccctgtggccggagggaccagaccattagtgggacgaacctagacgcctggagccgggccggctcgcaagaacggggtgacctcaggttgcccctgcaatggggttgaggaaggacttcttgagtttggggttttagtgtcttggccctttaaggaataattgcggggaaaggggaaaaggagatgggaagaaccgtttggagcggggaaggaagatgagaggacgagagggaccccggggatttggaaaaaatgggtgggggttctttaaggggtcggtccagcggcgtcgagtggcaacgttgctttaaaagggggcggagcgtccgttgggccccgcccccgaatcgcagtgcttgggctccgcgcgggtgggggcgtggcagagcgtgcaggggggcggggaagagtctggggtgggcggggccgggcggggcggggcggggccaggcgcaccgccctcggctgagtctccccggggagggcggcgggcggcgggcggcggggaccgggtgcggtggtggctgcggcggcggcggcgggagcagcatggattggggcactgagctgtgggtaagtccaatcggcccgcctctaagttcccctttgctggggtccaggcaccccccttttgtccccaatgtatcttagagggggctccgcgcctttcccttccaccgacc

SEQ ID NO: 20538 - DNA, 2300 bp, Homo sapien
gccgagctttaatctccttagtcactgtatctctaggtcctagaacagagcctggtgcacagcaagtgctccagcaatggtcgtccaacgtcaaaagcgagtcctgcctacatctgtgtttgtgttgcctgtgctggtggttcccaccctccacgtcctccccacacgtggacacatgtttatgatccaactggaacatgaataatcccctctctcctctctctatgcttggtctgattcctgattctgcccgtttcttctcttccgtgcccgaataaatgatcccaaaggactcagaggcaggagatggcttagttggcctttggctgacctatggccaccctgtgtcctcaaactaaccagaaccttgccattgactcaacttcactctcactaagggagacacaagacaggaacttggggttgggaaactctgcgaccgaggctagccctggtccaggtgacaaacaggaagtgcgcaggcattgcaaagacacacctggcttcaggtatgcggcactggcagctggctccctgcccagcgctcctcccctaaagccacctagggctggtctgggaacttcctgctgactcaggaggcaggaatttctctgcagaccccaccagaagactttgcagggctgcagggagagcttgcaggagagtaagaagcagattatcttcttctggaccatccagagaaatctcccccaccagacacctgagacacactggccctgaggcctgtgagattatcgggaaactaccaaaatgtctgagatccaaattcaatcatcatgataaccacatgtatgggctccgaaatagaaggatctgcaaaggcaacattgctgtttgctgacattgctacaaaatgtgaccttttaaaaatcttaaccctggggttacattcttttttttttttttttttttgagacggagtcttgctctgtcacccaggctggagtgcagtggtgtgatctcggttcactgcagggtctgcctcctggattcaagcgattctctctcctcagcctcctgagtagctgggactacaggcacacgccaccatgcctggctaatttttgtatttttagtagagacggggtttcactgtgttgaccaggctggtctcaaactcctgacctcagatgatccacccacctctgcctcccaaagtgctaggattacaagagtgagccaccgcgcctggcccccagcgttgcattctaaagcaaagaataggggttagatctgcacctatcctgagaacctctgagtgtgcgcataggttgccgagaagccatggatgtttgtaagttaaattccccctgactgggatgttttttcacccagagtcacctggcacactccccagaattccttccagactttactcaatgagacctttcctggtcacatgatcaaaaatgttcacccagcctgggcaacgtggcaagacccaatctctacatatatatttaaaaattagccaggcacagccagacgcagtggctcatgctggtaatcccagtgctttgggaggctgaggagggtggatcacctgaggtcaggagttcgagaccagcctggccaacatggagaaaccccatctctattaaaaatattttaaaaattagccaggcatggtggcacacacctgtagtcccagctactgaggaggccgatgcacgagaattgcttgaaaccagcaggcggaagttgcaatgaactgagatcatgccactgcactccagcctgggcaacagagtgagacttgatctcaaaaaaaaaaaaaaaaaaaaaaattagccaggtacagtggcccacgctcatagtcccagctactcagaaggatgaggtgggagaatcacttgagcccaggaggtcaaggccgcaatgagctgtgattgcaccactgcagtccagcctgggcaataaagcaagactctgtctcaaaaaaaaaagagtgttcaccctagcacctgtactttcattatatcccatccatggtttagtttttttgtctagcactcactcatgtatgccatcatctagttcttttctgaggtgctgctccccagtagaatgtcagctcccaaggacagagatttccatctgttttgttcaatgctatgtctctagggcctagaacagagcctgggaccccataaggtgctgaataaataggggttcagtgaattcattaattacatttctgcaagatggggtggcatgttgtcatcttcagccattttttttttcttcgattgcattatatttggaacaggcacgatggt

SEQ ID NO: 20539 - DNA, 2300 bp, Homo sapien
catgttggtcaggctggtctggaactcctgacctcaggtgatctgcccacctcggcctcccaaagtgctgggccctctttttaaattattataaccacgaggaggcgctagaccccttccctgaacatgcccctaccctctgactgtaccaataccagaccggtgagggataaggaagaaactttcttcccctcttgagcctggagtctcttccatatttgccagggccagtcgggggagcccagtctggaaattccctgctttgcaacctacaggcatcaaaacttttcatccccaagcatcgttggccctctaggcctcaatttcctcatctgtaaaatggtgggtgagtaactttcaccgcaaagcagcatcgtggagaaagtgggcatgcgaagattgaaaaggaggcagacaggataaagctccagagctccgggtttgaatttcgcctctaccacttacaagccaggttaacttgggcaaatggtttagttgccctgtgcctcagtttctccatctggaaaatggaagtgatgaaaatactacctaccacccttacagggtggtctgtttgaaaattaaaatagaggcctcatgcctgtaaccccagcactttgggaggccgaggcaggtggatcacatgaggtcaggagtttgagaccagtctggccgagaccccatctctactaaaaatacaaaaattagcctgtaatcccagctactcgggagtctacagccggagaatcgcttgaaccggggaggtggaggttgcagtgagctgagactgctgccactgcactccagtctgggcaacgagagtgaaactccatctcaaaaaataaaataaaataaaataaaggcaagttgacagaacagcccttgtgtacagtaagtgctcaataaatgttagctgctgctactgcttttaagactgtggttactggggccaagcacagtggttcatgcttgcttgtaatctcagcgctctgggaggccaaggcaggaagttcgcatgagcccaggagttccagagcctgggcagcatagtaagacgccacatctacaaaaaataaaataaaatcagctgggtgtggtggtgtgcacctttagtctcagctgcttggaaggctgaagcgggaggatagcttaagcccaggaggttgaggctacagtgagctatgatcaccactgcactccggcctgggcaatatagcaagaccctgtctctacaagacaagactgatgttaatatgaggaactcatcaataaacgtggccaaagagtcctctctcttgcactaggtccctgtcaccttttctcttgttcgtctccaggcatcacgatggaagtcccccccacccttcttcccacctgggaaaccacctgaatgatttgccttccacctccaccaaagtcccgccccgctccagcgtgctgtcactgaaggaagctgtcgcgttttcccggacgtctctccacaaaacccgccacctaaatggggcttctttccggaaaatccgggagggcggtctggaggaagcgtacccctccttacgtcacagctgccgcagctaccccagcctggcgtaagagcccgagggagttgccctgccctgacccggagccttggcggggaggggagagaggcaccccactccaccccgccctggtcccaaagggccatgggtgcttggggccgcctgggtggaagggaggggcagggttctaaggggcgggaacgttgggatgaaatttcttctattgccctaaggggcggggctgagaaggaggtggctgcgggtgggcgtagtcattcggcggtggtcgtggctatatacaaggggaggggccactggcaggaaaggatgcgtggtgctcccctagtgggcggggtctatggagaaagcggtgcgatgcagaaggaggcgtggctagtagcaaaaaaaatggttttaagggggcggagcaagggcctgggaagttagtttgaggcggggcccgcagggggcggggtctgcaggaggtgtggtcaggtaactgggctgagttcccactaggtgtggtctgggaaggctggggcggtggcaaggtggagggcgggggtgacagcagcccggagccgcggagcctcagcttccgcctggacccagcctcgtgggagccccgcgggtcctgcccaggtgagtggagccccagggcagatccagaaccaggattattgggatggggagtcctctctttccaggtggggtcaccggctcgcagggaggatctggggtagaagaggtcgcctcgcg

SEQ ID NO: 20540 - DNA, 2300 bp, Homo sapien
cccacgtctgtaatcccagtactttgggaagccgaggtgggaggattgcttgaggccaggagttcaagaccagcctgggcaacatagtaaaagcccctctctgcaaaaaaatttaaaattagccaggcacagtggcacaagcctgtagttccagctacttgggaggctgaggcgggaggatcacttgagcccaggagtttgaggctgcagtgagctatgatcatgccactgaactccagcctggatgacagaagaaagagcctgggcacagtgactcaagcctgtaatcccagcactttggaagaccaaggcgggcagatcacttgaggtcaggagtttgagaccagcctggccaacatgctgaaaccctgtctctgtgaaaatacaaaaattacctgggcatggtggcaggtgccagtaatcccagctgcctgggaggctgaggtcagggaaaacctgggaggcagagcttgcagtgagctgagatcatgccactgcactccagcctgggtgacagaatgagaccctgtcaaaaaaaaaaaaaaaaaaaaaaaaaaaaagccgggcgcggtggctcacgcctgtaatcccagcactttgggaggctgaggcaggtggatcacctgaggtcaggagttcgagaccagcctgaccaacatggagaaaccctgtctctactaaaaatacaaaattagctgggcgtggtgatgcatgcccgtaatctcagctacttgggaagctgagacaggagaatcgcttgaacccaggaggcagaggttgtggtgagctgatcacaccactgcactctagcctgggcaacgagagtgaaactccgtctcaaaagaaaaaaaaagaagaaagaagcctggcgcggtggctcacgcctgtaatcccagcactttgggaggctgaggcgggcggatcatgagatcgggagatcgagaccacgatgaaaccctgtctctactaaaaatacaaaaaattagccagacgcggtggcggacgcctgtagtcccagctactcaggaggctgaggcaggagaatggcgtgaacccgggaagcggagcttgcagtgaactgagattgcgccaccgcactccagcctgggtgacagagtgagactccgtctcaaaaaaaaaaaaagaagaaagaaacaaagagagaaagaaaggaaagaaagaaaggaaggaaggaaggaaggaaggaaggaaggaagaaaggaagggagggaaagagggagagaaaggaaggaaggaaaaaaataacttaaaaaatcagatttgttggacaaagatcagggcttaacctagggaggtgggtagagctaatggaatgcggaaaaggctgtgatttgaaatgaggggatttaggaagacctcatgagaaggtagcatttgagcaaagacatgtaggggtgagggagctagccatgaagttgcttaaggtggaggacacagcccgtgcaaaggccctggggcagggccgtatgttcctggcatgttggaggaagagcgaagaggcccgtgtggctggagcacagtgaagagggggagagagggagtggggagggcagggagggaactgggcaattcaagcagggttttgtgggccttggggaggacttgggcttgtccctggaggaaagtgggagccatagagagttgtgggcagaagaagggtgtgccctgactcagatgctcacaggcaacctctggtggtggctgcagggaggacagactgtggggtacgggggctggagtcagaagaccagctgagtgatgacggggctggaccagacagaggagggggtgagaagtgggtgaattctgggtatatttcagagtgtcactgccgccgtctgcatatggaggaagctcacccatctcatagtctagctggcctgactcccccagccccccaactccccatgcccaggcctgtgtcgagtgggcggaagaaagagatgtcagattctgcatggaaggcgtggggtggggctgggctgcaggtgctcccccagctcccccccgccccatggctcctcctcctccaccccctctcagggcgacagttacaggcaaagaagaggaagtggtagcactagctgtcgctccacaggcgagcagggcaggcgtgcgggcgggtgggtggtggaggctgcgagggtgcacggccggccctgggcaggcggtagccatggagctgtggcgccaatgcacccactggctcatccagtgccgggtgctgccgcccagccaccgcgtgacctgggatggggctcaggtgtgtgaactggccc

SEQ ID NO: 20541 - DNA, 2300 bp, Homo sapien
ataaaacaggaaatctataaaatgagaatgttggccgtgcacatggctcactcttgtaatcccagcacttcgggaggctgaggtgggggatcacctgaggtcaggagttcaagaccagcctgtccaacatggcgaaagcccaactctactacaaatacaataattagccgggtgtgctggtgggcacctgtaatcccagctactcaggagactgaggcagaagaatcccttgaacccaggaggcggaggttgtagtgagccaagattgcaccactgcactccagcctaggcaacagagtgagactccatctaaaataaataaataaataaataaataaaaataaaaataaaataaaataaaatggaaatgttgacagtacctttatttcagagttgtgtaaggattaaacatgataaggtaaatgaaattcccagcatggcaattaacatatagtgagtgctaaatgaacgagagtcattatttttgttaatttaattccattgagtcccagctgcctgtaggcaatggtatataagtcagggtacgtatgttaactgctgtaacaaattgcatcattttgccaggcacaatggctcacgcctataatcccaacactttgggaagccaaggcaaggctaatcgcttgaggccaggagtttgagactagcttgggcaacatacaagatccccatctctacaaaatatatatatatattagcagagcatggtggtgtgtgcctatggtcccggctacctaggacgctgaggcaggaggatcacttgagcccaggaattggaggctgcagtgagctatagatcgcgccgctgcagtccagcccgggtgacagagtgagatcctgtctcggaagaaaaaaaaaaaaggccaggtgcagtggctcacgcctgtaatcccagcaccttgggaggccaaggcaggtggatcatgaggtcaggagtttgaaaccagcctgaccaatatggggaaatccggtttctactaaaaatacataaattagccaggcgtggtggtgtatgcctgtagtcccagctactcaggaggctgaggcaggagaatggcttgaacctgggaggtggaggctacagtgagctgagatcatgccactgcactccagcctggtgacagagcgagactccgtctcaaaaaaaacaaaaacaaaaacaaacaaaaccaaaccctcaaaacacaaaaccaaattacatgacttcagtgatagtgagactttacttcttattgatgtcacaattcagtttgggtcaatgtcaggggttgggggaggagggctctatgttatagagtctctctagggccgaggctccatcatctcatggtcttagcttcccgaaggcccttggagtcttttctactggggaaagagcgctatgaaagaatttcccaggccaggcctggaagtggcgccatcacctccatcctttttttttttttttttttttgagacggagttttgcccttttcctccaggctggagtgcaatggcgcgatctctgttcagtgcatcacggcaacctccgcctcccaggttcaagtgattctcctgcctcagcctcccaagtagctgggattacaggcatgcaccatcacacctggctaattttgtaggggtttctccatgttagtcagggtggtctcgaactcctgacctcgggtgatccactcgcctcggcctcccaaagtgctgggattacaggcgtgagccaccatgccctgcctccattcttgttattggccagaacttggtcacatggctccatttaactacgagggagactaggaatgtggttaaactggagctggggataaaaaggagataggttggttggacgcaaagaagtcactgccgtagaacctcagggtaatgcctcactggctccagaaatgcaggtatggagcgggtttcaggaatgcaggtctagggccaggcatggtggctcatgcctgtaatctcagcactttgagaggccgagacaggaggattgcttgaggctaggaattcgagaccagcctgggcaacataccaaggtcccgtctctacaaaaaataaaaaaataagcccggcatggtggtgcacgcctatagtctcagctactcaggaagttgaggcaggaggatcgcttgagcccaggagtttgatgctgcagtgagctatgattgtgctaccactgtactccagactggacaaaagagtaagaccctgtctctaaatatatctatgcaggtctgtggaaatctcaatgggatgtagaataagaaggacctgag

SEQ ID NO: 20542 - DNA, 2300 bp, Homo sapien
caggcaacatggtcctggccaggtagagaccccatctgcataataaaatattagggtgggcagccagcttctttgtactctatgtaaacggcacacctggtccaactaatctttgggcccttatgtaaatcagatatcaccacctaaagctcatctataaaaccccgtgcatttcaccatgaaactggaagacccacttgggagccccctctctttgcaggagagagagcttttctctttctctcgcctattaaatttcttttctttctttctttttttttttttttttgagatggagtcttgctctgtcacccaggctggagttcaatggcacaatctcggctcactgcaacctctgcttcccgggttcaagcgattctcttgcctcagcctcctgagtagctggaattacaggcatgagccaccacacctggctaatttttgtatttttagtagagatggggtttcactatgttgcccaggctggtctcaaactcctgatcttaggtgatccacccgtctcagcctcccaaagtgctgggattacaggcatgagccactgtgctcggcctaaacctctgctctaaaagtaattttttgtgtgtctgcattttattttattttattttattttattttattttattttattttattttattttaagacagagtcccactctgttgcctaggctggagtgcagtggcacgatctcggctcactgcagcctccgcctcctgggttcaagcaattctctgcctcagcctccggagtagctgggattacaggtgcctaacaccataccacactggctgattttttgtatttttagtaaagacggggtttccccatcttggccaggctggtcttgaactcctgacctcgtaatccaccctcctcagtctcccaaagtgctgagattacaggtgtgagccacggtgcccggccatgtctgtattttctatttccttggtgtgaggcaatgaacctcgggtattaccccagatggatgacactgcttcaatatctgccagtcactacactttgttatcagtgggattacatcaactggagcccattctatctgcttggaggccaggcctgaagattcaaggggttgacaccctctaggagcaagcctcaagtcaacccatgactgacagtaggtgggatataaatacctcagctccctcacccctcggttggaataactgaagagtatgttccatgccgctccccagtcatccctggggaggttaagttccactttctcaccatgtaacttatttgaagacacacccagtattggctctttgcctttcctgattcactttctcctcccccagctggtgctttctggggccaccttcttgataaactacttttgctagaatccttgtctgagggtctgcccttgtgagaccctaagatgttaccagagagagttaggaagctgggaatggggtggaagtgttgctgtataatcgtcagacagagttgagatctgaaggaaaataagatggttaaagctcttgactctggaatcagagggtcctgggttcaaatctcaagtctgagagatcttggacaagttataactcctctgcaagtctcagtttccattttgttggtgaatagagggagggaggggaattcctactttacaaggttaacatgataatgaaattacactttgttgccaatgtgcctagcacactgcctggtacatgatggttgtgatggctgtctttatacgggagactgggaagagaccctaaaggctgagatttgcttcactggaggcaggaagcggaagctcctttattgggtgcaatgaaagaaggtgttgagagatgggagatagatgttgatgggaaagaaaaagggagagaccatgggaaggagagagagagagaatgatatacattaggcagattaacttctctttattgtgaagaaagggggaaattaggattttctaggctgtcttttagttgcagcaagtcagcaaaaagggctatgatgaccaggcagcattgagcaactctgactccgccttcccctcttcgcacaccttctggttactgaaaacccagcgttagtagaaaagtttcttttctttgaatgacagaactacagcataatgcgtggcttcaacctgctcctcttctggggtgagtgtgaggctgaatggggggctaggggaggcctggattggaaatagacttcaggagaaatgggagggccatggatggtccagccaagagatcataagtccagactggatgctgcaaacacct

SEQ ID NO: 20543 - DNA, 2300 bp, Homo sapien
ttttaaaatatcttgttttattttcggctgagcgcagtggctcacgcctgtaatcccagcattttgggattgggaggctgaggagggccagcctggccaacatggcgaaaccctgtctctactaaaaacacaaaaaattagccaggcgtggtggcaggtgcctgttatcccagctgctggggaggctgaggtaggagaaccgcttgaacccgggaggcggaggttgcagtgagccgagatagggccattgcactccagtctgggcgacagagtgagactccgtctcaaaataaataaataaataaataaataaattttactttattttaagttccaagatatatgtgcaggacgtgcgagtttgttacataggtaaacatgtgccatggtggtttgctgcacctatcaatccatcacctaggtattaagcctcgcatacatttgttttcaaaagcaaccgatgctatgagtttcttaggtaccttccaggaatattttatgcaaatacaaaattatcatacatatatacatgcatttgatgcatttatatgtttgtacatttgtatgtatgattttgtatatacacatataaatacacatacatgcatatatggataattgtatatagaatgctaacattttcctaaaacagatagtaaccttttatataaatatatattaaatatatatttaatatttattaatatattaatgtattaatgtattatattaatatattaatgtattaatgtattatattaatatatcaatgtattaatgtattatattaatatatcaatatattaatgtattatattaatatatcaatatattaatgtattatattaatatatcaatgtattatattgatttagtatattaatatattgatgtattacattaacatattatattaatatattaattttattatatattaataatatattatatattaataatatattatatattatattattttcaccatgttgaccaggctggtctttaactcctgacctcaggtgatccgcccacctcgttctcccaaagtgctgggattaaaggtgtgagccactgttcccggcctatattgtgtatttcaaaatggctgaaagagtagattttaaaagttctcataccgaaaaatgataggtatgtgaggtgatacatacgttaattgtcttgatataatcattccacaatgtcagccgggggcggtggctcacgcctgtaatcccagcactttgggaggccgaggcgggtggatcacaaggtcaggagatcgagaccatcctggctaacatggtgaaaccctgtctctactaaaaatacaaaaaattagccgggcgtggtggcgggcgcctgtagtcccagctactcgggaggctgaggcaggagaatggtgtgaacccgggaggcggagcttgcagtgagccgagatcgcgccactgccctccagcctgggcgacagagccagactcaatctcaaaaaaaaaaaaaaaatcattccacaatgtcaaaacatattatagcccataagcatatataattatttatgaatttaaaaattaaatataaacaaatcaatgacagcaatgtaaaaaaaaaataataataaataaataaaaagtgagtagtttgtcctgtggagttttgcagtcttgatcttgccgactgcgatagaacaggattttaaattccagccttatatttcctcagatgcatccgttttttttagcatttgttgggtgataaacttgttccctataaccaaatacgctaagatcatcctcgcagggtgttttccttgagagagttacccagaggcagaattattgggtcaaacgagagggagagattaaagggttttttttgtttgttggttggtttgttggtttgttggtttcgagatggagtcttgctctgtcgcccgggctggagtgcggtgatgcgatctcggctcactgctacctctgcctcctggtttcaagcaattctcctgcctcagccttacattttgataagcactggccacggggcttctgaacttgggaccatcagaaattggatttcatgaggtttatttgttccaggcattctgaccacgtcctgcttcagagagattgttcccggcgtctcagtgctatggggagcaggttcctcctggtcctgctctcaggtaagtggagcaaagaactccctttccttctcctcatgcccctggtgtcctcgcttgatttgcttcctcaaatttggcattttctccagcaataactgcgtgtgcctgtcctagtaga

SEQ ID NO: 20544 - DNA, 2300 bp, Homo sapien
ttgcctgatttaaaatgtaaaaaataggctggacgcagtggcgcatgcctgtaatcccagcactttgggaggccgaagcgggttgatcacctgaggtcacgagttcgagaccagcttggccaacatggtgaaaccctgtctctactaaaaatacaaaaattagcctggtgtggtggtgggcacctgtaatcccagctactcaggaggctgaggcaggagaatcgcttgaacccgggaggcagaggtggcagtgagccgagaccacaccactgcactccagcctgggcaacaagagtgaaattccgtctcaaaaaaaaaaagagagagagagagagaagaaaagaaaaaagaaagaaagaaagcagttggcatcagtcatattgcacacatggaggggaagcttcaggagcaagtagacaaaaataaaagggaacatctttgtttccttagaagtgtctgcaaaaccctaagtctgagcaaaaggggaacttgcagcacagacaggtgtatgcatatatcatgtgtgtgcatgtgtgtgtgtgtgtgtgtgtgtgtgtgtggtggggggcagtaattattgctgtgaaatggagaaactactcgaatctgtcccctaccctcgcagccctgactcctttcagccgagcctcctccagtcccctgcaagaatctggaatcctctatgccctggggctctgcatctggggtcctgcatctagaagaaaaacacgagttggaaaacatatctgagggtcatcctctccacccccaggcactatgatttcatccaagtccacagatagcaaggccccagggaccccctccccttgggtggatttggtcccaagcccgtgtcaataagccatttgcacaaacgccttttgggatgatgccaggcaaggtgtgaggtaacaggatcagaagggctcatgccagtccggactcagccaacaacattccggcatcacaccctttaaagttcaacatggcaggggggcagcctcacacacccagggcccagggcagctgcagaacatcccctgtgcggcccgcacacatctgcacgccaatcccgtgtgcacgagcaccggcaagtgcatgcgtcccccattgcctgggaagcaacattcacactgaattcacaaagtccaaatgagtagctcaagatccatgcagaattcaagctgcattgttgggttctaaaatgtgatctccttccttatttcttagctatttttactatgataatcccacggatcaatatatcctgacgattcatttcttcacctgcagtattgggttccttcattacttatggttttatgaaaacctggggctaggtggggaattcctctcttttctgccctaaagcggaggatagtaactgaaaaacacctacattccccaccacccaaaacatcaatgacgaggctcacaccgccagacctctaaggccgtggagtacaggggattttcagggcagcgaaaccattctgtatgacacataatgatgggtacaggttattacacatttgttaaaactcatagagtgtacaaaatagtgaactgaaatgtatctactttttgtttttttgcttgtaatttggtgtcatctctaaaatcactatgggttttcatgaccttagatggggttataaaaaattaccctttgtttgcttctaatagctttctagtttcaacgtttccatttataacactgatcgattttgatctgatttttgtgtatcatacactccaggagactagcactttctggccccttgttagctgttgtttcattcattttttatatatcctgtgaggtaggcgtccaaagtcattcttctgcagttgcatatccagttgtagtgacctttcgagcctgaacctgctctctcagccaccacagagtctcccaactgaaaacagttaagcatctcccaagtttccatagagacagtggccacatgacctcaacctggccaatgggctgatcccatcttctttgtccacagtgattggctaaggcctgctcatgtgacacactcagtgccaaaggtcaggtcattgtcttggaaacatctgggcggagaagatctatttccgttaggctgctggagctgtgggtgccatcttgccacgttggaggaagagcccacctgagaatgacatcaactcagagggaagtcagcagggccaagaggccgggagagatgattcctgatgacatcatccggttcctgggtgcagccatggtagagttggcctcgaacgttgtccctggcatggaggtgaccaga

SEQ ID NO: 20545 - DNA, 2300 bp, Homo sapien
ttgagaccagcctggccgacgtggtgatacctcgtctctactaaaaaaaatacaaaaaatagccggatgtggtggcaggcgcctgtaatcccagctacttggaacttggaaggctgaggcaggagaactgcttgaacctggcaggtggaggttgcagtgagccgagatcacgtcattgcactccagcctgggcaacagagcaagactctgtctccaagaaaaaaaaattagctgggcgtggtgtcttgggcctgtaaacccagctacttgggaggctgaggcaggagaattgcttaaacccgggaggtggaggttgcagtgagccgagatcacgtcattgcactccagcctgggcaacagagggagactctaaataaataaataaataaataaatgatttctgatttcctggcccctcccgtaggcatccggagacactggtctggaaggcacccaggtgtgaaaacactcccaggtgtgttttctgcaaaccaaagttcaaaaccacagactccaaaccaaccagggaagtggtgtgtcatccttggctgtccttttggtctttaggggattgtaaaattcctatagcctaggctgcatccaacatcagtggaataaaaatgtgtaggggtgtgtgctaccattagtttttcaaactctccaggagattccaatgtacgttcaggttgggatacaaataaagtacatttcttcccatttaaactctcactggctacacgtgaatggtatgattgctccatagccatgtctgcacttggcattgctattttttcattttagccaaacagaagtgtatatgagtatctcatagtgatttttcatcagcgtttatctgaagctaaacagaatttgggcatgtgttcaggattgtattgaccatttatttattctctcttcaatagtgcctactgaagttttccactcattttgcacatcaatttttagtattttttttcatttgatggacatctttctagtctgtattctggcttgatgtactttactggatgcacatcatgcaaatatcttttccaatatgattttctaacacccatttctctctgcattttcattaataggagatctttctttttttttttttagatggagtctcactctgtcgcccaggctagagcgcggtatattgtgtctatatattggagtttgcaggggaggcatcggtgcattgaaattgccacaatgtgattaaatacgtaagctaattgtgtcttaaacttcctagccccaggtccaaattggtaaaatagccagcatctgtctgcctcctcaaagatcaaaccaggaagatttatacaatgaaaacatcatgaaaaataataggaaaaaactgagtagtcactgcatagaccaaggctgctgagactgtatttcttttttattaggtctgtttatttattaggtgtttttctttttgtttcttctctctttttttttttttttttttttttttttttttgagatggagtctcactctgtcgcccaggctggagtgtagtggcactatctcggctcactgcaacctttgcctcccaagttcacaccattctcctgcctcagcctcccgggtagctgggattacaggcatgcaccatcatgcccagttaattttgtatttttagtagagacggggtttctccatgttgaggctggtctcgaactcctgacctcaggtgatccgcccgactcggcctctcaaagtgctgggattacaggattgagccaccgcacccggccgacaattccattcttatttccgtagaatgctttcaaagatgtttgagagaatgggaggaaaaggaaacatatctaaaatgccgatattaactgtaaataccaccccgccacacacacggattaaattctttttctactgacattctgtgttggtaacaccatattggtttctgtataaagatttagaaatgcttcaaatccaatgggtggagacagggcgttccctatggattatccactgattgcattatcactccctctataaaagaggagctagatgcagaagccactgcattttccggcaagccaagggctgtctgtgcctcaggagtggggtcagcaggaggaactctacagctatgggagaacctgcgttcacctcttttccaagcctgcctgttctggtgagtatgggatccttattgactattgaccaaaataatgtccatttgtattcctttttctttctgtaaaacatcttcacagtttagcaagttgttctcaaaactagatgctatctcgtg

SEQ ID NO: 20546 - DNA, 2300 bp, Homo sapien
tttattatactggaacagctcatgccctcggtctcttgcctcggcacctggatggcttgttgcccacaatgaaatatgaaaaatttagcacacagatcaccatatgtttcctcatctataaatagtgatagatagtaacaccttccttataggtctctgtgaaaatatttagggataatgtatgtaaaactgtttattaccaggcaggttggaaagtaatgtcccattcatttgtccactaggatggccatagggtttttggttttttttccttttaattcttgaattccagagtcttcaaatacattccattgttgtaaagtgaatcatattcacattttttccctagagtttagcgattccttttgcatacaaattcaggctgtatgtgttcacacatagatctcaaataacatcttaattttcacaacgaaaagctcccttcctcaccctgtagcctggctcctagaagcaacttttttttttttctgatagtaattacatatttgtaagttaggtatttatactgctttttcatttatcagctttaaactatattgaattactttcttctccgaaacaattagcacataactcttacgtactgtaaaactaattttcctcaccaaacataatcatttaaggaatctggataaatcaaaattcaatgtttatcattttatgacatcaatatttaccatttgtagcatctaaaccttagccagacatgtaacaagtagtatgtcattaataattttttctcattttttcttttgatctcttaaattttaaaatttccttttttatttcttcctatgaatccaacacctattttctccaccagaaatgtagttctcttttcagtagatccagatgtgcactagacaattaatcagctttggctttcacttggagacatccctccctagtcctccctcccctcgtccccctctggatgggagaaatatgcatacatgatcccatttttgaaagaaattaggaagctcaaaatcacacaaaaaggctgggtgtggtgtggctcacacctgtaatctcagcactttgggaggccgaagtggggtatgacttgaggccatgagttctagaccatcctgggcaacacagacctcctctctacaaacaaatacaaaaatagtcaggcttggtagtgtgggaggcccgggtggaaggatggcttgagctcaggaggtcgaggctgcagtgagctatgattgcaccactgcactccagcctgggccacagagtgagaccctgtctcaaaacaaacaaacgaaaagccacacacacacacacacacacacacgccctaaatgtgtggctatatcattttaacaggcggtgaatgtggagaaatgactgaagaaaactttaaagagttcattttgcatcctgctacctgaacagttttaaaatccacaaaaagccctacacccaaaaactgacctccaccaagtcttgtcctctcagcctactagctcaaccccattccatgccccaccactgccttatcttgtccacatactcgcccaccaaacctggtattaacccacagcaagatccgcccatcaaacctaatgcccgcccacaacctcgccccggaacttagtctctgtcctgacagccccgcccccatgcctggtaccgcccacggtcccgccccagaacttctccccacccccggagctgatctccacccacactcagccctgcctccaggcctggtaccgcccacagccccgctccagagttggtccccgcccccggaactggtccccgtcaacactcaggcccgcctccaggcctggtaccgcccacagccccgctcaagagctagttccgcccccaaccctgccacagacccgcgccaggacgaccctgcctccgcggctgtccctagccagggcccaacctggttctattaataactaagcaaactagaacacctcagccggaggctggggtgcgcggctgctgcacctgcagcctgaacccgggggtcctgacacgccgcattttgggctgggaccagctggagccggaagcggaggtgcagtgtggctagccggagaccggaagcggaagcgcgcttgtgtcttgtgagaagagccgcgcttgcagcgtctgggagaatctttcggtctccgcgagaggtgcttcattccgtgagtccgagtccagagaggggccccagccgcgggcctgcgtccctcccgggagccgggtttccgcccctgaggcctcgggctgtgcgctcagttaagcccgaagctgctgtttcc

SEQ ID NO: 20547 - DNA, 2300 bp, Homo sapien
ggaggattgcttgaggccaggagttcaaggctgcagtaagctaggattgcaccactgcattcctgcctgggtgacagcaagattctgtcaaaaggaaaaaaaaagaaagaaaagaaaaaaaaaaaacaaacaattgcaggtagtggggtaaacatgctatgaaaatgagagagaaggggccaggcgcagtggctcaggcctgtaatcccagcactttgggaggccaaggccggtggatcacctgaggtcaggagtttgagaccggccaggccaacatggtgaaatcctgtctctactaaaaatacagaaaattagctgggtgtgctggcgcatgcctgtaatccaagttacttgggaggttgaggcaggagaatcacttgaacccaggcaggtgatgttgcagtgaactgagatctggccattgcactccagcctgggcaacagagaaaaactccatctaaaaaaaaaaaaaaaaaaaaaaaaaaaaaaaaaaaaaaaaaaacagagagagagagagagagaaggaaacggaactggggggaggatttgcaaaaatatggttagggatggcacttcagagatgaagccatcctggagtgttacgggcaagggaaatgctggggcaaaggcccagaggcaggaataggtttggcctgttgcatgaacagtgggtccagctcctagcaaactgtttattgaatgaaagaagaatgaatgccttgggtctagggttgtgctgggcgctttcttaagttttctttcccgggtacctccccagaactggcatgcaggtattattaaacccattacacaagtgaaactggcccagagacagaaaagtccctggtccaagaccacacaggagtgaggggtggaggaaccctcctcccattgagttctggctttcctatactgaaagccccttcctctcctgcagtaaggtaggtggaaccgctgtcccgccttgttggtgaatgtcgttgctagacttcagacacatacaggctggtctgctgaaaatcagagatgtccacctgcgccctattcgaggtctccggcgtcttctttggcgtcgtctttgccctttcagaagcgtctgcacatttttccaggtgtcatttctccaacttgaacacagggagcgcactgggcacgcgggcacgtggctgtccccaggggcctggcttgggtctcgcccctgggccggggcgcactcgcgggcgggacatctgggggcgcccacgcgctctgggacgagtgtcgctggccaggcccggactgaggaaaggcgagtgagacactactcgcctggggtgcaaaatttaagggagtgaaaaaaaaaaaaaaagaaagaaaccaaaaccacctcgagtcaccaaaataaacattttaatgcagtattttttaaaaaatcaacaggaatcctccaaagcccactatgaacaaaatagcaaaatggtagagaaaggatctgtgccgctgcgtcgggcctgtggggcgcctccgggggtctgaaactggaggagactcggggctgtagggcgcgcggatctggggcgcgccctcggtcccggcgcgcccagggcctcccgcgcggggcccggcacagggaggcggggaggcgggcggggcggggcggggccgggcggcacctccctcccctgcaagctttccctccctctcctgggcctctcccgggcgcagagtcccttcctaggccagatccgcgccgccttttcccgcggcccgcacggggcccagctgacgggccgcgttgtttacgggcccgagcagccctctctcccgccgcccgcccgccacccgccagcccaggtgcccgcccgccagtcagctagtccgtcggtccgcgcgtccctctgtcccggagcccgcagatcgcgacccagagcgcgcggggccgagagccgagagacagtcccgggcgcagcgcggagctccgggccccgagatcctgggacggggcccgggccgcagcggccggggggtcggggccaccaccgcaagggcctccgctcagtatttgtagctggcgaagccgcgcgcgcccttcccggggctgcctctgggccctccccggcaggggggctgcggcccgcgggtcgcgggcgtggaagagaaggacgcgcggcccccagcgcctcttgggtggccgcctcggagcatgacccccgcgggccagcgccgcgcgctctgatccgaggagaccccgcgctcccgcagccatggccaccgggggccggcggggggcggcggccgcgccgctgctggtggcggtggcc

SEQ ID NO: 20548 - DNA, 2300 bp, Homo sapien
acggggtttcaccatgttggccaggctggtctcgaacccctgacctcaggtgatccgcccaccttggcctcccaaagtactgggattacaggcgtgagccactgtgcccggctgactgtggctttgagtagggtctgcatcaggacctgaggcctgcttgggcaaccccagcttatctaggggagagtgtctgtaacctggagctaccatgggctgttctaatcccacctccacccccacaggctgattgtccagcaggtgcttcaagaacttcgacagtaccatgggtaagtgggaatcgggacaggcttgaggggagcaaagtgggagacaaaagcaggaagcatgcaggggtgtgcacaggtgtaggagacaggggtagagaagactgggtgagggctgggtacagtggctcacgcctgtaatcccagcactttgggaggctgaggcaggcagatcacctgaggtcaggagttcgagaccagcctggccaacatggcgaaacctcgtctctactcaaaatacaaaaattagccaggcgtggtggcacgcacctgtaatcccagctactcaggaggctgaggcaggagaattgattgaacccaggagttggaggttgcagtgagctgagactgcaccattgtactccagcctgggcaacacagtgaaactctgtctcaaaaaaatagaaaaaagacaaggctgggttcaagggaagaaaaatggggcagaagaggagggaggaggatagaagacaagagttggagaggagcaggctgccactggcataggggttccttggagcaaacaggtgaaggtgcctcctgcctaagacactgccatctgttacaaaatcttcctgtagctggatgtggtggctcataccactgtaatcccaacactttgggaggccaaggtgagaggatcatttggaggccacgagtttgagaccagcttgggaaagatagtgagaccctgtctctacaaaaaacatttaaaaatttgctgggcgaggtggctcatgcctatgatcccagcaatttgggaggctgaggtgggaggattgtttgagcccaggagtttgagaccagcctgggcaacagagtgagactctgtctgtataattttttttttttgattagctgggcgtggtggcacatacctgtagtccccagctactctggggggtgtgggggtgttgacgcaggaggatggctgagtccaggcagtgaaggctgccatgagccatgattatgccactgcacaccagcctgagcaacagagcaaaaccctgtttaaaaaaaaaaaaaaattgtgggctgggcgcagtggctcacacctgtaatcccagcactttgggaggccaaggcgggcggatcacgaggtcaggagatcgagaccatcctgactaacatggtgaaaccccgtctctactaaaaaatacaaaaaattagctgggcatggtggcaggcgcctgtagtcccagctactcaggaggctgaggcaggagaatggcgtgaacccaggaggcggagcttgcagtgagccgagatcgcaccaccacactccagcctgggtgacagagcgagactccatctcaaaaaaaaaaaaaactgtgtaagatttaagtacttggttaaaaaaaaaattaaaaattagccaggcatggtggcacatgcctatagtcccagctactcaggagactgaggcgggaggattgctcaagccccggaggtcgaggctgcagtgagctgtgattgtaccactgcactccagcctgggcaacagagggagacgccatctctattaaaaaagaaaaaaaacatcttcctgctacactgattttgtttagccaagacacattactgccctctgctggaaaacctgtcataatgtctcatatacaagcccagagtgtcaaggacaggtgggctcttagacggggtacctggtgtatgcctgtactcggtagcactggggtaggtgagtgggagaagaggctgccgacccaggtatctgtcccctctgatcctgcagggcccggcagagggcttgcatgtcagccagccccggaggagcccactcgaacctgacctggtttgaattcctgtcggagtaagtacacagatctgcttctggggagggcagccttggattcgaacaagtgtttacagatggtcctttgggccagaccccccatgctgggggcaggagctggagcccccatcagggcaatggtgggagctggcaggaaagggagggatgaggctcccgtataccctgagaggacagaggaagac

SEQ ID NO: 20549 - DNA, 2300 bp, Homo sapien
aagacacattactgccctctgctggaaaacctgtcataatgtctcatatacaagcccagagtgtcaaggacaggtgggctcttagacggggtacctggtgtatgcctgtactcggtagcactggggtaggtgagtgggagaagaggctgccgacccaggtatctgtcccctctgatcctgcagggcccggcagagggcttgcatgtcagccagccccggaggagcccactcgaacctgacctggtttgaattcctgtcggagtaagtacacagatctgcttctggggagggcagccttggattcgaacaagtgtttacagatggtcctttgggccagaccccccatgctgggggcaggagctggagcccccatcagggcaatggtgggagctggcaggaaagggagggatgaggctcccgtataccctgagaggacagaggaagacttcctggaggaggtgacgatgtaagcagggttctgacggaagagtaggagtttgccaatacgtgcagataaggatgaaggaaaaaaaaagaaactagaaggcttagggaatgacatcggagtggggctgggaggagggaaggtgggagaaatcagcagagaccagaccacctcagctacacaaaggcgctcacactttatccgaaacagcagtggggcttgggtgcggtggctcacgcctataatcccagcactttgggaggccgaggagggtggatcatctgaggtcaggagttcaagaccagcctggccaacatggtgaaacccaatctctactaaaaatacaaaaattagccggatgtggtggcgggtgcctgtaatcccagctactcacgaggctgaggcaggacaatcacttgaacccaggaggcggaggttgcagtgagccaagatcacgcccttgcactccagcctgggcaacagagtgaaactccgtctcaaaaataaataaataataaataaataaataaataaataaataaataaaaataaaaagagcagtggggcctttgagcattatcagttctggtgataggatggggacagtatgaggaccacagacagggctggaggtccctgaatccctctctctccctcctttcctccctccctctctcactcactcattcattcaagaaacatttatggatatttacaaagttccagaagccactcggactgggatctgggggcacagactggaggaatggcgtctccgcccaggaaatagaccctaccagagcaggaatcatgtctgccttatatgtcactgacctaatatttattaaatgaaggtgtgcctgaaatccaggaaaccatgccagtgacctggggatggagtttggggtgggggaggagatagaagaatgagcaggatttaaagaccaattagggccgggcgtggtggctcatgcctgtaatcccagcattttgggaagctgaggcagatggatcacctaagcctggccaacacggtgaaaccccacctctactaaaaatacaaaacaattagctgggcacagtggcacacacctgtggtcccagctactcgggaggctgaggcatgagaatcgcttgaacctggaggcagaggctgcagtgagccgagattgcaccactgcactccagcctgggtgacagagtgagactctgtctcaaaataaataacaaaataactaaataaataaataaataaaggccaattagataccgggtgggggtggggggcgtgaattagagggagaaatcataagtgaacagagctgaaattcccagcccaggcattgagggacctcaaacctgagatcacgttgcatttccctctgtaaacccagtccccaaagctcttgcaaacattcattcatgtctgctgagtgaataagtaagacagggaaggagggagggaaggaggaagtcaagggccagggaaggggtaaggcaggaccaggaggccacagggagacaggttgcaggtggattcctgaagcaacccacagggctgcctcagaatggcccctggccccctctagtggaccttccctctcgtccctcaggagcgaggacggtgctggcaagaacgagaagagtgacaagagtaccagtgtgaagcgcaggctgagctgcctccgcagtcgagtgaccaggcagaaggagaaggtaaggggagctaagccacgggggccctcctctgccttccccagcttggcttgctgcccttagcccgggagccctgtgactggggctggtggtgggctgggtacacagtatataagagggccagtgcctgcagagggca

SEQ ID NO: 20550 - DNA, 2300 bp, Homo sapien
acagctacacagctgcccaaccattgagccctcataaactcccgtgttagagtttctgacctcagctgcagtagggtgcctggtgaattacgtcttgcatttctgggacatccaattccctgaacatgctcccttcctctggaccatgaaggttggacttgaactgaaggctagtccacctggggacgcaaccctccagcttctgaactggggactctcaacaacatattgtgcatgttttgaagtgattgggtttggggaaatctttttttctaaaatagagactgggtcatgcgaggtttcccaggctgatctcaaagctcctggactcaagtgatcctccctcctcagactcccaaagtgttaggattacaggcatgagccgtcttgcctggccatggggagatcttctaggcctggctgaccagccaaccttggtgagagctgttctgctcgactcctggttactgttcaactgcctcccctgtggcaggacttggattagacaggcaacctcaagactggggtgtctgatggcaattgagaggttgctggtgctgggggaagcatctggcctatccacatctgccaaatagcacctgtgtggaagtggataggggagggtatggtatgtgtttcagactctgagcacctgtttgagggtatctgacagcatctgtattggggttatctagtatgtgtttgggggtatctgctggacctatgtggagtgtctgacatatttgggggttacctggaagcctgttttgggtatctgatggcacctgcctgggtgcctgtgtttaggggatctgatggtatctatgttggggtgtctgagaccactggagaggtatatgattcatttttcccagacccacctttctgaagtctatgctgcctctttttttgttgttgttattttgagacagagtcttgctctgttgtccaggctggagtgcagtggcatgattatagctcactgcagcctggacctcccaggctcaagtcatcctcccacctcagcctctggaggcatgatcatagctcaccgcagcctggacctcccaggctcaagtcatcctcccacctcagcctctggaggagttgggaccacaggcaggcgcctccatgccctgctcattttaaaaaatgttttgtagagatggggtcttgctatgttgcccagactggtggtcctgaactcctgggatgaagtgatccccccaccactccctgatgctgcttcttttttctcaggtgacagaccctgccctctccatttcttggactctccccgctaggactccccaccactgggagtgccccccttaggtacttccaatcctaacgagcccgtaggagcccactgacaacccctccaggcatccgttgattcttccaaaacacccccagctccactgtcctcccttggggtccccttaaccccgctatcctccctcggggtcccccaactccgctgtcctccctcggggtccccccaaccccgctgtcctcccttggggtcccccaaccccgctgtcctccctcagggtccccctaactgtgctgtaccccccttgagattctccaaaccgctgtcctcctcaggactccctccccagccgcgctaatcacccaggcttccgttaaccccacaaaacgcccacctaaccctgctgctctccctctggatccccgcaacccagctgtcccctcagagcccccggccctactgacagccaggctcgcattgctctccttcaaaaagccccccaaccccgctgacccgcccctcaaaagtcgccctcaccctcgccgcgagcaccctcccacttcggtgcccgcgcccctctcaaggccgagccgacgccccctcaccacggctcggggagcagcagccccaggtccccgggagcgccccgccctcgagggcacgcctccttccgggtcacgccctctgccccgcctccgaggcgggatcgcgcatgcgctgctctcctcgcgcggcttcccgcttccggctcccagctgctagctactgtggatctgggggggccggacggaggcatcggaggcggctgcgagagtggcagaggagctggcggagagcggcctgcgggcgatcgggccgaggtgaggacggcggcggggcggtcccgaggaaaacggggctcaggagggggccctcggtctcttcagggggtggcctggggcgcgggacccccggggctgcctcgggcctcccgccggctcctgggggacttctccaggcaggcgaacgggtgctggggtgcagg

SEQ ID NO: 20551 - DNA, 2300 bp, Homo sapien
aatggtgtatcgggacctaggagccaggaggccacaggacagatcagatttcttttttttttctttttttttgtgagatggagtctcactttgttgttcaggctggagtgcggtggcatgatgtcagctcacggcaacctctgcctcccgggttcaagcgattctcctgcctcagcctcccgagtagctgggattacaggtgcccgccaccatgcccagctaattttgtatttttagtagagatggggtttcatcatgttggccaggctggtctcaaaatcctgacctcaggtgatccacccgcgtcggccttccaaagtgctgggattacaggcatgagccactgcacctgatctgacaaatcagatttctatttctcttctctaagctcctctcctctcctctctcctcccctcccctcccctcccctcccttcccttcccctctcctcttctctcctctcttctctcttctcttctcccctcccctcccctcccttcccctctcctcccttctcctcccctcttcttttcgagaaggtcccgctctgtcacccaggctggagtgcagtggcacaatcatagctcactgcagccttgaactcctgggctcaagcaatcctactgcctcagcctcccgagtagctgagactacaggcgtgcgccacttgtgctcagctatttttttattttgtgtagagacggggtcttgctatgtttcccaggctggttttgaactcctggcctcaagcgatccttccacctctacctcccaaactgctaggattacaggcgtgagccaccatgtctggcccagatttcttttttttttttttatttttgagacagagtttcactcttgttgcccaggctggagtgcagtggcacggtctcggctcaccacaacctccacctccggggttcaaacgattctcctgcctcagcctccctagtagctggttttacaggcatgtgccaccatgcctggctaattttgtatttttagtagagatggggtttctccatgttggctaggctagtcttgaactccccatctcaggtgatccacccaccttggcctcccaaagtgctgggattacaggcatgagccaccgtgtccggccgccagatttctttttaatgctgctctttgtccttacctgggcaaagctttaagatacaattttataaaatgtaagagtaaactagccaagtagcccatctcaactatgcttgtcaaataggaggggaaaactgaacctaatgaatgatggttgagctttatttattatttgtttattttttaggcggagtctcactctgtcgcccaggctggagtgcagtggcgcaatctccgctcactgcaacctccgactcccgggttcaagcgattccgtgcctcagcctcccgagtagctgagattacaggcatccaccaccacgcccttctaatttttgtattttgtattttttattttttttaagtagagaccggggtttcctggccaggctggtcttgaactcctgaccttgtgatcaacccacctcggcctcccaaagtgctgagattacaggcgtgagccaccgcacccggccatagttgagctttattaagtgttgcatcttgggaggcccaaagcaggaggaccgcttgaagtcaggagttcaagaccagcctgagcaacatagtgagacccccccccaacctctacaagaaaatatttttaaattatacagcacacctgtagtcccagctactcaggagactgaggcagaaggattgcttgaacctaggagtttaaggctgcagtgagctatggtcggccactgcactccagcctgagctagagtgagactgtctctaaaaataataataattaatttaaaaagttgcatctttccatgagtaggtgagcttgtcagcgggcacacgtatcctatgatctgaacccttaaattaatgaacagatgggtgtagacagcggtttgcagcccctgttgatgttgggttggtttataatcaccatatggaacagaatcggagcctcgcgtccacttcgatgctagaattctgttcgagtgctgatgaccaggggcggctaaacaccatgccctgccatctctgggtcttagagtcaccctaacatctgatctagattaattatcatcatgtgcgaggttttggcatgaagcacgccaggctcaccgtttcatgatcttagactatttacagcaaactcaaacagctcacttgctttttacaccctgcaaagaccaagggagagcctggaggggttgttt

SEQ ID NO: 20552 - DNA, 2300 bp, Homo sapien
tggcccctgaggacacacagttctgggccccttacagcgatgcctgcagttcatattctagaaacacagagacctaaattaggcagtgtccctggctgaacactattcaatgttacattcttctgtgctcttgtttggttggttggtttttggtttttggttcaagtcacttatgctttcaaccgttcaaagcttacctgttgactgagtgcagtggcccacacctgtaatcccagcactttgggaggccaagcaggtgaattgcttgagtccaggagttccagaccagcctgggcaacatagcaagaccccgtatctacaaaacatgaaaataaattagccagctgtggtggtgtatagctgtagtcccagctactcaggaggctgaggtgggaggatcacttgagcttgagaggtcaaggctgcaatgagctatgatcatgccactgccctccagcctgggcagcagagtaagaccccaatttgggagtgggggaaagcatacctgtgaaccagcaccaaccgtggtagtggtattaaccccaaatgatcaccctaggccaagatttacccaggggagctgtgcccttcatgtgacctcaaactatttgctcgaagcatcctgggccaactaattagaagaacactccttttgctttttatgtttctttttttgagacaaagtctcactctgtcgcccaggctggagtgcagtggtgcaatgtcggctcactgcaacctgcacctcccaggttcaagcaattctcatgcctcagcctcccgagtagctgggattacaggtgcctgccaccacacccggctaattttttttgtatttttagtagagacagggtttcaccatgttggccaggctggtcttgaactcttgacctcaggtgatccgcctgcctcagtctcccaaactgctgggattacgtatgtgagccactgcgcctggcctgctttttgtttctaacgtcctttggctgaaatttactttttttctcggctctcaggaagttgtacagcatctgtgatgcagcaaagccccgaagcagaaggtttttttatttcacctttatgacaccttgcgattagacaccccaaactgaagcatttctctgtttgaggacatattagaaaatggaactgcagccaggcactgtggctcacacctgtgaccccaacactttgggaggctgagtgggggtggatcacttgaggttatgagttcaaggccagcctgaccaacatggtcaggttagccaggtgtggtggtggcacctgtaatcccagctactcaggaggctgtggcaggagaatcactcagacccggaaggcagaggttgcagtgagccaagatcacaccactgccctccagcctgagccacagagcaagatgctgtctctaaaaaaaataaaagaaaatggaattgcaaataaatctaatatttattttagcagagtcagacaaattagatgaaaatatactttggctggccaggcgcggtggctcatgcctataatcccagcactttgggaagatgaggtgggtggatcaagaggtcaagagttcgagaccagcctgaccaacatggtgaaacctggtctctactaaaaatacaaaaattagcagggcatggtggcatgcccctgtaatctcagctactcaggaggctgaggcaggagaatcgcttgaccccgggaggtggaggttgcagtgagccaagatcacgccactgcactccagcctgggcaacagagtgagactctgtctaaaaaaaattagccaggcgtggtggcggcacctgtaatcccagctacttgggagactacagcaggagcatcgcttgatcccgggagacagaggttgcagtgagccaagatcgcgccattgctctttagcctgagccacagagcaagatgctgtctcaaaaaaaaaaaaaaaagaagaagaaagaaagaaaatggaattgcaaataaatctaatatttattttagcagactcagacgaattagatgaaaatactctttggcagttttcgtgtttaattaacatttccatccttttgtttatcagttttcaggtgaaaatggggagagaatgaaagaaaagtacggtgtgttttgtagtggccacaatgaagctgttagtcattacaagttgctgcttcagcaaaacaagaaatttcaaaacttgatcaaggtaaaaacaatttttttttttaatcaaaaacttatattctggccgggcgcagtggctcacgcctgtaatcccagcactttgggagtctgaggcg

SEQ ID NO: 20553 - DNA, 2300 bp, Homo sapien
tacttgggaggctgaggcagggggatcatttgagcccaagaggctcaagagctatgattgtgccactgcattctagcctgggtgacagagcaagaccgtgtctctgaaaacaaatctataaaccatgggttctgtgaacagatgtggacacggatgtgtgagatgtttgtatatgagtgtgtgacagtatgggtgccactgagtgtcaccacaagtctgcacatttagcaggggttggggacgggcaatgaccagcagctccttcaggctgcacctggctctgtccagaacaggagaggtcgagggtctcctgtgcacgaccctcgggggctctccagaggccgcacagcaggaacctcacattggatgtatctgctgttgtcccctcaggcccagcccccaagccaccctcccagcttcaacggggaagggctggagggccctcgtgtgagcatgctgccatccggcgtggggccagagtacgcagagcgccccgaggtggctcgccgggacagcgcccccaccgagaaccggctggccaagagcgatgtgcccatccagctgctcagcgccaccaaccagttccagaggcaggcggccgtgcagcagcagatccccaccaagctggcggcctccaccaagggtggcaaggacaagggcggcaagagcaggggctctcagcgctgggagagctcaggtgagccggccccaccccttcgcctgggcctggaaggtgcaactggtcaggctctagcggctcgctgggagccaggaaattcgggacacctgtgccatcctctggagaggaaaaccagaaggcacagctggcatcgtggctgaggccaccccacacagggccgtgtttggtctccaggcccaaaactgagatgatccaccctgcatcttctccacctcaaccctcaaaacagtgggatggggaccaggagccttagaaagggacacgggcaagaaggcagagatccctggccacgtgggatcagcacagccgggacagggacaggtgcaggcgcctctgctcattgtcccagttccacagagccgttccacagagtgggacacggagcccagagcagccccagtgtttccacggaggatgtccaggagctcctctgggggacacctccctgggggacaaccagggatgttctgggatgttctctgaagattaagggtgtgtcccgtggtcactagggcctgtgctatttccacaggaggctcagcctcctctccagatgccgggtgactctgcaggtccttccgcagggaggttggggccgttctccctgaatctggggcttagcatctgagcagctcaggtcacgggatccaggccgcccgtgggaagtgtcaggtgggggtggccaggcccctctgctctcggaggctgccctggcgggtggggacagctggccagcctggagctggcccaaataccttctctcttccagcgtccttcgacctgaagcagcagctgctgctcaacaagctcatggggaaagatgagagcacctcacggaaccgccgctcgctgagccctatcctgcccggcagacacagtcctgcgcccccaccaggtgagcccccaccccctgacatgagcccagtcccagggcagcggggctgcggcaccacccggcgactgctcagtctgaaccctctctctgttccagaccctggcttccccgccccgagcccaccgccagctgacagcccctccgagggcttctctctcaaggccgggggcacagccctcctgcccgggcccccagctccctcgccactgccggccacaccactcagcgccaaggaggacgccagcaaagaagacgtcatcttcttctaaaagggccgtgactcaaggtgcaaggcccctccctgccctgcccacccttcctgctctctggggacccccatggggtcaccatgcccacccagctgtcccctcctcttccctagcaaaccactgatgaccgcctggcaggggccagcctgtcggtgctctgggccttgcagctgtttctgtagggttagcggtggtgccggggtcactttctgaatctctttttttttttttcaaaaaggaaagtttttaatggaaagttgagccagaactaaaccagggagctgtctgaaatcatagcaccccatccgggtggcggggagatcaactccgagctgtttttccgaggcagtgaggaacggtgccggctctgcacggagctgaggacaggacagaccttgctttgagaaggagctgccggccggggccacgctccaca

SEQ ID NO: 20554 - DNA, 2300 bp, Homo sapien
ttagctgtgatggatccttgcaatgaaagaattaagaagggcgggtgcggtggttcacgcctgtaattccagcactttggaaggtcgacgtgggaagattgcttaagcccagggctcaaggccagcctgggtaacatggtaagactccatttctacaaaaaataaaaaataaaaagaaattagccaattgtggtggcaggcacctgtggtcccacctactcaggatgctgaggtggcaggatggcttgatcccaggagttcaaggctgcagtgagttaagatcgtgccgctgcactctaccccttttttgtgggtagttggtcaagctaccatggggcagaatgtagcaagctctgggcatcatcctgggtcctcaggcccagagagcacacaagtggcggcttcacatctacaaatttggttcctcccagagcgaggccctgtctcaaaaaaaaaaaaaaaaaaaaaaaaaaaaaatagaggccaggcgcggtggctcacgcctgtaatcctagcactttgggaggcagagacgggcggatcacgaggtcaggagatcaagaccatcctggctaacacggtgaaaccccgtctctactaaaaatacaaaaaaaaaaaaaaaaaaaaaattacccaggcgtggtggcgggcgcctgtagtagtgccagctactcgggaggctgaggcagaagaatggcgtgaacccgcgaggcggagcttgcagtgagccgagatcgtgccactgcactccagcctgggcgacagagcgaggctccgtctaaaaaaaaaaaattaacaagggaaaaacaaatttattaacatgtgtaccttatgtgtacatgggagatgccaagagaaatgaggtggcttatatagcttatataactcctgcttatatagcaccttcaacatatagcagcaaatttttggagaagtgacaagacgaaggaaaaggacattgaggccgggtgcggtggctcacgcttgtaatcccagcactttgggaggccgaggcgggcggatcacttgaggccaggaatttgagaacagcctggccaacgtggtgaaaccccgactctaccaaaaatacaaaaattagccgggcacagtggtgcacagctgtgatcccagctacttgggaagctgaggcacgagaatcgcttgaaccagggaagcggaggacgcagtgagcagagatggcgctactgcactctagctttggggacagagcaagactccgtctcaaaaaaaaagaaaaaaaaaaaaaagacgtctccagacaagagtctaaaggtgtccctggtgatcaacctttgtccttcctggtagagaggggaggagggcacctttgtacctttaggtcctgctttgaggcaaatcagggaagaacagagagcttttccggtatcagcttcattgatctcagctcaaaataatcctacaccaaggtcgcatatttcagaggggcatatgctggtctcctacgggggtctctcttgggggtgataaaaataccccgaaactagcaaggggtgatggttgtccaacatgtgcatgtactaatgtcactgaattgtgcatttttattttttatttatgtattctagaacaattcttaacgtccaaagataacgtctttccttaacgtcgaaagatgccttgttgtgatattacagcagtcattcctgctcactacgggcaggcagacagtgcagaaaaggtgaagcacaaaaactaaaaaggaaaatctctccttgaaccactgcgaacaggttggtggttttgcttggaatatttttggagcgtgtgggtagttggttaaacttagaaatatatttttttgtgcgtgggtagttggccaaaccgccgtggggcagaatgcagcaaactccgaggatgatccagggtctgcaggcctggagagcacacacgtgtcggccccacctctgcaaactctgtccctcccctacagcggacaaaaagccggtcagggggacaaaggcctgcggccgcgcctgcgcgcaagcctttggggcgctcccggtaccccggcctggccccgccccctggcgcggcgcgccgacgtcgcggtgacgtcacggagttgccatggcgtcgctgagcggcctggcgtcggcgctggagtcgtacaggggccgggaccgcctggtgaggcaggggcggaccggggccggaggtcctagagtttggcccaagctcagagactgggaaacgggccagagaggggacggggtcgcccaggatactccgtcgcagaggccccgtccgagctaggctca

SEQ ID NO: 20555 - DNA, 2300 bp, Homo sapien
ggtcaagagttcaagaccagcctggccaacatggtaaaatccatctctactacaaatacaaaaattagccgggtgtggtggtgcgcacctgtactctcagccacttgggaggccgaggcaggagaattgcttgaacttgggaggcggaggctgccgtgagctgagatcatgccactgcactccagtctgggtgacagagtgagactctgtctcaaaaaaaaaaaaaaaaaaaaaaaatcaagaagtggtaaaaatacagagagacagcagagaatgcagattagtggttgccaggggctgggaggagggaggaattgagtgattgctttatgggaacagggtgtaggggaggaaacatactttttcctttattcttagttcttagctgtgatggatccttgcaatgaaagaattaagaagggcgggtgcggtggttcacgcctgtaattccagcactttggaaggtcgacgtgggaagattgcttaagcccagggctcaaggccagcctgggtaacatggtaagactccatttctacaaaaaataaaaaataaaaagaaattagccaattgtggtggcaggcacctgtggtcccacctactcaggatgctgaggtggcaggatggcttgatcccaggagttcaaggctgcagtgagttaagatcgtgccgctgcactctaccccttttttgtgggtagttggtcaagctaccatggggcagaatgtagcaagctctgggcatcatcctgggtcctcaggcccagagagcacacaagtggcggcttcacatctacaaatttggttcctcccagagcgaggccctgtctcaaaaaaaaaaaaaaaaaaaaaaaaaaaaaatagaggccaggcgcggtggctcacgcctgtaatcctagcactttgggaggcagagacgggcggatcacgaggtcaggagatcaagaccatcctggctaacacggtgaaaccccgtctctactaaaaatacaaaaaaaaaaaaaaaaaaaaaattacccaggcgtggtggcgggcgcctgtagtagtgccagctactcgggaggctgaggcagaagaatggcgtgaacccgcgaggcggagcttgcagtgagccgagatcgtgccactgcactccagcctgggcgacagagcgaggctccgtctaaaaaaaaaaaattaacaagggaaaaacaaatttattaacatgtgtaccttatgtgtacatgggagatgccaagagaaatgaggtggcttatatagcttatataactcctgcttatatagcaccttcaacatatagcagcaaatttttggagaagtgacaagacgaaggaaaaggacattgaggccgggtgcggtggctcacgcttgtaatcccagcactttgggaggccgaggcgggcggatcacttgaggccaggaatttgagaacagcctggccaacgtggtgaaaccccgactctaccaaaaatacaaaaattagccgggcacagtggtgcacagctgtgatcccagctacttgggaagctgaggcacgagaatcgcttgaaccagggaagcggaggacgcagtgagcagagatggcgctactgcactctagctttggggacagagcaagactccgtctcaaaaaaaaagaaaaaaaaaaaaaagacgtctccagacaagagtctaaaggtgtccctggtgatcaacctttgtccttcctggtagagaggggaggagggcacctttgtacctttaggtcctgctttgaggcaaatcagggaagaacagagagcttttccggtatcagcttcattgatctcagctcaaaataatcctacaccaaggtcgcatatttcagaggggcatatgctggtctcctacgggggtctctcttgggggtgataaaaataccccgaaactagcaaggggtgatggttgtccaacatgtgcatgtactaatgtcactgaattgtgcatttttattttttatttatgtattctagaacaattcttaacgtccaaagataacgtctttccttaacgtcgaaagatgccttgttgtgatattacagcagtcattcctgctcactacgggcaggcagacagtgcagaaaaggtgaagcacaaaaactaaaaaggaaaatctctccttgaaccactgcgaacaggttggtggttttgcttggaatatttttggagcgtgtgggtagttggttaaacttagaaatatatttttttgtgcgtgggtagttggccaaaccgccgtggggcagaatgcagcaaactccgaggatgatccagggtctgcaggcctg

SEQ ID NO: 20556 - DNA, 2300 bp, Homo sapien
tcaatgtcctgggttcaagaaatcttcccaccttagcctcccaagtagctgggactataggcacgcgccaccgcacctggctttttaattttttatagagatagggtctcactgtgttgcccaggctggtctcaaacacctgggctcaagcagtcctcccgcttcagcctctcaaagtgatgggattacaggcctgaggcactgcactcagccgcccttgcttctttttttttttttgagacagagttttgctctgtggcccaagctggagtgcagtggcacgatctcagttcactgcaacctccaccacctgggttcaagcgattctcctgcctcagcctcctgagtagctgggattacaggtgcccgccaccatgcccagctagttttttttttctttgagacagagttttgctcttgtctcccaggctggagtgcaatggcgtgatctcagctcactgcaacctccgcctcctgggttcacgcaattctcctgcctcaggctcctgagtagctgggaatacaggtgcccgccaccacacccggctattttttatatttttagtagagacagggtttcaccatgttggccaggctggcctcgaactcctgaccaaaggagatccgcctgcctcagcctcctgagtagcggggattacaggcgtgagccaccacgcccggctaatttttgtattttcagtagagacagggtttcaccgtgttcgccaggctggtctcaaactcctgacctcaagtgatccacccaccttggcctcccaaagtgctgggattacaggcgtgagccaccacaccaagccacaacagcccttttctggacgctactttgggaggctgagattacaaatgtgagccaccatgcctcacctgtgtgttgtttttatttgtttttatctgctcatctcaaaaaagaaagtaaaatttccaaccaataaattcatcccacccaaatcccctacttccttaagctgtgcccccaaaacaccgagcagaattgcaaatcccataataagtgctttctggccgggcgtggtggctcacgcctataatcccagcacttcgggagactgaagcgagcggatcacccgaggtcggcaattcgaaaccagcctgaccaacatggaaaaaccccatctctactaaaaatacaaaattagctgggtgtggtggcacatgcctataatcccagctactcgggagcctgaggcaggagaatcacttgaagccggaggttgcgatgagctgagatcgtgccactgcaccccagcctgggcaacaagagcgaaactccatctcaaataaataaataaataaataaatagcgaaaaaaagttctttctaacacctccctactgagaccgccatagtgccctatgacatgtatgagctctctctccctctctctttctttctctctctctctctgatgaataataagcttgaatgtgttcaatcacaggtacattcctggtggtctttgactggggaaggaggggtgaccggcccctttaaagggagatctgtgagccctagaataatatcaagaggtgcagtgattcagggaagtgggtccattctgtgtggggtgtgtagaaggtagagggacagaaaaactttagaggatgataataataatggacaccagcagcctatttaatcaaatcctcaatactgacactgctttctgaactggctaccatcattagtccccttttgcagatgacaaaacctaagtcctagccaggcatggtggcacacacctgtggacccacccacttgggaggctgaggcgagaggatcgcttgagcccaggacttcaagtccagcctgggcaacatagcgagagcttacctcaaaaacaaaaccaaccgaacaaaaccccagaggctccaaaaagtcaattacttgcctgggttcctggagctctaaggaggcagtattcgcaccaagcctgcctgctaattttcctcccggctgcccctagaggtgctgagtggtcattgtgacagtatcattacacaaaggaagctcttggggtcacaatgcgcagggctggaccacccttggatgcagcctgggaaggaacatgaggatcctctgagagaccagggacagagggagacccaaagatctggtctgtagctaagtgaattttctaaaactcattgattcacacgccatcccttgaggtaggtgcactgtcctcgtccctgatgtacagaggtgaaaactgaggctcatgggagcttaatgacttattccaagattacctggctagtagt

SEQ ID NO: 20557 - DNA, 2300 bp, Homo sapien
tcagtctgcagaccgttcttttgaacaactggggaaagtggctgcaggcagaatgagccccctgtggctcataaccccagaagtagagtgagaacctccaatgtcaccttctcaacccatacctaattattgtggccaggggataggggccctttgattagagtccagctcacgtgggactgggaaggggtgttagacacatgtgcatctggagtagtggaggggaccccacaaaggaaaagaaagtactgttagattctgagccaaagaaacaacagatgtcatcacatgtatttgtaatgggatcatccaggaagtgtcaggataaggaaccaggggcataatccaattgaagttatctccaatctctcagatctgctgtgggctctgcggaaagatggaaagcaggtctcaggctgagtctaacacacatctagaaggttcaggaaggaagaaggaaccatagggtgtctctataaggaggacatggggacagaggagtatcttatagaatttgggcttgtacttggtggtttgcattttttgttttgtttttgtttttgagacggagtctcgctctgttgcccaggctggagtgcagtggtgcaatctcggctcactgcaacctccacctcctgggttcaagcaattctcctgcctcagcctcccgagtagctgggattacaggtgcctgccaccacgcctggctaatctttgtatttttagtagagacaggatttcaccatgctggccaggctggtctcaaactcctgacctcaagatccacccgccttggcctcccaaagtgctgggattacaggcatgagctaccgcacccagcctatactgggtggttttacagagaattactagggtggtattgtcgggaacctgggagcgctttgctgactaggtatttcagtgatttttgtctcagaggtgggaggatggcagttgggttggaattgtcgtcggtaagaagtggcagtcatttgtgttcacttggagagggggatgagaactcatttttgtggttgcacagggcccatgtctctatcttggttcagacatggtcacagagtggccttgcctcatcattgtttatattctgtgaccattgtttatatttagtggagaacatcgcggcccagccatcaggagctgatttccactctctctcctggctggcagcggggatctgtgtctccaaggaaagtttgccccgagcccttcccggcccggcgtagggttctccggaaaccatcactcacatctagcacttggaggcctccagggacagcggtgacccaccatctgggtaggaggctgaaaacactagaggaggaatatcccaaatctgtgccttggcgggtgttacccagaaagggtgacgggtttcaccatgcaaaaaggaaaaattggaggaaggccaggttaagcaaaaatagacatgtttttagattgcagagctgagaggcttggctgtgcctatgtgcgctgcaagtctccaagaacaacatgtgtagagttttacgaacaaagatagagtcagagacatgggcaggaggcagagacagagagagagagacagacagacacagagagagatagaggcagagaaagcaacagaggcaaagagattggaacacagagaaagagatggggacagagacacagagaaaggaacagagatgggaagacagggacagagacagagaatgaacagagatagagagatagggacggagagagacagagagagggacagggatggagagaaagagatagggccagggccacagagggactgagacaggcccaggaggagactagggatggggccagggctgcgtgcgggcggggcacggtgcagacaaaggcgcggccgcgcggtcggggtggcctggccggggacaaaggcctgcccggggggcgggggcagcgatggcgacggccgcggcgggcgcgggcgaactacaagtcccagcagctcccgctgcggccctcggccggcccctctcgctccccgggagcgcctggcggggccgctgggccgagggggccgccggcggggctggcgggcggggggcttcctgcgggcccggggggagccggcggccggcgcgggcgcggcgggccgggcaggggcgaggggcgccgggtgagtgtccctgcgagcgggctggggccggggcggggggctgggtggggggcgggcgggcgggggagctccaggcgcggggcgcagcccggggcgacctctaatcgtcccccgccctgcgcgccgccggccctggccc

SEQ ID NO: 20558 - DNA, 2300 bp, Homo sapien
catgatgaggccggggcaggtctccctcctgggtcctgatgctgtttctgtgctcggctctggcttgggcctcagccctggcaccagctctggccgcaaccctgaccctggctctgggccgggcactctgccggatcccagctccaaacccctccccggctccagatccacccccagccctactcctgtggaatcttctgacccaaaggctgggcacgacgctggtcccgaccttgtgcccagcccagaccttgatcctgtgcccagcccagaccctgatcctgtgcccagccctgatcccaaccctgtgtcctgccctgacccctgttctcccactcgtggcactgtcagcccagccctccctaccggcgagagtccagagtgggtacaggagcaaggggcactgctggggcctgatggctgaaggagacgccggcatcctcgggggcctggggaagttgtgtgttgtgcagtcagtaaaatcctcccactgcctccgggctctgtgtcgtggcttgccttttgtgctttctttctgagcacagccccttgctccggagatgggacattgtggccagggccagccacaatctggagctccagtgtcctggcttccttcttgggcccaccagctagactttccagcttaacccacagtgtctcatcctggtccatcccactagtcaccactctctgttcctctcacttaccccttgctcttcaaagcccatacagtaggtatacaagtggacaaaaaaagttgctcatttatgcaatcaacaaacatctctggattgctggggtctcagcagggaacaagataaatatggcctcgacctgcatggagctcatagatactaaattcagaatacttaaaaaataattacggggtatagtacattctaggagaagcataacaagacttctgatataaatggcaggcagctttctcaatgaaggattttgtaatcccaataatcactaatttaataatcagtactgtttgcccagccttatgcgatagtttttgcattctctcatttaatcctctcaacagccccagtaggtagatgactttgaatatccccattttgcaaatgagaaaattgaggcacatttttttttttttttttagacagtcttgctctgttgcccaggctggagtgcagtggtgtgatcatagctcactgcagcctcgacctcctgggctcaagcgatcctcccaccttagcctcccgagtagctgggattgccggtgcatgccaccgcccactgcgctcagcttggagttgaagggactctggaagatgtagaagtggcattgtcagtgcctagatttaaatcccaattgccctccagggtccaaattcttaaccattacgctccagggcaaaagtatgcaaaggctctggggctatagaaagatgagctttggatggaggtaggagccagatcagagggccctgatagacgagagtggggactctgcctgtcattacagagcaatgggaagccgagggcaggttctcgcaggaaggataggaattattctttgaagatgcttgtggctgctgggtagagagtggagtggagggaggctgagatcggggaggaggttgctgcaaagatccaggccaggaatgttggaagactctgggctgggggccatggggtggggataagtggttctatttgatacataattaggaaatcgtgtttgctgaagatgcgcaggagaagggtaaaaggagtttctgggagaaagaggaagacagcgttgagatagtaggcagggtcatcaccaggcaccaaggaggataaggggtcaagctctggacatggaagtcacaagcctggcaccggattcggggcatggccgggagccagggcagagctcgtcgttgccaaactcagagtcagcccatcccccgccacccagagcgcgtcggcgctaggacctagcgactgccttcgacccagagggcgccggcagaggcacgcatgcgcgctgttccggcaggggttgtcgtggcgcagggggcgggaccagaggcggtcacgtgaggggctctgggctaccgggtcacgtgaccgaggcacagatcagctgatgccggagggtttgaagccgcgccgcgagggagcgaggtcgcagtgacagcggcgggcgatcggacccaggctgccccgccgtacccgcctgcgtcccgcgctcccgccccagcatgacagccccggcgggtccgcgcggctcaggtgagggcgcgggcggcaccgtggggccccgaactcaggcgggc

SEQ ID NO: 20559 - DNA, 2300 bp, Homo sapien
ctgcaagggtcaggggacagagcaggatgcggaagtggcaggtagataggattctttcagcagatatatctaagggccaagatctgtgctgggttctgggcatggaggaaaatcaggtgtgcatgatccgtccaaggcctgtgggcaaggatggcacaggaacagacatcccatgaccaatgacctacttgtaacaggtatgaaggaagagtggaaggttgcagagggacccctgctttagattggtatgacaggagatccaggagagcttctagaatgttctatccatcactagtctctagccctatgcagctatttaaattttgattttaattccggctgggcacggtgactcacgcctgtaatcccagccctttgggaggccgagggggggtgggggtggatcacctgaggttaggagttcgagaccagcctggccaacatggcaaaaccccatctctactaaaaatacaaaaaattagcggacgtggtggcaggcacctgtaatcccagctactccggaggctgaggcagtagaattgcttgaacctgggacgtagaggttgcagtgagccgagatcaagccactgcactccaacgtgggcgagagaccgagactctgcttcaaagacaaaacaacaattttttaaaaattttaattcaaatgaagtacaattgcaaatttagcctctgacttgcaccatcctgtatccagtgctcaaaagccagtgtggctggtggctgccatattggacagcatagatattgaatacttccatcgcctctagactgaagagatgggagcccaggggcagtgcaccgaggggaaggaatagctaaagcaaaggtctagtagcctgaaaaaacttggagaaaagatggcccctccatgaggccgagtgagaggaaggaagccttggctgggaccctgccacatccaatgtcaccggcagatgggtacacccccttttccccatgcatggattcagctgtcccacagacacattgactcaggcccttggaactacttcctgtcttgccttagcacgtagacatcacacacatgcatccactcaggtgggcagtctcaggccctgctcccactgctgtgctcagcgtgcatccagctcactcaatagatggtttctgagcatcgaggtcatgtcagccctggctctaggtctgtaggtgctggacctacagcagaaggcaaagacacagactggcaaagacacagcttgtatccaggttcaggggtcagggaaggtccctctgtgcaagcaaactgtggaacaacgggtggagcaggcccagcaagtgcaaaggcccggaggtgggaagcgatgcagatatggctggaggggagggcggacttcaagggccttggaggttgggagccactttcaggctgagcctcccggcttctctccccagcatcccggcggcgcaggcgcagaggagagcgagctgcaggcctacatcgcacagtgccaggacagccccacctccggcaagttccgccgcgggagcggctcggcctgcagccttctctgctgctgcggaaggttcgagtcccgggtctggcacattcagattggaggttagggaatggggaaaggggagcgagccagagaaaactgacgcccctcttccctgcttccttcctccagggacccctcggaggagcattcgctgctggtgaattgattcgacctgactgccgttggaccgtaggccctggactgcagagacccccgcccccgaccccgcttatttatttgtagggtttgcttttaaggatcggctccctgtcgcgcccgaggagggcctggacctttcgtgtcggacccttgggggcggggagactgggtggggagggtgttgaataaaagggaaaataaatgtgtcgttttcatttttagcgggaggagcagtccttgcgttaagcggtgtgaggccctttaaggcgcggccacactcagcatggcggcctcagtcggccttccaagcatggcgcggggaggaggggtgggagggtcgggagggactgcggtgcgactaggagtgaataatttaaaggggccgtgcctgcggagccgggcggaacgctagcggtgttggcgcggagtggaccccggctgcggcccctgggtgagtctgggtttccgttagcctcgcaggggtgtcccttcgagggtcgttagcgagcctccgctttcccacgatctgtcctccgattcctgttaactctagactttctgatgttcccataccccccacgtctcggcaggtgtttccac

SEQ ID NO: 20560 - DNA, 2300 bp, Homo sapien
agtgagccgagatcaagccactgcactccaacgtgggcgagagaccgagactctgcttcaaagacaaaacaacaattttttaaaaattttaattcaaatgaagtacaattgcaaatttagcctctgacttgcaccatcctgtatccagtgctcaaaagccagtgtggctggtggctgccatattggacagcatagatattgaatacttccatcgcctctagactgaagagatgggagcccaggggcagtgcaccgaggggaaggaatagctaaagcaaaggtctagtagcctgaaaaaacttggagaaaagatggcccctccatgaggccgagtgagaggaaggaagccttggctgggaccctgccacatccaatgtcaccggcagatgggtacacccccttttccccatgcatggattcagctgtcccacagacacattgactcaggcccttggaactacttcctgtcttgccttagcacgtagacatcacacacatgcatccactcaggtgggcagtctcaggccctgctcccactgctgtgctcagcgtgcatccagctcactcaatagatggtttctgagcatcgaggtcatgtcagccctggctctaggtctgtaggtgctggacctacagcagaaggcaaagacacagactggcaaagacacagcttgtatccaggttcaggggtcagggaaggtccctctgtgcaagcaaactgtggaacaacgggtggagcaggcccagcaagtgcaaaggcccggaggtgggaagcgatgcagatatggctggaggggagggcggacttcaagggccttggaggttgggagccactttcaggctgagcctcccggcttctctccccagcatcccggcggcgcaggcgcagaggagagcgagctgcaggcctacatcgcacagtgccaggacagccccacctccggcaagttccgccgcgggagcggctcggcctgcagccttctctgctgctgcggaaggttcgagtcccgggtctggcacattcagattggaggttagggaatggggaaaggggagcgagccagagaaaactgacgcccctcttccctgcttccttcctccagggacccctcggaggagcattcgctgctggtgaattgattcgacctgactgccgttggaccgtaggccctggactgcagagacccccgcccccgaccccgcttatttatttgtagggtttgcttttaaggatcggctccctgtcgcgcccgaggagggcctggacctttcgtgtcggacccttgggggcggggagactgggtggggagggtgttgaataaaagggaaaataaatgtgtcgttttcatttttagcgggaggagcagtccttgcgttaagcggtgtgaggccctttaaggcgcggccacactcagcatggcggcctcagtcggccttccaagcatggcgcggggaggaggggtgggagggtcgggagggactgcggtgcgactaggagtgaataatttaaaggggccgtgcctgcggagccgggcggaacgctagcggtgttggcgcggagtggaccccggctgcggcccctgggtgagtctgggtttccgttagcctcgcaggggtgtcccttcgagggtcgttagcgagcctccgctttcccacgatctgtcctccgattcctgttaactctagactttctgatgttcccataccccccacgtctcggcaggtgtttccacaccggtagccagctgtgccctgaggtggaagaggaccggccacccaggaattttccaagtaacgactcggagtctccgggattcctatctcccggcccccgaatttccattaatattctagcgatgtcagaaacatcctcagcttcccagaaaaatcccagtaatattccagcatctctcagtatcttccaaggagcccggacgccctccccaggcccgctctcataagcaccccaggaatgtgcccacccacctcctggttttcccagcagtagtattgtaatcctcagaatctcagtaactttccagtgaccccgcatccccacccactaatcccagcgtctctggttacgcctcccagcaatggcgccaccatcggtcccggagtcccagtgatgctctgtgccatagagcccccataacttcactactacgtgatagtaaatccccggcaaaaaccagcagcgccttgcaagcccacgccaccccaagcatcccaggactcttctgaaacgtgggtatcagacgccttccgcggatgccccggcagtactcccgtgcctccca

SEQ ID NO: 20561 - DNA, 2300 bp, Homo sapien
cgacctgactgccgttggaccgtaggccctggactgcagagacccccgcccccgaccccgcttatttatttgtagggtttgcttttaaggatcggctccctgtcgcgcccgaggagggcctggacctttcgtgtcggacccttgggggcggggagactgggtggggagggtgttgaataaaagggaaaataaatgtgtcgttttcatttttagcgggaggagcagtccttgcgttaagcggtgtgaggccctttaaggcgcggccacactcagcatggcggcctcagtcggccttccaagcatggcgcggggaggaggggtgggagggtcgggagggactgcggtgcgactaggagtgaataatttaaaggggccgtgcctgcggagccgggcggaacgctagcggtgttggcgcggagtggaccccggctgcggcccctgggtgagtctgggtttccgttagcctcgcaggggtgtcccttcgagggtcgttagcgagcctccgctttcccacgatctgtcctccgattcctgttaactctagactttctgatgttcccataccccccacgtctcggcaggtgtttccacaccggtagccagctgtgccctgaggtggaagaggaccggccacccaggaattttccaagtaacgactcggagtctccgggattcctatctcccggcccccgaatttccattaatattctagcgatgtcagaaacatcctcagcttcccagaaaaatcccagtaatattccagcatctctcagtatcttccaaggagcccggacgccctccccaggcccgctctcataagcaccccaggaatgtgcccacccacctcctggttttcccagcagtagtattgtaatcctcagaatctcagtaactttccagtgaccccgcatccccacccactaatcccagcgtctctggttacgcctcccagcaatggcgccaccatcggtcccggagtcccagtgatgctctgtgccatagagcccccataacttcactactacgtgatagtaaatccccggcaaaaaccagcagcgccttgcaagcccacgccaccccaagcatcccaggactcttctgaaacgtgggtatcagacgccttccgcggatgccccggcagtactcccgtgcctcccagctcctgggtcttccccggggcaggcttgcgtcgggagccgagtatctaggtgcccactcccggaccccacggtttgcgggcccgttttcctggggtggggcattcagtcttcgacggagtagggggtgcggcctggggggtggggtggtcaggcttgatcaaccctgcagagggcagtgacccgggaggaagtcaccaggtgcagaggaccgtgccctgtggggacctgcctgcaggctgctgacagtgggtaccaggtcggcctttggccccggggtggggttggacaggcgggcgtctggtaggccctacgcgtaggcgaagggagcaggaagccggggacccgcctcatctcctggccagggccgagaggtcggtttgctccatcccttagtcccgcagcgcccctctagcctcgcccctggcagctggagacgcttcccccgccaccccagagggcagggcttgagctgggggcagggcttgaggcaggggagaggtgggcccagattgacgacttgcacgggttccttcgactccttgatttcccaggactccgggctaccagatcggccgtccagctggaatcaaccgatggaggctccgctgcaaactggaatggtaaggggtggggcggagaccgggtaggtgccggcgtggggcgccaagaggactacaactcccggcgtgctcagcgcgcattacgtggtctggcgataacgcgctgcgtccgctcgggcggaactacgtttcccggcatgcactgcgggccgccgggcctcagggaagagtcgcgcccccggggagggagcagcactggcccattctgcagatggggacatcgagtcacgggctggctacgaactcctcgggggcgaaggtggcggagagggatgggttccaggacgtcctggcgcccggggaaggctcggcgggacggatttgcggtgcgcagccagtgccgttcgtccctcaggtgcttggcgtgatgatcggggccggagtggcggtggtggtcacggccgtgctcatcctcctggtggtgcggaggctgcgagtgccaagtgagcacccgaggggcccctcttgggaggctgtatggtggggggcccaaatgcccgggtcccgaggcggcagagat

SEQ ID NO: 20562 - DNA, 2300 bp, Homo sapien
aaagaccctccgctggcaaaagatccctgagatagaccttggaggatgggaccctgagttaaactcagtgaaatcaagaaattcagatataattccttttttggctgggcgtggtggctcatgcctgtaataccagcactttgggaggccgaggtgggaggattgcttgaggccaggagttcaagactagcccaggcaacacagtgagactcccatctctacaaaaaaatttaaaaattagccaggcatggtggtgcatgcccatggtctcagctacttaagaggctgaggcaggagagatctcttgagcccaggaggtaaaggctgcagtgagctgtgattgtgccactgcactctagcctcaacaacaaagtgtgatcctgtctccaaaataataataataattataattgttatgattattccttttttgatcagggagatcttgggctaactcttccctaggtcacagaaagctcagacagccctctgacaatcatgaagatatcagggtagtcccttaagagtgtgcaaacactacagacagctcctgtgatgtggagaaacctgaggtatagaccctcaactgatcatggggaactttgagatagtccttctactcaactcacagaaagccctgccattggccgggctcagtcgctcatgcctgtaatcccagcactttaggaggccgaggcggacggatcacaaggtcaagagatcgagaccatcctggccaacatggtgaaaccccgtctctactaaaaatgcaaaaattagctgggcatggtggtatgagcctgtagtcccagctactcgggaggctgaggcaggagaatcttttgaaccgaggaggtggaggttgcagtgagccgagatcgtgccagtgcactctagcctagtgacagagcaagactccatctcaaaaacaaacaaacaaacaaacaaaaaagaaaggactgccattgcaggactattgatcatggagagccctgccctggtgtgaagaaacccttgaggcagacctccaggtagactacatgacgcacagggatcccagagccagcacccaacttgcaaagagagttggagagcctttctcgcagaccttgctgccaacagggatctctgatgcatccttcctatatttctagtgcaagaaaattcataagatagcccctagggaacagaaactcctgagacagcctccttagtgtgggaagaacttcaaggtccataacataggaaagatgccttctgatgtacagagatgcctgagataacccccggagaagagaggctggaggctggagatagcccctttaggagatcgtagaaacacaattacctcagtgaggtaccctggaagaaaaccactcatgtgaagagactcatgaaataacctacatggaaacccctgatgtagacccccccactaagtatatggcaagacctctgagatattgacttgggaacaaatagctcagatactccagtggaaggagaaggtcactgaggtagccctcagggaagagataccctagagacagcatgtctggtgtggaagagctctgagaggagagtccagagatgtctctctgaaacaggaagactttcttcttcttcttcttcttttttttttttttttttttttttttgagacagagtctcactctattgcccaggctggagtgcagtggcatgatctcagctcactgcaacctccacctcccagattcaagtgattctcctgtctcacccttctgagtagctgggattacaggcccatgccaccacgcccagctaatttttgtatttttagtacagatgaggtttgccatgttggccaggctggcctcaaactcctgatctcaggtgatctgcccgccttagcctcccaaagtgctgggaattacaggcatgagccacagcgcgcagccaatatgggaagacttccacaacactttggtgtaagctgattactcaaaaggcccctgagataacccctaataccaggtcacacccagcacagccttacttcttggcaatgttgagcatcttcagtttcttcctcatgcgtggccgggaggtggcggagacagaggtatccacgagggaggaggtggattgtgacacctgggagaatgaaggcggagatgggtgaattgctaattcagaccttggagaagaggcagacggatccagggggtctccatcaaggaaggagcggtggcggacactaagaagtgtaaatagggaaggggcgcggcctctgtgtggtcagggcggaccccaggggt

SEQ ID NO: 20563 - DNA, 2300 bp, Homo sapien
cactgggattacaggcatgagccactgcacccagcagaaacaggcattcttgcacaggtatacctgctttcatgcctacacaatctgtcacaggcacccaccatatattcaaatccacaaagatactcacatataaacacacatatatgcacaaaaatatagtcaggaactgctcatcataaatcacacatctgctgggcgcggtgcctcaagcctgtaatcccagcacttcaggaggccgagttgggcggatcacgaggtcaggagatcgagaccatcctggctaacatggtgaaacccggtctctacttaaaaaaaaatacaaaaaaccagccgggcgtggtggcgggtgcctgtagtcccagctactcgggaggctgaggcaggagaatggcatgaacccaggaggcagagcttgcagtgagccaagatcgcaccactgcactccagcctgagcgatagagcgagactccgtctcaaaaaatcaatcaatcaatcaatcacacatccatgtgcatatagccagattcacatactcaaatacaaacccacttagacacacagcctcacctccacacagagccttctcccagcacacactgcagataccagaataatacacaaagacacttgcaaatacacccagtacagctacgcaaggacactcatagacacaaatagtcacactcttgcagaaatatacacactttttttttttttttgagacagggtctcactctgttggccaagctggagtgcagtggcactatctcagcttctgcctccctggttcaagcgattctcccgcctcagcctcccgagtacttgggattacaggcatgcaccattatgcccggctaatttttaaaaattttatttttagtagagacggggttttgctatgttggccaggctactcttgaactcctggcctcaagtgatctgcccgccttggcctcccaaagtgctgggattacactcgtggccaccgctctcggcctgaaatacacacactctcaatgtctctccatactcctgcattgacagaggcatcaataacagcctcatacaacacaccagtacgttcagatgcacagagatagacatactcacagcactccaaaaacacacacacagccgggcacggtggctgccgcctgtaatcccagcactttgggaggctgaggcgggtgatcacctgaggtcaggagtttgagactagcctggctaacatggtgaaaccccaactctactaaaaatacaaaaattagccgggagtggtggcgcaaccccgtaatcccagctactcgggaggctgaggcaggagaatcgcttgagcctgggaggcggaggttgcagtgagtcgagatcgcgccactgcactccagcctgggagacagagtgagtgagaccctgtctcaaaaacaaaaacaaaaacaaaaacaaaaaacagacacacactcatcacttccatccatcctcaggatacagacatctatataatacatatccttgtacacacaacaaattaaacacacacttacacgtgcccagatacataccccacacacacacacccctagacaccccccaatacacttggtcaccacccaaatgtattcagagatacacagatacgaagacactcatattcttgtgccttcactaacataatcagaaacaggtgcacccaaccactctctgcctgagggccggcgtttattgcaagcacttgcaggagctcctacgcctaagggtagacactggggctggcacacacagagggtccctaatcctttccagtaagctaggcgcgcgcgcacacactcacacacgcgcgcgcgcacacatacacactcagtcctccgcaagctccctccaccatcgccgcagtccaggccgcccccctccgccccgcccctgctgctccgtgcacactgcagtgaggggcccgggcggggcgcaggggcgcgccagggtccgggtccgggttcgggggcggggcgcacctgggctcctccccggggcgggcccgacgcagcgtcgccagcgcaagcggccgcacctggctcagcagcggcggcggcggcggcggcggcagcggcggtagcagcagcgggcccggctggggcgcgagcgcggcgcagcccagcccagcccagtccgagcgcggacccggcgcccgcagccccggcgccgccatggtggaggcggcgccccccgggcccgggccgctgcggaggacctttctagtgcccgagatcaagtcgctggaccagtacgatttctcgcgggccaag

SEQ ID NO: 20564 - DNA, 2300 bp, Homo sapien
aggaggtgggggtcctgaggctgaagtacgtctctccgtacagttctcctgtcttcaccttccgccacccgcttctgtcatctggtggcccccagtccccactccgaggatccacaggtgaggagggggtaggtggcttctgtcacgggggacccccccactcacagactgccccagtgggcctcatgttgtctcctcgtgagccttccaatagcctctccatcagatcccccttgggcatcccaaagtgacccccagaatggcctccccagtggccccacagtaccccgtagtgacagtaaatggccccgggtatctgtttctggaaacctctggtctcactagaccacataatgagccatcagtgactcacccaatgaccttgcagaggttgtccccagatgctggctgaccccactcagggttcccagggtccccatagtgaccactcatcgcctcccccaggctccctgaagtcttccccgtccatgtcccatatggaggccctgggcaaggcctggaaccggcagctcaggtgagtagacctcacaggccagggtagggggtggagcaggctagggcgggttggggccgaggctggtcccaggggctgacccctccctccggccgcccagccgtcccctctcccaggctgtgtcattcagcaccccctttggcctggacagcgacgtggatgtcgtcatgggagaccctgtgctcctccgctctgtgagctcggacagcctgggccccccgcgtcccgcgccggccaggacccccacccagccacccccggagcctggtgacctgcccaccatcgaggaagctctgcagatcatccacagtgccgagccccggctcctcccagatggggcggccgacggcagcttctacctccactcccctgaggggccctccaagccatccctggcctccccctacctgcccgaggggacctccaaaccactgtccgacaggcccaccaaagcaccagtgtacatgccacaccccgagaccccctcgaaaccatctccctgtctggtgggggaggcatcgaaaccgccagccccatccgaggggtccccgaaggcggtggcttcgtccccagcagccaccaactccgaggtgaaaatgaccagctttgcagaacgcaagaaacagctggtgaaggcagaggctgaggccggagcggggtcccccacgtccactccggccccgccggaggccctgagctcggagatgagtgagctcagcgcccggctggaggagaaacgcagagccatcgaggctcagaagcgacggattgaggccatattcgccaagcaccgccagcggctgggcaaaagcgccttcctgcaggtgcagccgcgggaagcctctggggaggcggaagcagaggcggaggaggccgattccggtccagtccctggtggggagcggcccgcaggcgagggccagggtgagccaacctcacggcccaaggcagtgaccttctcgccagacctgggcccggtgccccacgaggggctgggggaatacaatcgagcggtcagcaagctgagtgccgccttgagctcgctgcagcgggacatgcagaggctcacggaccagcagcagcggctcctggccccgcccgaggcccccggatccgccccaccacctgctgcgtgggtcatccctggccccacgacggggcccaaagctgcatcccccagccccgcccggcgagtcccggccacccggcgcagccctgggcccgggcccagccagtcaccccgcagcccgaaacacacgcggccagcggagctgcggctggcacccttgaccagggtgcttacgccaccccacgacgtagacagcctcccccacctgcgcaagttctcgccgagccaggtgcccgtgcagacgcgctcttccatcctcctggcggaggagacgccccccgaggagccagccgcccggccgggcctcatcgagatcccgctgggcagcctggcagatcccgccgccgaggacgagggagacgggagccccgctggtgctgaggattccttggaggaggaggcgtcttcggagggggagccccgggtggggctggggttcttctacaaggtgagtccccgagcaggtggctggagggtcctgggcctggggcgggggcgggtgggggcggggggaggtggacaaacccactattggatgaatagggctttactgaaggatgggtgggcgggtgggggatagatggggagccaggtatgaatggacagaacaggtgtgagtggctgggtaaggcctcc

SEQ ID NO: 20565 - DNA, 2300 bp, Homo sapien
gcagtgaccttctcgccagacctgggcccggtgccccacgaggggctgggggaatacaatcgagcggtcagcaagctgagtgccgccttgagctcgctgcagcgggacatgcagaggctcacggaccagcagcagcggctcctggccccgcccgaggcccccggatccgccccaccacctgctgcgtgggtcatccctggccccacgacggggcccaaagctgcatcccccagccccgcccggcgagtcccggccacccggcgcagccctgggcccgggcccagccagtcaccccgcagcccgaaacacacgcggccagcggagctgcggctggcacccttgaccagggtgcttacgccaccccacgacgtagacagcctcccccacctgcgcaagttctcgccgagccaggtgcccgtgcagacgcgctcttccatcctcctggcggaggagacgccccccgaggagccagccgcccggccgggcctcatcgagatcccgctgggcagcctggcagatcccgccgccgaggacgagggagacgggagccccgctggtgctgaggattccttggaggaggaggcgtcttcggagggggagccccgggtggggctggggttcttctacaaggtgagtccccgagcaggtggctggagggtcctgggcctggggcgggggcgggtgggggcggggggaggtggacaaacccactattggatgaatagggctttactgaaggatgggtgggcgggtgggggatagatggggagccaggtatgaatggacagaacaggtgtgagtggctgggtaaggcctccatgggtgggagaggggggaaagggacatttgcacggtggggggcaggtatgtggggtgacaggggcctcagatgggatttgaccctgtctgttgggtaaggacttccacaaggggctgtgggggtgcagtggggtgagaggtcctccccctgtggcttaatgagtgaggccctcgggtatgtttgggggtgaggggtttccagtgggggctgacccagtcatgtccctcccaaacaaggtatgggtggccggacaagggggatagatagatgtggggaggggtggagaaacagggaggagtcatggatagacagatggatgaatggctggttgcatgggtgggtgggtgatggacagatagacggacaggaccaggatcttcagcgcacctccttgctcatcctctccttcaccccctcgcccccagcacgctcctaccacccctttcctggccctgccctgtgtccactgtctctccattcccatggctttcccagccggggacacctagggttacctgactggcctctgctgcctgcctccatcccgggccattttgcactgagtggtcggggattttgactgctccccttacccttgcttttagaatgaaagtcctccccagggtggccgggcgcagtggctcatgcctgtaatcccagcactttgggaggccaaggcaggcggatcatgaggtcaggagatcgagaccatcctggctaacatggtgaaactccgtctctactaaaaatacaaaaaattagctggcgtggtggcgggcgcatgtagtcccagctactcaggaggctgaggcaggagaatggcgtgaacccaggaggtggagcttgcagtgggcctagatcgtgccactgcactccagcctgggcaacagagcgagactccatctcaaaaaaaaaaaaaaaaaaaaaaaagtgagcacagcccaaagccctggggaggacttccttttcattttttttttttgttttgttttcttttgttttttgttttttgagacagagtctcgctctgtggcccaggctggagtgcagtggcatgatctcggttcactgcaacctccacctcctgggtttaagtgattctcttgtctcaccctcctgagtagctgggactacaagagcatgccaccacgcccagctgatttttgcatttttagtagagacagggtttctccaggctggtctcgaacccctgacctcaagtgatccacctgccttggcctcccaaactgctgggattacaggtgtgagccaccgcgtctggcctgtactcacttctgacttagtcctgcgccactgtcctcagctctgtgtcccagccacactggcccccttgtacttccgtgccccccagtaggtttgctccagcctcagggcctcggcactagctgtcccctctgcctggaacgctctgctctgtacgcccacctagttaaatcctgatcattctacagggtacttc

SEQ ID NO: 20566 - DNA, 2300 bp, Homo sapien
gctccagctgccctgcccaccagcccccaccccacctggtccagttataacaaaactgccaagtgggtcccgggtcccgggtgattgcttcgtgtttcatcactgacctgtacatcccttgatgggtcagcacaccttctctgatgtcccagtctgtccctgtcattgctgagacatgtcacccctcccacaccccttcttcccacatttgccaactggggcagggcaaatggttctgggggtgtccataaagctgaccgatcagcatctgtcccctcctattccccagctacaaactctggtaccgatacctgaaggcgcgtcgggcacaggtgaagcatcgctgtgtgaccgaccctgcctatgaagatgtcaacaactgtcatgagagggcctttgtgttcatgcacaaggtttggggctcggcgaggggatgaatcgggaagtggagctcagtccatggtggtgggtggggcggggacaggggctgggctcagcatgttagggatgggggcttggattcctgttgcttctttgcatgggaagttgggctggactcagtcctggagctgggggtttctgggtcccgccgcatttatgtggtggccccaggtgtggctcagccacaggacatcgagtgtctgtggccaggccatggagtccgtggcttagccccagccgcctctccccacacccccagatgcctcgtctgtggctagattactgccagttcctcatggaccaggggcgcgtcacacacacccgccgcaccttcgaccgtgccctccgggcactgcccatcacgcagcactctcgaatttggcccctgtatctgcgcttcctgcgctcacacccactgcctgagacagctgtgcgaggctatcggcgcttcctcaaggtgagcctagcaggtgcgctggttccccaggttagtttccagaaacggcctcactgtgacactagctccgcgtaggatgtcacccagcagacgggatgtgggaagaggctcctggagatgcatgtgttttgttgttgtccgtgattcatgtctttattttccaaatagtttgttcacactggtttcacattaggcatagcgatgggtgctgaggacagtgtgactaagacactccctgcctgcacggagcttttagtctaagtaggaagacagatgcatatgagctgatggcatgaactagagtaaaaccacagccatgaagagggccaggaataggggtggggagaagcaggcagggtggagagtggaagcaccagccgggcgggagtggggcatggtttgctcaaacttaaagtatctgttttatgacgtttggattctaagctggaccagtcaggactgaggctggacccgtggggcccaggctggacactatagtcaaggctggacccatgggatcaaggctgacccaaaggggccaaggctagaccagtcaggactgaggctggactagtggagccaaggctggacccattgtgggttgggggtcaattctaacccaaaaggaccaaggctggaccattggggctgagactggaccaccgcagtcaaggctgtgcccttgcgggtcaaggctaacccaaaaagtccacagctggtctagtcaggactgaggctggaccagtggagccaaggcaggacccacagggggttgagcctaacccagtggggccaaggctagaccagtaggaaccgggctggaccagtggggctgaggctggtttgacagggcttgcttttgcccaagacactcataaatgggtggggggggacgccccgaagccactgaatcgggaggtgggcgtagccctgccaccccactgactgcctgaggggtggctcggtccccagctgagtcctgagagtgcagaggagtacattgagtacctcaagtcaagtgaccggctggatgaggccgcccagcgcctggccaccgtggtgaacgacgagcgtttcgtgtctaaggccggcaagtccaactaccaggtgggcctgccgggagccggcaactgggtgggagggccaccccctccatgactgagcctgagactctcccccactgccccatgccctgcagctgtggcacgagctgtgcgacctcatctcccagaatccggacaaggtacagtccctcaatgtggacgccatcatccgcgggggcctcacccgcttcaccgaccagctgggcaagctctggtgttctctcgccgactactacatccgcagcggccatttcgagaaggtgcatgctggcacacggggctctgggttcggggcgggg

SEQ ID NO: 20567 - DNA, 2300 bp, Homo sapien
ggactgagctccacttcccgattcatcccctcgccgagccccaaaccttgtgcatgaacacaaaggccctctcatgacagttgttgacatcttcataggcagggtcggtcacacagcgatgcttcacctgtgcccgacgcgccttcaggtatcggtaccagagtttgtagctggggaataggaggggacagatgctgatcggtcagctttatggacacccccagaaccatttgccctgccccagttggcaaatgtgggaagaaggggtgtgggaggggtgacatgtctcagcaatgacagggacagactgggacatcagagaaggtgtgctgacccatcaagggatgtacaggtcagtgatgaaacacgaagcaatcacccgggacccgggacccacttggcagttttgttataactggaccaggtggggtgggggctggtgggcagggcagctggagccattcccacctgcagggcagcagcttgagtgcccgctcgtatagctgattgagcctgggcttcggggcgccctgtttgaactcgatgtagcgaagccagcatttgacagagaattggttccgcatgatttcctcctcataggggaggtcctcttcctcctgccagggccagggaatgggaagaagagaggcctaccctcagagcctgtgtgcagcaccatcccactgctggggctcaggtccaaactccggacttttacctagatcccaccacccaccaaggaagtcaggtcaccagatgcccaggcaccaaaccagatgcccgacaccaagacagtggcccagacctttacccctcagaattcaactacccaaaatcgaacccaaatcatcagacttctcagtcattagggctctgggccaggaatgagtccgcatcaccactcgctttctgccccagatggtcagactccttagataccaaggccctggcccagatgccagtcctggacaccagaccccacttcttcaaaacgtgcctcttcccagacaccaggcctttggcccctcagactcccactgtcaccatctgacccatctccaccccaggcccagatgaccagatctttaccccagccaccagggctctcaggtccagattccaagccactagccccgcccccaggatcccactagccagcgtctagctcaactctgccccagaaattaaaagctaggcctttatctcacaggaggagttatacaccagaagccaagcctttaactctgcacaccaagaatctggtgaagatgtcacgcctctactccagagagtaagtatttcactggccatcgcctgacaagctccacatcaccagggttcttctagcctggccaccaccccagaaactgtcatgctgcagtccaggcctagagaccgctatccagaaaaccaagccttcatcccagaaaccagaaccctggcctcgtaagcaagcctttacttcagacaccgatcttcacctctcaaggttcagttatgcgatcttcctcctctcccattccctgcacgcccccatttccgcccctggttcgggaggctagacgcttcccttcgacagtggttttctactcagacccgaagatacaacaccatatttttactcctggacagttcggtgcggacatgacgatccggtctctggcccattagggttcccagaccttggcctggcagtttcggcctaaatctccttgccgacccagcctcgatcccctgcggcgtccaggtcccaatgccccaacgcaggccacccccggctcctctgtggactcacgaagacaaggtccggccgctcgggccgcgagagtcgcgccatcaccaccatttttctggatgcccaggtacaggagagagtcgcgcgcttatgacgtctaccactgacggcccgcccctccgagccagacccgttttctattggttaaatcatttttgacggacaggcccacgttattgacttcttttcgacgacgccagcgaccggaagcagaatagaggcgccagaagatgcgccatcaggatacacattggccaatcagcttcagcaatggagcgtgcaaaacaccagtgagcttctgtcttgctggagggtcggctttgggcggaactggctttgttgaccgggagaaacgagatgggggtgaagctggagatatttcgggtcagtggacacaggagtgggttgggaggctgggcaggggatcttcctggatctgaagatgaggttggaaatggggggacttcaaaggaagagggagctccaaggagaaagctcttaagat

SEQ ID NO: 20568 - DNA, 2300 bp, Homo sapien
agttccctctgagctggagtcttcctctcaaacacagacagacacacagacgccccagctacaatcaaaagcatctcctcgagacctcattacccatccccacttaagatcccgggagcacccccaaacccaggaggcgtcactcttcaactccacttctcgaagtctaggaatctccctgtcatagacacccacccaccacgagcccgagagctcccccaggatcttaagtcttccttctttagagcccccttctcagctcacccctctctgaggtccttcctcggaccagccctctcacagcccccaaacccagaagcccaaatccgagaacccccccagcccagcgtcccctctcctggatttccaaccagaaaggttcctctcaaatcttaagagctttctccttggagctccctcttcctttgaagtccccccatttccaacctcatcttcagatccaggaagatcccctgcccagcctcccaacccactcctgtgtccactgacccgaaatatctccagcttcacccccatctcgtttctcccggtcaacaaagccagttccgcccaaagccgaccctccagcaagacagaagctcactggtgttttgcacgctccattgctgaagctgattggccaatgtgtatcctgatggcgcatcttctggcgcctctattctgcttccggtcgctggcgtcgtcgaaaagaagtcaataacgtgggcctgtccgtcaaaaatgatttaaccaatagaaaacgggtctggctcggaggggcgggccgtcagtggtagacgtcataagcgcgcgactctctcctgtacctgggcatccagaaaaatggtggtgatggcgcgactctcgcggcccgagcggccggaccttgtcttcgtgagtccacagaggagccgggggtggcctgcgttggggcattgggacctggacgccgcaggggatcgaggctgggtcggcaaggagatttaggccgaaactgccaggccaaggtctgggaaccctaatgggccagagaccggatcgtcatgtccgcaccgaactgtccaggagtaaaaatatggtgttgtatcttcgggtctgagtagaaaaccactgtcgaagggaagcgtctagcctcccgaaccaggggcggaaatgggggcgtgcagggaatgggagaggaggaagatcgcataactgaaccttgagaggtgaagatcggtgtctgaagtaaaggcttgcttacgaggccagggttctggtttctgggatgaaggcttggttttctggatagcggtctctaggcctggactgcagcatgacagtttctggggtggtggccaggctagaagaaccctggtgatgtggagcttgtcaggcgatggccagtgaaatacttactctctggagtagaggcgtgacatcttcaccagattcttggtgtgcagagttaaaggcttggcttctggtgtataactcctcctgtgagataaaggcctagcttttaatttctggggcagagttgagctagacgctggctagtgggatcctgggggcggggctagtggcttggaatctggacctgagagccctggtggctggggtaaagatctggtcatctgggcctggggtggagatgggtcagatggtgacagtgggagtctgaggggccaaaggcctggtgtctgggaagaggcacgttttgaagaagtggggtctggtgtccaggactggcatctgggccagggccttggtatctaaggagtctgaccatctggggcagaaagcgagtggtgatgcggactcattcctggcccagagccctaatgactgagaagtctgatgatttgggttcgattttgggtagttgaattctgaggggtaaaggtctgggccactgtcttggtgtcgggcatctggtttggtgcctgggcatctggtgacctgacttccttggtgggtggtgggatctaggtaaaagtccggagtttggacctgagccccagcagtgggatggtgctgcacacaggctctgagggtaggcctctcttcttcccattccctggccctggcaggaggaagaggacctcccctatgaggaggaaatcatgcggaaccaattctctgtcaaatgctggcttcgctacatcgagttcaaacagggcgccccgaagcccaggctcaatcagctatacgagcgggcactcaagctgctgccctgcaggtgggaatggctccagctgccctgcccaccagcccccaccccacctggtccagttataacaaaactgccaagtgggtcc

SEQ ID NO: 20569 - DNA, 2300 bp, Homo sapien
actcggcccccaaaaactgataaaagaataaaacacttaaatgaataacaaggaactgagtatatgtatatttcatcaggggaggggctaggactcccacttggaggcctcaggagttctgctgggcgtcgcgaaggagcttctcctcccgccgcttccgtaacctctctttgaattcctctatctcttgaagctaggggtggagaagcgggtgggacaggaaggggggaggggcacacacctcagagccgggaccacccccccccgcccacctctcccaccaccctgccccagaccacggcttcagggttcagtgtcttcactggaagccccctgccaattacaaaggggtccgcgtgggatccgcttcactcttccaggagaaggcaataaggaaaccatctactcctctgctctcggttccttactcatggctgagagtaaaatgtttctttttgagacaaagtctcactctattgcccaggctggagtgcagtggcgtgatcttgggctcactgcaacctccacctcctgggttcaagtgattcttctccctcagcctcccaagcagctggaattataggcgcctgccaccatgcctggctaagttttgtatttctgtagacatggggtttcgccatgttggccaggctggttttgaactcctgacctcaagtgatctacccacctcagcctcccatgccctgggattacaagcatgagccactgcgcctggcctaaaattttcatctaaaacccatcccggatacaagaatccagcctcctccatccctctggcaggaagaagagatcacttaccttctcaggtggccacagctccctctgtaaggaaaagtcacaaatgggacacgagccaaaggcctccagagccccacatcagggcagggtcggcttatgggaggcagacattagtccccagcagactgctgccccacaccctctcccacccctggaatgaaccctcaaacactcctcttatgcccaccttgcgctgtatgacatcgtcctcaaaccactcggcctgattggaaacccagaacatagccacagggaaagtgaggtagattatcatctggaatggcagagggtgggtgaggtgagctccccccaagcaatgtgcagaggctcctcagagcctgggggacccatcctactgcagagtccagaagcgcctcgttacggccgacccaagaatcccagaactcccaccaagggtacagaaacctcgcaccctaaaacctaactcctataatccaggaggcctcattcctgaaagttccctctgagctggagtcttcctctcaaacacagacagacacacagacgccccagctacaatcaaaagcatctcctcgagacctcattacccatccccacttaagatcccgggagcacccccaaacccaggaggcgtcactcttcaactccacttctcgaagtctaggaatctccctgtcatagacacccacccaccacgagcccgagagctcccccaggatcttaagtcttccttctttagagcccccttctcagctcacccctctctgaggtccttcctcggaccagccctctcacagcccccaaacccagaagcccaaatccgagaacccccccagcccagcgtcccctctcctggatttccaaccagaaaggttcctctcaaatcttaagagctttctccttggagctccctcttcctttgaagtccccccatttccaacctcatcttcagatccaggaagatcccctgcccagcctcccaacccactcctgtgtccactgacccgaaatatctccagcttcacccccatctcgtttctcccggtcaacaaagccagttccgcccaaagccgaccctccagcaagacagaagctcactggtgttttgcacgctccattgctgaagctgattggccaatgtgtatcctgatggcgcatcttctggcgcctctattctgcttccggtcgctggcgtcgtcgaaaagaagtcaataacgtgggcctgtccgtcaaaaatgatttaaccaatagaaaacgggtctggctcggaggggcgggccgtcagtggtagacgtcataagcgcgcgactctctcctgtacctgggcatccagaaaaatggtggtgatggcgcgactctcgcggcccgagcggccggaccttgtcttcgtgagtccacagaggagccgggggtggcctgcgttggggcattgggacctggacgccgcaggggatcgaggctgggtcggcaaggagatttaggccgaaactgccaggcca

SEQ ID NO: 20570 - DNA, 2300 bp, Homo sapien
ctttcagtgctaaaaataggacagtcacaggcaaaccaggacggttggcaaccgtaggtaggagtttgagctatttcttcctttcctttccttttcccttcctttcttccttcttctccctcctccccatttttgtttgtttttgttttgtaaagagacgggtctcgctctgttgctcaggctggagggcagtggcacgatcatagctcactgcagcctcgacttcctgagctcaagggattcttccacttcggccacccaagtagctgggactacaggtgcacgccaccgtgcccggttgattttgttgttgttgttaagagacaggatctccctatgttgcccaggctggtatcaaactcctgggctcaagggatcctcctgccttggcctcccaaagtgttaggattttaggtatgagccaccgcaccctgccccttcctccttttgtaacagctttactgagatataattcacataccatacaactcgctgacctaaggtgcgtaagtcaatggctttcagtatttttggagttgtgtgtccattaccacaatccattttagaacatttccacaacccctaggtgtttgggttttgtcttctcaagagttttgagcaggggaaggcggggaaccctccagatcctggggggatggaagccaggaccgcctccagcttctcagcctgaccccttggggggacagagagctgttagggccagccaccccaccactaacccccaaaagatatgaagtactaatccccaataccccacaataggatcttatttgaaatggggttagtatagatattagcagtgagcatgaggtcacactggagtagagtaggcccctaatgcaatatcactggtgtccttgtaagatagttatatgtctgcctggttctgtgtaggtggttgggggggtggggaaatgggtatatgaagactgggacacagagggagaatgccatgtgaccacggaggcagggagtgaagagctgcagtgacaagccaaggacatcaaggacggcaggccactgccaaaagccagggaggggcaaggagggctcctgagacctggttttcagagggagcacagctctgccaacaccttcatttcaggctgtggcctctggaacgttggctcaataaatttgttaaaaaaaaattttaaaggctcagcatggtggctcatgcctgtaatcccagcactttgggaggcccaggcaggaggatcacatgaacccaggagtttgagactagcctgggcaaaatagtgagacctcatctctatataaaaatatataacaaaagtcaacttatgtgttttaagccatctggtctatgacactttgttctggcaggcctaggaaagggatacacgtactgaggagggggacacttcattggcatagagggagagagtgtgaacttggccttttgtggaacagaggaggctcgggcagaggtggtgatagtgcagcccattcattctgagatgaaacttccactggtttccgtaaaggcgtcttggggagggaagggaaggggatggggacctcccagtggtatcccctgcttgggcactgagggaaagccacagtggctcgggggaaaaggcagggacgtcctctccccgcctgcctctgtccccagggagtctcgcctcctgttcccacctggggctagggtgatagaggagaggagatagctcaacctggcatttaggtggtgtgggaacaggagaccccagactttcttgttttggggtctggggcaggcaaccaggctccagggacagtgagttgaaggaagggtggctgggagaccccttgacttgctgccaaggagacagagctggagctagggtggccggtggtgtctgaggcaggtgcagagagggagggagggaaggggcctttgactccaacctcctttttctgtaccgactgcaggtggcagctgccctttcaggagccagtgggggaacctgggtggctgggtggggacacctgcaagtcctccctaagccagctaccaccctacactgttggcctcccttctccaactgtggggatgctgctcaggccttttgtgacatcacacctgagagtccctggggtccagtcattgctgctgggcacagcgaggtccaagctcaggtcgccctgccccctacccaccatgccagatccagcatcgttgtgggcaaacaattatctggatgatctttatggggcttaagcttgggtgggagcagatggggcatgagctggggatttggggatggggggaa

SEQ ID NO: 20571 - DNA, 2300 bp, Homo sapien
tcatgctcactgctaatatctatactaaccccatttcaaataagatcctattgtggggtattggggattagtacttcatatcttttgggggttagtggtggggtggctggccctaacagctctctgtccccccaaggggtcaggctgagaagctggaggcggtcctggcttccatccccccaggatctggagggttccccgccttcccctgctcaaaactcttgagaagacaaaacccaaacacctaggggttgtggaaatgttctaaaatggattgtggtaatggacacacaactccaaaaatactgaaagccattgacttacgcaccttaggtcagcgagttgtatggtatgtgaattatatctcagtaaagctgttacaaaaggaggaaggggcagggtgcggtggctcatacctaaaatcctaacactttgggaggccaaggcaggaggatcccttgagcccaggagtttgataccagcctgggcaacatagggagatcctgtctcttaacaacaacaacaaaatcaaccgggcacggtggcgtgcacctgtagtcccagctacttgggtggccgaagtggaagaatcccttgagctcaggaagtcgaggctgcagtgagctatgatcgtgccactgccctccagcctgagcaacagagcgagacccgtctctttacaaaacaaaaacaaacaaaaatggggaggagggagaagaaggaagaaaggaagggaaaaggaaaggaaaggaagaaatagctcaaactcctacctacggttgccaaccgtcctggtttgcctgtgactgtcctatttttagcactgaaagtcctgcatcctggcactgggatgggtcagtctgaccttgtcctacagaagtctggcccctgctgcccccaccctccagccttcttaagctcggggctcctcccttctctacctggacatgctgtgtggctgcttctagaatccatttagggataatgtcaaaaggctgcttcttcagagaggccctcgggggtcatcctcagtaaagtcccctcccacccctaccttctgtggcacttgttgtcacattagtttatttcctttagggcagcatggatcctttcctatctcccccagaccttcgggtctgattcactccctatgtcccatgtaagtggcagggggcttggtaccttcatcaacacggccgagcgaaggaaccagctcagaccagcaagagtctgtttgcacacatacctcgcaccttaaatcggagacctcattttgtatgggtgctgctggggctgtgccttccaagcgacaggacacacagcagaagcagcttctgaaattccgagtgtgtgtctgtgtttgcaagcatttgagggcgtcactcaccccatgtgtgtatcagcatgttaattcgattgttggtccacgagggtaagcgttgcgcctcccggaagagggtaaggctgtgacaaatgccccctggggacaggctcctggcttgaacccagcaggctcactcgtcgtggccttggattagggatcccgctaagcctcggtttcctcgtcggcaccgcagtccaggtcggaacattgggcaggactgaatgaaaattatgtccaggtgcctgcacacaagaggtctccaggcctcctgaatccatcaaaagttatccaagacggctgctgctgctgctgctgcctctaaaccctgaagtacagaaggcaagtgggtcaagatcccaggcccagacagtggcggcccggtggcatcgagtgggtgccgtgtatcttgcaggcacagaacctcccggggaagatggagggattattgccctgcgatcctgcttcgcacgcaagccaggaagtgtgtgtctgaactcccatctgtgagcgtgtcgtcgaggtgtgcacctccagcgacttcgtgctcggcagcgcggacgcacctgcccgtcctccccgccagggactcaacttcctgggcctgggcgagaaccgacggcggggaggggccaggtgcgcagggggcggggacagggcccgcggggcggggtccacgtgggtgacgcgcggggccacgcccccaccttgggacacacccggaagcggcggcggcgcccctcggggaagatggcgccctcggggctgaaggcggtggtgggggaaagtgagtgcctctccggggccgggctctggcgtccggtgtgggacgggggtcggggacgcacgggctctgggatcctgggtttcatggcggctgggagttgggggccgggctgggcgtccgagcacctgaccc

SEQ ID NO: 20572 - DNA, 2300 bp, Homo sapien
cctccttcctccccaggtatgagaccaccgggctgagcgaggcgcgggagaaggccgtcttgctggacgaggacgatgacttgtgggtggagcttcgccacatgcatatcgcagatgtgtccaagtgcgtgcacacggggaccggatcccccccccaccgcccactgtgggcctggtagcggccttgggatccctggctgctgccaagtctttggccctcatgagcacccctcgtgtgactccagactggcctccaatttcaccccacctctccctgtcccccctgagtgggctcacccatggcctgtggctcctctcccctcactctcacccccgcccaccctcatggccaggaaggtcacggagctcctgaggaccttctgtgagagcaagaggctgaccacggacaaggtaggggcggacccaggtcaccaaaggcgctggtggaaggaagcccccctccccatgggcgcagggccacagcctggatttcgagcctggactgagacccaggtgggcactgcctggcttcgccccccaatccctaccctcttccccctacttccccaggcgaacatcaaagacctatcccagatcctgaaaaagatgccgcagtaccagaaggagctgaataaggtgtgctcgggtgggcagggagcggggacacctcggcccctcaaccccatgctctgtctgcgttctgccttgactcagcctttgttatcccccaacccccaccctgcaccctgcagtattctacgcacctgcatctagcagatgattgtatgaagcacttcaagggctcggtggagaagctgtgtagtgtggagcaggtggggcagggcttgcggggggcaggggtgatggtcctgccaaggcggggtattggggaggggctgaactgtagagatggggggttctgggggaggggcagggcttgtggagaggtggaggggccttggagagaggtgggacctggtggggaaggagtgggtcttgtggagaaacggtcctaggatgagggtgtggcctgtgcataggtggatggggcttggagaggtcagacttgggtgaggggcagagccttggacaggtggtcccaggacaggaatgtggcctattcataggtgggtgggaccttggagaggtaggcagggccttggagaggtgcgacctgggagaggaatggagccttggagaggtgggacctgggtgaggggcagagccttggagaggtgggacctgggagaggaatggagccttggagaggtgggccctgggagaggggcggagccttggagaggtgggacctgggtgaggggcggagccttggagaggtgggacctgggtgaggggtggaaccttggagaggtgggacctggatgaggggtggaaccttggaggggtgggacctgggagaggggtggagccttaagagaggtgggacctgggagaggggcggagccttggagaggtgggacctgagtgaggggtggggccttggagaggtaggagctgggagacaggtagagccatggagaggtgggatctgggtgaggcacggggccttggagaggtgggacctgggtgaggggtggaacctcggagaggtgggacctgggtgaggggtggagccttggagaggtgggacctgggtgaggggtggagccttggagagctgggacctgggtgaggggtggagccttggagaggtgggacttgggtgaggggtggagccttggagaggtgggacctgggtgaggggtggagcctcggagaggtgggacctgggtgaggtgtggaacctcggagaggtgggacctgggtgaggggtggaacctcggagaggtgggacctgggtgaggggtggagcctcggagagctgggacctgggtgaggggtggagccttggagagctgggacctgggtgaggggtggagccttggagaggtagtctcaggatagtggtgtgacctgtgtgtaggtgggtggggcactggaaaggtgggacctgggtgaggagcagggcctgtggagagactgtccctggacaggggtgggaccttgagagacctggtgctgagatgaggtaggacccaaatgtcctcttgccgaggatcctggggatgtccttggcccgcctctcccatccccttccctgacacatagcggccggtggacggctgaccccatgcccgcaggacctggccatgggctccgacgcagagggggagaagatcaaggactccatgaagctgatcgttccggtgctgctggacgcggcggtgcccgcctacgac

SEQ ID NO: 20573 - DNA, 2300 bp, Homo sapien
tggggatattatgctcagtgaaataagcagatacaaaaggacaaacactgtgtgattccactcctaggaggtccctagagtcatcagatccatagaggcagaaagcaagatggagggtgccaggggctggggagagggatagggagtgagtgtttcatggggacagagtttcagtttggaaagaggagaaagttctggagatggacggcagtggtggctacataacaacatgaatgtgcttattgccacagaattgtgctctgaaaaatggttaaaataggctgggcatggtggctcacacctgtaatcccggcactttgggaggctgaggcgggtggatcacttgaggtcaggaatttgagaccagcctggccaacatggtgaaaccccatctctactaaaaatacaaaaaattagccgggcatggtggtgcacgcctgtaatcccagctactcgggaggctgaggcaggagaattgcttgaacccaggaggtggaggttgcagtgagccaagattgagccactgtactccagcctgagcaactgagtgagactctgaaacaaagaaacaaacaaaagcaatggttaaaatggaacaagatggtgcatacctgtagcttcagctactggggagtccaaggtgggaggattacttgaagccaggagtctgacactagcttgggcaacatagcaagaccccgtctcaaaaaaaaaaaaaaaaaggccgggcacggtggttcacgcctgtaatcccagcactttgggaggccaaggcgggcagatcacaaggtcaggggatcgagaccatcctggctaacacggtgaaactccatctctactaaaaaaaaaaaaatacaaaaaattagctgggcgtggtggcaggcgcctgtagtcccagctacttgggaggctgaagcaggagaatggcgtgaacccaggaggcggagcttgtagtgagccgagatcgcgccactgcactccagcctgggcgacagagcaagattccgtctcaaaaaagaaaaaagtaagttataatggtaagttgtatgttatatgtattttaccacaaaaaggcccgttgtactggaaacaaagaacaaataaaaatgtaataaccattccaagctcatgggtggtccaagaagaaacatgagctggaccttggcccatgagcaatggctttccaacttctgttgcaggtgatgccattgatggaataaaccatgatttttctttcttctttttgagatggagtcttgctatggtgcccaagctagtcatccaggatggagtgcaggggcacgatctcagtgcactgcaacctccacatcccgggttcaagtgattctcccacctcagcctcccaagtagctgggattacaggcacacgccaccacgcccagttaatttttgtatgtctaatggagacagggtttcatcatgttggccaggttggtctcaagctcctgacctcaagtgatccgcccgccttggcctcccaaagtgctgggattacaggcgtgagccaccggccataaaccatgattttatttaccagttctattgctcatgggcatttgggtatgaatgtggtatgtcattctcacccagagacataattattattactattttagagaagtggtcttgctctgttgcccagactggagtgcagtgctgtgatcataagtcactgtagcttcgaactcccgggctcaagcaattctctcacgtcagcctccttagtagctgggactacaagtgcttgtccgcaccatgcctagcaagaggcattaattttgtcatgtttgcatcagccacccttgcatgcaaaactctgcttgtctacctgttcctcagaccacagcccctggcattatccctggggcaccacctcctgaccagtctctggacatgaagacggaggccctgttggaagtgggaaggctcccttcctcctccagcccttactgtctgctcaggggcttcctcttggccccggatgtgggaccggagggttgggggcccagggacttattagccaagccaggaagccccaccccaagaggcctcaaagaaagagctgcggtgcaggaattcgtgtgccggatttggttagctgagcccaccgagagggtaagtgacagctgctcctgcgcttgccatggcaccagcggggaggctggggtcaaggctgagcctccatccctgtcccccacatggggggacaggggtccaggtccaggggcagatcctactccctccatgggccggatcttccccacagggcagggctgatc

SEQ ID NO: 20574 - DNA, 2300 bp, Homo sapien
cagagcccacatccaattggtccgtctgctccattagaaggcggtcctatagctcagtaactgacttctttctaagaccaaatggagcagctggcatgaagtcattatcaaattgatctttcttggagacacaggatttggcaatattttaggaaacagaactttatcctcaccagatctcgacgctcatttctcaacattcaagttgtctgaaatttaaccacatatttttaaccaaaacatcatcactttctgcacataagacagtcttatacttgttttttcttcttttcttcttccttccttccttctttcttctttcttcttttttctttttttttttttttttttgacggagttttgctcttgttgcccaggctggagtgcaatggcgcgatctcggctcactgcaacctccacctcccgggttcaagtgattctcctgtctcagcctcccgagtggctgagattacaggcgcctgccaccacgcccagttaatttttgcatttttagtagagacagggttttatcatattggtcaggctggtgtctctaactcctgacctcaggtgatccgcccgcctcagactcccaaagtgctgtgattacaggcgtgagccaccacacctggccagaaaaaaataaaaataaaaatgtatgcctgtaatcccagcactttgggagaccaaggctggaggatcagttgaacccaggagatcaagaccagcctggacggcatattgagaccctcatctctacaaaaaataagaaaaattagactgggccacggtggctgatgcttgtaatcccagcactttgggaggccaaggcgggtagatcacgtgaagtcaggagttcgagaccagcctgaccaacatggggaaaccccgtctctactaaaaatacaaaattagccgggggtggtggtgcatgcctgtaatcccagctacttgggaggctgaggcaggagaatgacttgaacctgggatgcggaggttgcagtgagctgagatagcgtcattgcactccagcctgggtgacaagcacaaaactccatctcaaaaaaggagaaaaattagccaggtgaagtcgtgcccacctgtaatttcagctactcgggaagccgaggacgaaggattacttgagccagggaggtcaaagctgcagtgagccatgatcacgctgctgcaccccggcctgggcaacagagtgaaaccctgtctcaaaaaaaaattattaaaaaacatttaaagagacagggtcttgctatgttgctcacgctggtctcaaactcctggcctcaaatgatcctcctacctcagcctcctgggtagctgggactacagagcgagccaccatacccagctactttgtgccttttgtaaccccagttttcaagatcagataaacacaaagtgaactaagacaccttctagacagagtgcgggcatgtgaacgcatgcttgtgtctatttttctgagtgtcacaatgcaaatagtatgcaaatgagtttgtgatgtgtgtccgtgtgcagacctgtgtgtgtacatgtgtgagagagagtatctgggtagataagcagatggatggatgagaatgagaaacctggagtttccaggtgcagaggaaactgttcctccagggttcttttttgagacagagtttccctcttgtcacccattctggagtgcaatggtgtgatctccgctcactgcagcctccgcctcccaggtttaagcgattctcctgcctcagcctcctgagtagctaggattacaggcgctcgccaccacgcccagctaatttttgtatttttagtagagacggggtttcaccatgttagccaggctggtttcaaactcctgacctcagatgatccacccacctcagcctcccagagtgctgggattacaggcgtgagccaccgcacccagcctcctccagggttgtataaaagcaggggatttggggagggagggaaggatgtgggtctgtcctcagtcccagatgtgggtgtggcgttccagtggttagttcccgttgcctcacatctgtgcttttcctccacggggacttgtagaagtagaagaacttcttgggggtggagctgaggggtggagctgaggctggagggaggaaggtgtggggggacccaggggtcctgtctccaagcctggttgctcttacgcgaaaagttgggacactgaggtgtcacagcttctcttttgaaatggagaggaggtaggagggtgaggtccatccaggtagacacagacacacacagagaccacagcttcc

SEQ ID NO: 20575 - DNA, 2300 bp, Homo sapien
gctcctgggaaccccaaatccatgggctctgctgtaccccagggtgggtgtggggcagggggggtgcttccaaggaaggtgggggctttgtttgaggctccaccgcagcttgacttatctgttcccacccaaccctccccgccccctaggcataaaaaacattgacacaaaggtacagaaaatcttggaggtgctgcagaaaatgccacgtaagttggcgccccgacaggaggtggaggagggtgggtggggcttcagatttagccccagctcctctcccaggggcgggatctgcctcactgtgggtctctccccatccccagagtcctcacctcaataaatgagaggacattgtggcagccaaagccacaacttggaagatggggctgcacctgccaacgaagacgggaaatgaccccccccccccagcctagtgtgaacctgcccctcgtcccacgtatagaaaaacctcgagtcatggtgaatgagtgtctcggagttgctcgtgtgtgtgtacacctgcgtgcgtgtgtgtgcgtgtgtgcgcgtgtgttcgtgtatgtgcgtgtgtgcgtgcgcgtgtgtgtgcattttgcaaagggtggacatttcagtgtatctcccagaaaggtgatgaatgaataggactgagagtcacagtgaatgtggcatgcatgcctgtgtcatgtgacatatgtgagtctcggcatgtcacggtgggtggctgtgtctgagcacctccagcagatgtcactctgagtgtgggtgttggtgacatgcattgcacgggcctgtctccctgtttgtgtaaacatactagagtatactgcggcgtgttttctgtctacccatgtcatggtgggggagatttatctccgtacatgtgggtgtcgccatgtgtgccctgtcactatctgtggctgggtgaacggctgtgtcattatgagtgtgccgagttatgccaccctgtgtgctcagggcacatgcacacagacatttatctctgcactcacattttgtgacttatgaagataaataaagtcaagggaaaacagcgtcgctatgggacctgttactggggcaaggggaggggttttgggacctggggagagggagagtctgcacgtgacaatgaccccggggcaccagggtgggcgagactgagtgccctgcgtgagtacctgtgcatctgtgaatgagtaactcattccctgtgtcttccctgtgtcccagagtgggtgcccctgagcatacaacatctccctgagtgtacctgggaccacggatatatacaagccctaagcgtgtacccacgtgtgtaattgtgcccgtgagtgtatctatgccattgagcatgtatccatgagtgtacatgaccctaaggtactatgtccaccgctcatgcatgcacttgatttgttgttgttgttgtttgtttttgtttttttgagacagggtctcgctctatcacccaggctggagggcagtggtacgatcatgactcattgcagcctcgacctcctgggctcaggcgatcctcttgcctccgcctcccgagtagatgggattacaggttcacaccaccacacctggctaattttttttaaagaagtgggagtctagctatgttgtccaggctggtctcaaactcctggcctcaagtgattctcccacctccgcctccgaaaatgctggggttacaggcgggagccaccgcgggccacatggatgcacttgagacaattgaacccatccccaaggacataggagtgcctggaaaagccaacaggtgtgtccatgtgcaagggtatacattggcccattgtcatacgtgcgccctgagcaggtgactaggcctgcaagcgtcccctccagcgtgggccacccagagccagcgagaccctggccacgcgcggagcagccatcacggccgtgggccacgtccctgggtccggctccgcggactcgcgcgcccccctgcggccgctctcaggcaccgctgcgcgcgccccgcccacacgcctggcccgtcgagcgcctgcgcacgcagcgccttttacggcgccgtaaagcagctcggccgagcagactgctgcggttcctggtgagaccctacccacccccctgcccgcgccgggcctcgtccgctccccggccccttccccgcgggcgtgtgggtcccgggctggggtctcggcgtccgcgatcccgagcccgctcgcttcggcccccctcaggaggctgcgaggagggtgggtttctccccagtgtagaggtacggggcgagggtcgcggggccc

SEQ ID NO: 20576 - DNA, 2300 bp, Homo sapien
caagcccatatttaggtctatgaaaatagaagctgtcagtggctctactttcagaagaaagtgtctctcttcctgcttaaacctctgtctctgacggtccctgccaatcgctctggtcgaccccaacacactaggaggacagacacaggctccaaactccactaagtgagtacgtatctggtgtgttgggggttggccatgggaagtggagatcaaagcgcccttggaagaaacgaccttgggctgagcctcaagggatgaccagcaggaggtcacaaccagagaagggaggtggtgggtggtgagggggcgggggtgggggccgcagtgtggacagaatctcgaggcattcgagtccctgatttggggaagtgaaagcaggccatctggtctgagatgagcttggtgagtgcgctgggccgatcatagagggccctggggagccatggaagactctaggcagaggcaggacctcttgggttagaaggacggcctggagttgggatcctgccacccagcacttaccagtagacaccccaccatgagattatgtctccagatgattgagcaaatgggctcccagctcaagggtcccgggtttgagttccagtcccaccactgcgtgatggggacaaatgacttaccctcttggaacctcagttccactgagagaggccccacagaatgaggacagtcccccagcatcctgccagtaggtttactgagcacctactgtgtgctggtgctttgaatactcccaatttacagatgagcaaactgagctgctcatccaggaagaagccaggactcggactcaggtctgtccagctgcctccctggacagttccagtcccaggatggtctctgggttcctctcacaatgtcaaaagggccagcttgagctgccgctaatcagagcctggccgcgccacaccccacctccctgaggctccgagagaagggacttacctatagtcaagcagcgaaagaaggtagcccgtgacctccaggcctgaaggaccccaagtcccatgctcctcagcacatagtagatgctttaaagtcagaggacttggtcgggcgcagtggctcacgcctgtaatcctagcactttgggaggctgaggagggcagatcacctgtggtcaggagttcgagaccagcctgatcaatatggtgaaaccctgtctctactaaaatacaaaaattagccaggtgtggtggtgggtgcctgtagtcccagctacttgggaggctaagacaggagaatcgcttgaacccgggaggtggaggttgcagtgagccaagatggtgccattgcactctagcctgggtgacagagcgagactccatctcaaaaaataaaaaaataggccatgcacagtggctcacgcctgtaatcccagcactttgggaggccgaggcgggcggatcatgaggtcaggagtttgagactagcctggccaacatagtgaaaacccgtctctactaaaaatacaaaaattatctggtcatggtggcacgtgcctatagtcccagctactcgggaggctgaggcgggagaatcgcttgaacccaggaggtggaggtggcagtgagccgagatcgtgcccctgcactccagcctgggcaacagagcgagactccatttcaataaataaataaataaataaataaagtcagagcactttacagatgccctggggacattggcagaggagaaggctgaggcctgggttatgggctcttagcatttctcagtgggacgtggcacagagtagatgtttcataaatgtttagaatccgaagacccactgtgcgcagcccggcaccaaaaacctcaggtatgctgtgatctcattggatcctatcttggcctcatgagttgggtgctgtcatcagcccattttacagaggggaaaactgaggctgagaatggttgaatccttggctgaggtcacacaggcaaggcaattataataaacgctggtgatatttttagcacagatcaccaaccaacagtataggtgttcttggtatcatcattttacgaatgaggaaagaagtttccaggttaattaagccatttgtcaagatctcatgggtgcacctgctgtgtagctcaagtgtgatgggctctggagtgccccacttctgatctcaggctgctatctctccacaccagctgtgtctccctgctaaccacgctagtgagtccagattgtagactaaacaaaatcagcaaatggcccctgagtgccaccaagtcccagatgctatcctgtgctggtaactaggatt

SEQ ID NO: 20577 - DNA, 2300 bp, Homo sapien
aacacttcgggaagccgacgtgggtggatcacttgagaccaggagttcaagaccagcctggtcaacttggtgaaaccccatctctactacaaatacaaaaaattagccaggtgtagtggcgcgtgcctgtaatcccaggtacttgggaggctgaggcaggagaatcacttgaatccggggaggcagaggttatggggagctgagatcatgccactgtactccagcctggatgacacagcaagactctgtctcaaaaaaagaaaaaaaatcaaaaaggaagggaaagagttggccgctgagcattggagaggtggctgggggctgctgagtggacatagggacagcatttgaggccaagccagggtggggtcactgggggattagtcttgagggcaggtcgggttggggatcctaagggggggtctgccgtggtggccaggtgggagtgaggaccctggagggtctgttttggggggcaagacaggaggtagagccccagggaaggctgtcatgggggcaggatgagagtggggaggccatggaggaggcagtcccagggacaaggcaaaccaggcagggggaaccctaagagggggatgtcacctggtccagggggaagagggagcagctgtggggatggggagaagcaggttatttttttgagacgagccaggcgcgggtgctgggtgagcggtggggtggaagatcgggaagtgcttggacaaggcctggacctgggccggggtgtctgggtggatggacggactgtcccaccaatggggacacacgaggagaaggaggaggaagcttgggaataagtccagctgggccatgttgtgaggacatggggatgaagtcttagttccaggatggggctgggatggagtttggtgtttcttttctgtttttctttcttttttcttttcttttttttttttgtgagacagagtttagcttttgttgcccaggctggaatgcaatggcgcgatctcggctcaccgcaacctctgcctcccggattcaagcgattctcctgcctcagcctcccgagtagctaggattacaggtgcccaccaccatgcccagctaatttttttttttttttttttttttttgtattttcagtagatacagggtttcaccatgttggccttgaactcctgacctcagatgatccacctgcctcggcctcccaaagtgctgggattacaggcgtgagccactgtgcccggtctctctctctctctttctctctctctttctttctttcatctcactgtgttgcccaggctgatcttgaactcctgggctcaagtgatccactcacctctgcctccccagtagctgggatcacaggcatgcaccaccatgccctgctagtttttatagtttttgtagagacaacggcttgctatgttgtccaggctggtcttgaactcccaggcttaagtgatcctcccacctcagcctcccaaagtgctgggattacaggcgtgagccaccgtgcccagccaaaactgtccatatttgacctgaatattatctcacgtatctttctttccccccgcttccctccttccctcctactcctccttctccctctccttccttctgtcttttttttccccttcctctgcctctctctcctcttcccttttttcttgctgggactcaaacctgggacatttgacctgggagcctatttgctcaatcatcaagagacataatctcatggtggggtgtctgctggtaagtgccgggtggcaggatcccaactccaggccgtccttctaacccaagaggccctgcctctgcctagagccttccgtggctccccagggccctctgtgatcggccatagtggtatgattcagtgtgcagtaacagtggttcacatcttgacgctaccactcacctccttcagccctgtgggaacttgctgcttaacatctctagttctcacccaattctcttacctgagaaatggagataataataacacggacttcacccgggtgtggggagcaccaggagaggccatgcgtgtaatgttatccgggtggcaagcccatatttaggtctatgaaaatagaagctgtcagtggctctactttcagaagaaagtgtctctcttcctgcttaaacctctgtctctgacggtccctgccaatcgctctggtcgaccccaacacactaggaggacagacacaggctccaaactccactaagtgagtacgtatctggtgtgttgggggttggccatgggaagtggagatcaaagcgcccttggaagaaacgac

SEQ ID NO: 20578 - DNA, 2300 bp, Homo sapien
ttttttcagaaatgagggtcttgttatattgcccaggctggtctggtctggaactcctgggctcagtgatccttccatgtcggcctcccaaagtgctgggattacaggtgtgagccagcaagactgtcttgtttctttatcatagcatctttgtgagagaggcccatcgctatctcctttacagtggggaaaactaaggcttctagaagctacctagaacccatacagtggtagagtcctgcagctccgccggctacctccctaacaaaactgtttgttcccttctggtacagagggactggatcaaggtcaggttcaaacccagcctctgcaggcacctgcaggggagttgagaagggacctgaactggcctggggggctatgcctgagggggctttctcaggagccagcaggggttacaatttggtcgggttcagtgtgtccctcgcgggataaaacccagccccaggcccataagagatggtgactaagctccaaagagaagcctccagccccaggcccataagagatggtgactaagctccaaagagaagcctccagcaccagcctggggatggagctgcagtggccagaaccaggaggctggaaccgcccggcctcactccagcccagcccagcccagccttgaaagggcccaatcctgtgattggtccatgggttcccgttgccaggaattaaggccaagaaaatgggaaggaaggaagggagtgcgtaggtccagtgagaacaggcgtgaaatttatatctctgcccaggactgggtgcctgcatcgccatggacaccaccaggtacagcaagtggggcggcagctccgaggaggtccccggaggtatgagcaaggagactgccccatccctgccccagtgtctggggtttgatgggggaggggagggaagagtcgagacaggccagggttgtgggtgcaggagagacaccacaggccatagagccagttggaccagggtccaattccaactctgccgcttagaagctgtgtgaccataggcaagttacttaacttctctgaatctcagtttcctgggagtaactcaggcctccagggctcagttctgggggacccagcatgccgtccttgttatgccagggccctggggacgctgggtgcactggagcaggagacccctcttcttggccctggctgtcctggtcaccacagtcctttgggctgtgattctgagtatcctattgtccaagggtgagtgactctcaatggggaggtgttgcatccggcccccctggggacagaaaacccccactgcatggcgcaccagctgcatcctggggtcctgttcgcgtctgagtgtgagcagagtgtgtgtacatctttgggccgtgtgcactcacgcgtgtgcacatggcgtgctcgtatgtgcgcgagtccccgcgcgtttgtctcccatcggcgtgtgtgcacatcgtgtgagctgtatgcctgcccgcccgctccgtgctcccgagttgggggacgctgcaccccccgggcgaggggaggattcccgagttcccggcctcgcctgcaggagcctctctcctcagcctccacggagcgcgcggcgctgcttgacggccacgacctgctgaggacaaacggtgtgtgcagagccgggcgcctgggcccccggggcgtgaggggcgggagtttctgagaccccggagatggagtctcgagtgcgtgggggccctatggtccctgaggctggaagggggtcccctgagtcctcccaagtgacccgaggggcatgcattttggggcgggggtcgttccagcctcgaagcagacggcggcgctgggtgccctgaaggaggaggtcggagactgccacagctgctgtgagggggcgcggtcgaggctgtgggcgcagggatggggtcttgcggccgcgatgggaggggggccggggcggaggcctgcggcgggtggtgcggggcgggggctggtctccgaagtcccgccccatcctcgccgccctcgcccctctcaccctgcggctcccaggctcggggacgcaggcgcagctgcagaccacgcgcgcggagcttggggaggcgcaggcgaagctgatggagcaggagagcgccctgcgggaactgcgtgagcgcggtgagggcccgacgcgaccccggccctgagccctggccgcgtcccccgaccccgaccccgtcctgagtgctgacccccgaccccgatcatgcaccccgtcctgaccctgacgctgcactctgaccttgactgccactcctagcgccggccacaccc

SEQ ID NO: 20579 - DNA, 2300 bp, Homo sapien
ccctgcctcaacaaaaccaggagatgctggtatgaagcctgacaccctggtctgagttttgtgtacaaggcttgtctttttagatgtgtggttttttcttcaccttcctttcccttccatctttcttttacaaaatcctcttgttttttttatttcattttattgtgaatgtctctcattcctggaagaagaaagggggaaatagacaataagtacaatttatttatttatttattgttgagacagggtctcactctgtcacaggctggagtgcagcgggcacaattacagctcactgcagcctcaaactcctgggctgaagcaatcctccagcctcagcctcctgagtagctgggactaccgatacacatcaccatgcccaggtaatttaaaatttttttttaattttgtaaagatggggtcttgctacattgcccaggctggtctcgcgatccccctgccttggctccccaaggtgttgaaattgcagagctgagccaccgcgcctcggctcaaataaaatttttaaatgaaaaaatggataagggtttttgagaggctcaagaagatgaagtgtgtttacatatctacaagaggggctggaacattctattaagtgctcaacatttcaccttgtcagtgaggctggccctggccaccctagccactgcccactgcctagtgcccatcccagtcctgccaagtacttatcctactggattttttcttcccttaatgttttttcatagcatttatgacttttgaatagagtatactacggttcccaccttttgcactatggacattaggagtcagatcattctttgctatgggggatgtcttaggcattgtagggctttgcgcagcatccctggcctctacccactagatgcctggagcacacacacacacacacacacacacacacacacattctgtgacaaccaaaagtgtctccagacatagccaaatgtcccctggtgggcgtaattgcccccagctgggaactactatgctatacaacttatgttttcaattatgtttattacgttgagtatggagtctgtctccccacacttctagaatattagctccaagaagagaggaatttgcttattttactctctgatgtggccccagttccaagatcaatgcctggcatatggcaggtgctcaatgtttgttgaaagaatgcatgaacactgagtgtttttgatatgcctgaaatggtgctaggtagacatgtataacctcattgtctttatttttttattttttcaatttttgttttcatatatatatatatatatatatttttttttttttttcagaaatgagggtcttgttatattgcccaggctggtctggtctggaactcctgggctcagtgatccttccatgtcggcctcccaaagtgctgggattacaggtgtgagccagcaagactgtcttgtttctttatcatagcatctttgtgagagaggcccatcgctatctcctttacagtggggaaaactaaggcttctagaagctacctagaacccatacagtggtagagtcctgcagctccgccggctacctccctaacaaaactgtttgttcccttctggtacagagggactggatcaaggtcaggttcaaacccagcctctgcaggcacctgcaggggagttgagaagggacctgaactggcctggggggctatgcctgagggggctttctcaggagccagcaggggttacaatttggtcgggttcagtgtgtccctcgcgggataaaacccagccccaggcccataagagatggtgactaagctccaaagagaagcctccagccccaggcccataagagatggtgactaagctccaaagagaagcctccagcaccagcctggggatggagctgcagtggccagaaccaggaggctggaaccgcccggcctcactccagcccagcccagcccagccttgaaagggcccaatcctgtgattggtccatgggttcccgttgccaggaattaaggccaagaaaatgggaaggaaggaagggagtgcgtaggtccagtgagaacaggcgtgaaatttatatctctgcccaggactgggtgcctgcatcgccatggacaccaccaggtacagcaagtggggcggcagctccgaggaggtccccggaggtatgagcaaggagactgccccatccctgccccagtgtctggggtttgatgggggaggggagggaagagtcgagacaggccagggttgtgggtgcaggagagacaccacaggccatagagccagttg

SEQ ID NO: 20580 - DNA, 2300 bp, Homo sapien
gcatgaccagcagttaggaaatggttgcctctggctccaacacattaagcccagttatgagtaaatgtgcatggacatgcacagaacatgtgaaatggataaacatgcagtattagcaagagggtgtgaggagaggccagctgtgcatggatgtgtgcatgtcaggacacatgtgccgtgggatacacatgtgagagggactcagacacgagggggctcaggacctagtataccagaaggctgtaggttagcctacaagcagaacttcctaccaagagatggggagacagagcctggaaaatgggaagcagagctccctcctgactcctcctgtaccctccagaacttcctacagctgcagtcttccagaagtaaccgcttcacctggatgggactttcagatctaaatcaggaaggcacgtggcaatgggtggacggctcacctctgttgcccaggtagatctcagaaggggcaccctatccactggggctggaattgtgaaactctgatttgaactttccctggggatcctccccaactccctgacaccctagacccaagaatctggaggttttactgagttgaggaaggtggtcttcatacccacttccagacagcatggcaggtgcctagaattccaccagcagagctgcaggaggagcctgccaccggggaggtgtattaaaatataatgtattaataggaagtctgaggtccagtaaggccaccagctcaggagacacctgccattgtgaatagcttctcatatacacagatccctagagagaggacacatcacagctgggggccacctggggaagcaccagggtctgttatgagtcagagtggtggggaggggggactgtgggccagagcctttattatggtttctgtggaaaggaaaggtcaaggccaggtgaacaggcttaggattgggaagtgtgaagcattttttgggctctggggcacaggggctgcccctcgctgtctgacacctggccttggggtgattagtacaggatagtggcttggagtacaagagcccagtaaggcaggtcgctggaggtgtggactccagactggttggcttgtatttgaaaatcacacactcaataggtggagtccacccaaggacaggttgtgagaagagaggcaggaactcaaggcatcgtgagtcaggcatattatcaggtatgcagagggattcaagtccagcatacacacgcagggcagatgttaaggcatcaagatgacagaaggtagaaacacagctcatgtagctggcggggacagaggctcacattccgcatgggctttgcagcttcaagcagtattggaacagaggagagcccaacaacgttggggaggaagactgcgcggaatttagtggcaatggctggaacgacgacaaatgtaatcttgccaaattctggatctgcaaaaagtccgcagcctcctgctccagggatgaagaacagtttctttctccagcccctgccaccccaaacccccctcctgcgtagcagaacttcacccccttttaagctacagttccttctctccatccttcgaccttcacaaaatctctgggactgttctttgtcagattcttcctcctttagaaggctgggtcccattctgtccttcttgtcatgcctccaatttcccctggtgtagagcttgtttttctggcccatccttggagctttatgagtgagctggtgtgggatgcctttgggggtggacttgtgttccaagaatccactctctcttccttttggagattaggatatttgggttgccatgtgtagctgctatgtcccctggggcgttatcttatacatgcaaacctaccatctgttcaacttccacctaccacctcctgcacccctttgatcggggacttactggttgcaagagctcattttgcaggctggaagcaccagggaattaattcccccagtcaaccaatggcacccagagagggcatggaggctccacgcaaccccttccacccccacatcttcctttgtcttatacatggcttccatttggctgtttctaagttgtattctttattttattattattattactatttttcgagatggagtttcactcttgtcgctcaggctggagtgccatggcgcgatcttggctcactgcaacctctgcctcccgggttcaagtgattctcctgcctcagcctcacgagtagctggaattacaggcaggcgccaccagacccggctaattttttgtatttttagtacagatggggtttctccgtgttggtcag

SEQ ID NO: 20581 - DNA, 2300 bp, Homo sapien
ctcctgacctcaggtgatctgcccgcctcagcctcccaaagtgctgggattacaggcgtgagccaccggttttgtttgtttgtttttgagatggagtctcactctctcgcccaagctggagtgcattgtcacagtctcagctcactgcaacctctgcctcccaggttcaagcaattcttccgcctcagccccctgagtagttgggactacagacacgtgccatgcctggctaattttttttgtatttttaaaagagatggggtttcaccatgtagccaggagggtctcgaactcctgaccctgtgatccgcccacctcagcctcccaaagtgttaggattacaggcgtgagccaccatacctggccttagacagatattttttatgtaatgatactgctccttgtgaagcagggctaactcataggcagtgcacccagagtcaacaacatacaagctcttggcagctgtagttatactcatgtcaactcactttcagttatacgtcagttaaggggtgggtcaatgcaaattgaggagcaggttctttagaagttttaaggaaaagggcgaagatgtccaggttgtttccatggaaacaggtgggaacttctaggtcattgccatggcatcggtaaacagtcatggcactggagggagtatcttatgcccacgagcaatgaggcagccagggattgcttttgttgccatctgctggttcctgctggtttcttcacatcatctcatctggaccagattctgtatgggtctgcagggttgtggccagaaaacaagttcttccagtttcctacctcattaccatgtgaaatgttaccattaggagaaactgggttcacattagggatccctaggtgagggatttacatatgggaaatctctttcctacatttgcaactttgctataaacccaaaattattctaaaattaaaacattttaaaaaagaatacaaagtaaagatcaggtcgaaaaccactatttgattatgatacatgtatgtattttccatctttaaactgagatttaacacacatgtggtaaatgcacatctctatgatcaaaatatagaacatttccagcatacagaaaccccgttgtcaatctccacctgctccttcctgataattcccattctgagtctccttcaaaggttagttctgcctgttctcaaaattcacacaaaatcaaatcttacagtgtgtactcactctgtctgggtccttttactgttttgtgagatttatctatgttattaaatgtactagtactttgctttttcattgctgtatagtattccaatctttgaatatgccattatattttttatcattcacctgctggtggacacggggttgttccaatttcagatcattctaaataaagctgctatggatcttttctttcctctttgatactatttcactctttggttaacagcatgcactgtggaggcagactgggttcaagtctcagccccaccatctaccagctgtgtgaccttgggccagttagctaaacttgcagtgcctcctcagtttcctcatctgtataatggaggtcatatgatctactgaagggtaggaacattaaatgaatgagtttataaagctgttggaaaagtacctgactaccctaggcattaaataaacaagcaattatgattctgccccaactcccaaagtcagcaggaattcccaaaaatgaggacagcagcagctcaaagcaggaaagccaggaggtcacaggggacagtgcttccaggaactgggggtgctacctgcctacccttgccctagtggagggggtgtaacacagtagctttctcttacaatttatcagatttcattaaaagcatcccactgctcagccatccatgagtggatgagtccttctccctgtcaaccccagaccatcccccactgcctccctgaaattcttgaaagatccggcccatctcatgctctgatgctttccactagtcttttggatgacagatccctacccaacttcctgtttctctttctgtgggagactagatttaggaagtaaagatcacagggtgggaaataaaagctgtggcccccaggagttctggacactgggggagagtggggtgacatgagtgactccaaggaaccaagactgcagcagctgggcctcctgggtgaggctgggttgggacgctgggattctgggaagggggaagggatggccagccatggcctcagcctgcccaggctctgatttcacgtctatccattcagaggaggaacagctgagagg

SEQ ID NO: 20582 - DNA, 2300 bp, Homo sapien
tgtagtctggtggggactggcttctccaaatggcactgtgctgcaactacctgtgtgttgggggatgtgtggaacccagagtcagctccctctctggagtaatgttgtcacatgaactccaagcagcaccttatactggtctcatggcccatgagggttgaggagctctcccacagctaggatttcaggagttcatggtgggaatgtgcactgcaggggatctctcacttaccctgttcctgcactgggaaccccccaacctggtgctcccagctgatccaggctgggccagctgccttgtttccctccttccaggccacagatgtttcctatcacttctctgctgaattccagtgttttctcttagttgctgtattcaaagtgtgattatctacccactgtttaattcttctttggggaggaggtgagtgccagatgcctccaatctgccatgttgaactgcctctgtatttctcatttttaaattgatatataacacatttacaacacagtacacaagtcttaaatatatagttcaagagattttgacatatgggccaggcacagtgactcacacctgtaatcccagcactttgggaggccgaggagggcagatcacttaaggtcaggagttccagaccagcctgtccaacatgatgaaacccgtctctactaaaaatacaaaaaaattagccaggcatggtggcatgcacctgtaatcccagctgctcgggaggctgaggcaggagaatcacttgaccctgggaggtggaggtcgcagtgagccaagattgcaccactgcattccagcctgggcaacacagcgagactccgtctccaataaataaataaaaatacaaaaattagccagatgtggtggcgcacacctgtagtcacagctactcgggaggttgaggcagaagaatcacttgaacccaggaggcggaggttgcagggagcccagatcagccactgcactccagcctgggtgacagagcgagactctgtctcaaaaaaaaaaaaaaaaaaagaaagaaagaaagaaagagaagaaattttgacatatgaattcatccatgcagccacttctcagaaaaaaatatggaacattgtcagcagaaaatttccttctaccccattctggtcagtttacacccactccttccagaaagcccccaatttgagtcccatcaaaggttagttcttctgcctattcttgaaattcatgtaaactcaaaatcttacagaatgtattcattctgtttgggtttcttaactcttgtgagattcatccaaattgttgtttgtatcagtactttgctttttcattactgtatagaattccaccctctgaatatgccatgatatttgttttcattcacctgctggtggccacatgggttgttccaatttgggttgggatagtctaactaaagttactataaatctttctattttgcccttgatgttattagaccctctttggttaactgggtggagtgtggaggaaaactgcctggattcgaatctcagctccaccatttaccagctgtgtgaccttgggctagtttcttaatctcgcagtgcctctattttcccctatctgtaaactggaggtcacatgatctactgcagggtaggaaagttaaatgaaggagttttataaagctgttggaaatgtgcctatcataggtatgaaataaacaactatcgttcatctccaactcccaaaaacaaaggaaattcccatgaatgagagcatccgcagaccaaaagagcagatcctggaggtcagagggcatggtggttccaggaactaggcggtactgcctgcccacccctgccctacgtagggaggcataacaaagtcgctttccattagaatgaattgaattttattaaaagcatcccatcgctcaaccatgtcatgagtggaggagtccttctccctgtcaaccccagaccatcccccaacacctccctgaaattcctgcaaggtcaggccgatctcaggctctgactcctttcactagcctttctggtgatgtgatcttacccagcttcctgtttgtcttcctgagagacagtagatttagaaagtgaggatcagagggtggaaaataaaagctgtggtccccaggagtcctgaacatctggggacagcgggaaaacatgagtgactccaaggaaccaagggtgcagcagctgggcctcctgggtaaggctgggttggaactctgggatcctgggtaaggggaagggatggcccaggctctgagctgatgtctgtcaattcagaa

SEQ ID NO: 20583 - DNA, 2300 bp, Homo sapien
ttcaagcaattctcctgcctcagcctccagggtagctgagattacaggcgcccaccacgcctggctaatttgtatttttagtagagacgaggtttcaccatgttggccaggctggtctcgaactcctgacctcaggtgatccacctgcctcagcctcccaaagtgctgggattacacatgtgggccactgcgcctggctggcccttttatgttaattcttctgacctctggaaacattagctatctttatccaaatcctttttacagtattctctaattgaatttaaatttttttctctgcagatatgtcctgtgcattttttttatttttattttacagtcttcctctattacccagctagagtgcagtggcactatcatagctcactacagcctggagcctcgaactcctgggctcaagtgatcctcccacctcagtcttcagagtagctgggactacaggcgcatgccactacatttgactaatttttgtattttttgtagagaggagggcctcaccatgttgcccaggctggtcttgaactcttgggcccaagcgatctacccgcctcagcctcccaaaaggccgggattacaggcatgagccaccgcacctggcctctggtgcattctttattgattcttagatacacgataatttgagttgctattttagaggctttatttttcattaactttctagtttgttgtttctattaattttagtaatgtaatcactctgtgcaaatgctcttcgtagttgcaatctttacatttattcctctatgtaggtgataatatttttttttttttgaggtggagtctcgctgtgtccccgaggctggagtgcagtggcgcgatcttggctcactgcaagctccgcctcccgggttcacgccattctcctgcctcagcttcccgtgtagctgggactacagtcgcccgccaccatgcccggctaatattttgtatttttagtagagacggggtttcaccttgttagccaggatggtctcgatctcctgacctcgtgatccgcccacctcagcctcccaaagtgctgggattacaggcgtcagccaccgcgcccggctggttataatattttaaaatacctggcacatggcaggtattcaatgtttgttgaaagaatgcatgaacattgagagtttttgatgaacctgagatggttctgggtagacatgcgtaacttcattgtttctcggtgtttctttgagagaagccccgtcactgtactcttttcagggttggtaaaagaaaactggggcttctaggctggccgccgtggctcacacctgtaatcccagcactttgggaggtcaaggaaggcggatcatctgaggtcacgaattcgagaccagcctgtccaacacggtgaaaccccatctctactaaaaatacaaaaattagccaagcgtggtggcacgcacctgtaatcccagctacttgggaggctgaggcaggagaatcgcttgaacttgggaggcggaggttgcagtgagccgagattgcatcactgcactccagcctggacaacaaagggagactctgtctcaaaagaaaaaaagaaaaagaaagttgaggcttcctgaagctacacactgcacagccccatccgccacccaccaagtggtagagtcctgcagctcagcagaccacctcctcaacaaaacctctgtttgctctcttctggcacagagggagtgaatcaaggtcaggttcagacccagcctctgaggagggacctgaactggcctggggagctacgccttgggggctttctcaggagccagcaggggttacaatttggtcgggtccagtgtgtccctctcaggcggaaacccagccccaggcccataagagaggggtccaagctccaaagagaagcctccagcaccagcctggggatggagctgcagcgacgaggaccgggaagctggaactacctcaccccgagcccagctcagcccagcccagcccagaaagggcccaaccctgtgattggtccaaccctgtgatttgtccttgggtccctgttgccaggaatccaggccaagaaaatgagaaggaaggaagggagtgcgtaggtccagtgaggacgagggtgaaatttatatctctgcccaggtctcggtgcctgcaccgccatagacaccaccaggtacagcaactggggcgggagctacgaggaggtccccggaggtatgagcaaggagactgccccatccctgccccggtgtctggggtttgatgggggaggggagggaagagccaagacg

SEQ ID NO: 20584 - DNA, 2300 bp, Homo sapien
ttctcctgcctcagcttcccgtgtagctgggactacagtcgcccgccaccatgcccggctaatattttgtatttttagtagagacggggtttcaccttgttagccaggatggtctcgatctcctgacctcgtgatccgcccacctcagcctcccaaagtgctgggattacaggcgtcagccaccgcgcccggctggttataatattttaaaatacctggcacatggcaggtattcaatgtttgttgaaagaatgcatgaacattgagagtttttgatgaacctgagatggttctgggtagacatgcgtaacttcattgtttctcggtgtttctttgagagaagccccgtcactgtactcttttcagggttggtaaaagaaaactggggcttctaggctggccgccgtggctcacacctgtaatcccagcactttgggaggtcaaggaaggcggatcatctgaggtcacgaattcgagaccagcctgtccaacacggtgaaaccccatctctactaaaaatacaaaaattagccaagcgtggtggcacgcacctgtaatcccagctacttgggaggctgaggcaggagaatcgcttgaacttgggaggcggaggttgcagtgagccgagattgcatcactgcactccagcctggacaacaaagggagactctgtctcaaaagaaaaaaagaaaaagaaagttgaggcttcctgaagctacacactgcacagccccatccgccacccaccaagtggtagagtcctgcagctcagcagaccacctcctcaacaaaacctctgtttgctctcttctggcacagagggagtgaatcaaggtcaggttcagacccagcctctgaggagggacctgaactggcctggggagctacgccttgggggctttctcaggagccagcaggggttacaatttggtcgggtccagtgtgtccctctcaggcggaaacccagccccaggcccataagagaggggtccaagctccaaagagaagcctccagcaccagcctggggatggagctgcagcgacgaggaccgggaagctggaactacctcaccccgagcccagctcagcccagcccagcccagaaagggcccaaccctgtgattggtccaaccctgtgatttgtccttgggtccctgttgccaggaatccaggccaagaaaatgagaaggaaggaagggagtgcgtaggtccagtgaggacgagggtgaaatttatatctctgcccaggtctcggtgcctgcaccgccatagacaccaccaggtacagcaactggggcgggagctacgaggaggtccccggaggtatgagcaaggagactgccccatccctgccccggtgtctggggtttgatgggggaggggagggaagagccaagacgggccagagtcgtgggtgcaaaaaaaacaacacagagccagttggaccaggggccaattccaactctgccacttagaagctgtgtgaccataggcaagttacttaacctctctgaaactcagtttcctgagaggaacccaggcctctagggctcagtcctgggggacccagcatgccgtccttgttctgccagggcactggggacgctgggtgcactggagcccgagacccctcttcctggccatggctgtcctggtcgccagtactgtgggctgtgattctgagtatcctattgtccaagggtgagtgaccctcaatggggaggggttgcgtctggcccccctggggacacaaaacccccactgcatggcgcaccaactgcgccctggcgtcttgctcgcgtctgagcgtgagcagagtgtgtgtacatctttgggccgtttgcagtcacgcgtgtgcacatggcgtgcacgtatgtgtgcgagtccccacgcgtttgtctcccatcggcgtgtgtgcacatagtgtgcgctatatgcctgcctgcccgcccgctctgtggtcccgagtcgggggaccccgcaccccccgggcaagggaaggatttccgagtccctggccttgcctgcaggagcctctctccgcagcctccacggagcgcgcggcgctgctcggctgccaggacctgctgaggacaaacggtgtgtgcagagccgggcgcctgggcgcccggggcgtgtgcggcgggagcgtctgagaccccagagatggagtcctgggtgcgtgggggccctgtggtccctgagtctggccacggggtgtggaagggagtcccctgagtcctcccaagtgacccggcgggcatgcgttttgggatgggggtcgttccagcctcgaagca

SEQ ID NO: 20585 - DNA, 2300 bp, Homo sapien
tctgctgcctcagcctcccaagtagctgggactacaggcacccgcctccatgcccagctaatttttgtatttttagtagagacggggtttcaccatgttggccaggatggtctggatctcttgacctcgtgatctgcccgcctcggcctcccaaagtgctgggattacaggcgtgagccaccgcgcccggaccctggggaggtttattaacagttccagaacgttggcagatgcaaaatagacaggaagagggagggagaggcagagagagctggacagaggccgggaccatacgtggatgtcagtcactgcttgcaaggccacacagagtctcctactacagagaaggttgagctctcagaccttaggaagtcctgacgtgcccctccctgggtccagccttcccttccccattctgaacttaggacatctagctgggcgaggtggctcatgcctgtaatcccagcactttgggaggctgaagtgggagaacctggcaccaggagtttccgactagcctgagcaacataccaagaccccagcctctaccaaaaaaattagccgggcatggtgtgcacgcacctgtagtcccagctactggggaggttgaggcgggaggatcattggagtccaagagttcgaggctgcattgagctatgttcgcatcactgcactgcaaactgggacacagagcgagaccctgtctctgaaaaataaataaataaaaacacacttatgacgtcaccctctctgctatgacaaggtccttccctgccccaccccctccagggcccatccctacatcttggggaggaaataagtccattttggtcagtcttgcccgctgtcagtaactgtccctacgaattcctctctagcttgaaggattctccacctctcccttctctgttaaaagagtcacgggcccattttcattcattcattcatcaaatgtttataagcagtttccatgctggggacctggaagagacccgacctaggccctgcatcccgactccccgaggatctatcagcctgggaggatggggaatgggagggcctatccctccccacgatcacggcgcgaaccgagctttgatggagaaacacgcggctctgtgagctttagagaacacatttaacctggcctggagtaagacaggggacgggcctgaatcttttatgggacccgcccccaatatcaaccgccccgtccccagcacagaactgggctcctagacgacacggtgccatcacgtccccagtgagtcttcaggatttctggccacgccccttctcagacccaacccccgagcccctcccttgcttgaccccgccccatctctggcctaggccacgccctcctcttagccccacccccatttcattcaacccaggcctcaagccccaccgcccaggacgccaatgctcccaccaatctcacatacccattggtcagagagtgtcactttcccgccctccttcagtagcattggttccctaggtgtcaatcttctttatggcgcccccagcagttgccagggcccaggtttgaggggcagataataatggacgtctcggggcgtctcgttattgggcagaaagcccggctctgggcggggcttagtgccaaacgcttggccgcgtctgcctggtgttcctcagggccgcagcctttcctcacggacacacccccactttccttgctattggtcttatcaggtgttgatcaataggattcctcattccgatacgcaaaactacctgtccttcaccgcttccctcatttcaattcgctctctcctcagaggcggcaaccttctgaacgtagccagggcccgcctcacggaatggccacggaatggtcagacaccccgtcactcctggctggtgggcggggccagggcgcctgggggcggcgaattggcggatggggcctcgggggcggggcagcggctcctgtcagcgggtgaaatggcagcggcggagccggcggcggccgcggtcccggggggcggctgagggggccgggccggggctgcggggcgaacggcgcggctaggatccggcggctcagcccggggcggcgaggctcggcacggagatggcggcgcgctcggcgcaggtagggcggcgcgggccgggcctcccgggcgcctgctcaggccggcggctccgtgatgcggcccgcggggaaccggcaggaccgcaactcgggccgtcgtgccccggaacccgcgctgggagcctcggcatccccagcccgggaccttcggaggaccctggcccctgcccaccct

SEQ ID NO: 20586 - DNA, 2300 bp, Homo sapien
ccccaagagatggacagaagtggcgtgtcctccacccagcgtcttgctaggggtagatcctccttctccatccacacccgtgacctctgccaatcgccaggccaaggcccagtgagtggcacctgtctggttgggtcctgtctgctgtaccatccaggacagagaccgggtttggagggataggctgtctctctctgccacatctcagggttggacaggaacctcaggctggggacttaagccatccagcgtggtgtttatggggcttgggggtctcctccagagaaatcgggaggctgacagggagagaggacgcagctgggacaggaggtatcctaaccagggggatgctggcagtggccagccctgggttcaggtccagctcccctgtttcctgccgagtggcccttggcaggtgacctcagcctcaggtcttccatcagtaaaacagcttgtgaggacacagggaccaacagtgtgtcatgagagtctagggagccaggtaccgacatggacatgggcccctgtaccccagggccctgatgagcagcgagatgcccctccccgctgcgctgccctgagcccccccacctgcccgtcccccctagatgcctgaggaggaggccttctgtgtgttcgtgcggctgatgcaggagtaccggctgcgggagctcttcaaacccagcatggccgagctcgggctctgcatctatcagttcgagtacatgctgcaggtgagcagggccgcaggagagcagggctgcaggagggcagggccacaggtgggcagggccgcaagggagcaggatcgcagaagggcagggctggcaccctagaccatacccgggcacctcttggactgaaaattccaagcctgtgaaatcacacctggacgttccaactccaaaaggcactcctctttccatgcagcactgccctgaaggatgcttggaggaacaggagagccaccactgaaggggggctcccagggctgctgaggcagaggggtggggcaggctcacatcggacacagccacagccacctccctgtctgctccagagtgtggtggaaggagggagtgttgtctgcctgcctgattactggagagccgcagacgtctgtttataaatagcagcccccgcagggcctgctcccggctggcaggcagagccgccaaggccgtttgcgaacatacacacacccgcatgcatacacacacacgcagacacacacacacacaccggcccgcctcagctgccatggcaggtggggctgtgcagtcatccctggatgtgacagccccactccctgggcctggatcatggacggtgctgtagccttagggggcctggtagtgccacaagcaggaggcctgggctgcagagaaggcaccaccccacctcaggctgggtagcagagccctcccacagccaagcttgcaaactcagggcgcagagagcccctggcgctgggaggaagcccgggatcctaacgccttctccggcctcagtttccccagccgtctgccactttctggctgtctagagttcaggccaatccaacacagcttgcacaaagctttatgctggggtccaagggaggtacagtggctggcaggtcacgtaacaaggtggggggggggctccccccagggccagaggctgccacttgcccatgctccacctctgggtctcagggtgtctgtggggagtgacccaactcccccagcctcagacacaccctctcaggctgtcgtgaggaccccatgagctgccacgggcgcatcacctacccagggtgggcccccaacacaggcggctacagatcttgccatccctgcctgtcccccaccccgtgctactcaaagctcgggggtgcttcggcctccctcagacagagtgctgagggagcaccaggaagggagcctcaggctgcccagcgcaggtccaggaaggctccctggaggcggggacactgaggcccagcaccccccggtgggagggcgtccccctcactgtgcccacccggcctcccacccctgcaggagcagctcccagacctcaacacccacttccgttcccaaagcttccacacatccatgtatgcctcgtcctggttcctcacactgttcctgaccaccttcccactccccgtcgccacccgggtctttgacatcttcatgtatgaggtgaggaccgatggtgcctggggagggaagagagccccttgggggtggttggaacaggagcctccctgccctccacctcccactgcctttgccgcctttgcaggggctgga

SEQ ID NO: 20587 - DNA, 2300 bp, Homo sapien
accccctcccccagtaactcccgcagccctccgagttctgggagctgcgggagcagtggggcgaaagcctctggcagagcgagcggggggcatcggcggggccactattcccgagtctgctccccgagcgggaccaacgcggagtgctgggacaagttcccgaaacctggtaccccagcctccttcctcagctccgcccccatcttccctcccccttccaatacctgtccagtctcacctccactgccacctctccggggcacctgtgactcggccttctccccgcagcctccaggcccccagcctctgggagaggggagagagctcctcctgccaagaacaccagcccaggccctgtttctagcccagggcgtgccagcgggaccaccaggtaacctgctccctctcccccagtctcctaagccagggttagcgtcacagagtctggaaccttttattttacacgagttggggcgcgggagcacttgcaggtcactgggcacaaattgggtgaaagccattattggtcctcagagagggcacatgcccatttcacagatgggaaaatagagacttgggaagccaaacaaagacctaggcctgagcgtggccccttctgtctccaggccaggccctcttggccagaagggactccggatctcagcggaggaaactgtggccagaggaaaagctacagaggctcccaaaaggagtgccctcagcgctggggcacggagaggtacgtgacctggagaagagtggggttcctgggcagcaaggggagccgcctcagaggtatcggtgacccttggccttctactttttctccagacacttccgggcctaccccaggaaccccgtccccggccatggcccgtcggtcccgggctgcgggcaccgaggtggggctcccccggccagctccgagtgcccggccacggcccccgacagagggcccccggaaatcagtgagcagcgcctcggagcacagtaccaccgagccaagcccggctgccaggaggcggcccagcgccggtgggggtctccagaggccggcctcgcgctccctgagctccagcgccacccctctctcctccccagcccgttctgggccctcagcccgcggaacacccagggctcctgcgcatccctcgcagcccaagccgaaaggactgcaggctctgcgaccccctcaggtcacacccccaaggaaggacgcagccccagcactaggaccgctttcttcctctcctttggccacaccctctccatcgggtaccaaggcaagacccgtaccgcctcccgacaatgcagccactcccctgccagccacgctccctccctctccaccggtaacgccccctccgccagccgctctccaaagtcaggccccgcccaccctgccggccacgccccactcgtcgagccttacctgtcagttggccacgccccttcctctagcccctccttctccctctgctccaccttctctgcagaccctcccctctccaccagccacgcccccctcgcaagttccacccacacagctgattatgtcctttccagaagcaggcgtctcttccctggccacagccgcttttgtggcttcagtctctccatcagtttcatcccctctgcagagtatgccccccacccaagctaatccagcgttgccctctcttccgactctcctctctcccttggccacacctcctctgtcagccatgtctcctctacaaggccctgtttctccggcaacatctctggggaattcggcttttcccctggccgcactccctcagccaggcctttctgctctgaccacgccccctccgcaggccagtccttccccgtctccgccctctctccaggccacgccccacactctggccactcttcctctgcaggactctcctcttctggccacattgcctctgcaggcctctccctctcctttgaccacagtctctctgcaggatcctcctctagtttctccctctcttttggcctcaccgcctctgcaggctccgccccacccacaggccccaccttctatgactacgccccctatgcaggccccgccctctctccagaccattcccccaatacaggtcccacattctctgacctcaccgtctctgcaggcacctccctctcctctggctttgtcctctctgcaggccacaacttctttgggctcacccactctgcaggccacacattctttcctgacaatgtcccctaggcaaacccaagcttctttgatctcaccttctcggccggcctctactccccctgat

SEQ ID NO: 20588 - DNA, 2300 bp, Homo sapien
gagatcctgtctcaaaaataaataaataggagggcagggatctgtgttggtggatgtgatttggaaggaggcactgggtgtgggtgggtagacagggaaccaggctggtgtcatgccacaaggggttcacacgggtgatcattgctagactgagggagaagataaggcctaggatgatccaatctggaggtcaaagcatggcattcagctctgtcatttttctctgccttccatttctgcaacctcaaatgggcgcaacgtccctaccccccaaccccagttcacccgatgccaagttgcattatctgtttcctgtgcatggaggccccctgatttccaggagggagtgaactgtgcatatgagcttgcgatggggttagcagtggggcacagggcgctggtttcctggaatggggtaaaaagtggctgtaagtctggagggatgcgacatccaggcggaaagctcatggaggccatatgaggaggggacttggccgacagaggtgacaaggccagactctttttttgtgcatgtgtgacagagtcttgcactgtcgcccaggctggaatacagtggcacgatttcggctcactgcaagctctgcctcctgggttcacgccattctcagccatactcaggccatactcagcctcccgagtagctgggactacaggcgcccaccaccacgcccgtttaattttttgtatttttagtagagacaaggtttcaccgtgttagccaggatggtctcgatctcctgactttgtgatccgcccacctcggcctcccaaagtactgggattacaggcctgagccaccatgcccggcccagactcttcttataaggagagggagctgaggaatggccatttccaccctcaggctcccaccctcttcatgccacagtcctggagcaccgctctccaccgaggcccctgccctggctgaagtcagcaacaggacacctcccactcgctccggctgggctgggacccttgtaaaggatcttctgcgtccttcatgaacttgtgtttttgtttttttgtttgtttttgtttttgagacagagtctcactctgtcgcccaggctgaagtgcagtggcgcaatctcggctcactgtaacctccgcctcccgggttcaagcgattctcctgcctcagcctctcgagtagctgggattacaggtgctcgccagcatgcccggctaatttttgtattttttggtagagacagggtttcgccatgttggccagactggtctcgaactcctgagctcaagtgatccgcccgcctcagcctcccaaagcagtgggattacaggtgtgagccaccgcgcccggccttatgcacttgttttgacacctgctaggtcgacagaaccttgtcccccggaagcccagctctgccaggaagtctgggctgacttgacatcccgttagctgggagggtgtggagggtgggcgtgctctaccctgcagacggctgggtcacctctcacagaatatactgtgtctcctgtcgctctccctcctattcctttctttatcttccccaaaatctggggtctaccttgcatcctgaaattcccagggcagcattctcttagcagtccctcgaccccccaaccagataaggggtttcctggcgtctggggaacaccttcgggtgtggggcggagggcggctgccccccagagaccctgggcggcctagctttcgcagacgcgaaggactggatagtgccagggccaccgagcggccggattggtgtgtgggccagaggcgcggtggtcccgcctcctggttgccagggcccagcctatccgcgtccaggcggtccttggtgccaggtggttgtggtgggggtcggggcaggtgtatgtgttgggaaggacagtggaggaccccagggatttgctcccccagtcccaaccgttgactatctgggttcctcaggcgcagctggggaaacaggcttcccccggaccgcagagaagccacccttctctccaaagcgcgcttctcccccatccccctcggcgcgcttccgccggccgcgctcccgggtccggatcgagcgcgcgcccccggctctcccgcccgcggccgaggggcgggaccggctcggctcccccggcgccgcagcccgcagccccctcccctcgcctcctcgccgctggcggccaccgcgtcgctccggcccgggccccaccccaggcgactctgtgaggagcggccggaggccggaggcggaggtgagcgcgacgcgagcaggtggagaggctgggcgcgggccagg

SEQ ID NO: 20589 - DNA, 2300 bp, Homo sapien
attctcctgcctcagcctcccaagtagctgggattacaggcttgtgccaccacacccagctaatgttttgtatttttagtagagatggggtttcaccatgttggccaggctggactcgaactcctgacctcaggtgaatcacccgagtcggcctcccaaagtgctgagattctaggcatgagccaccgcgcccggccaagtcaaggcttcttttaccctgtcagggagaactctccgtctcccatcctaagtccaggtaggaacatttccatggatggtttggttttgttttgttttgttttgagatggaatcctgttctgtcgcccaggctggagtggggtggtgcaatctcagttcactgtaacctccacctcccaggctcaagcgattctcttgtctcagcctcccaagtagcacaagccaccacacccagctaatttttgtatttttagtagagacagggtttcaccatgttggccaggctggtctcaaacgcctgacctcaggtgatccaccctcctcagcctccgaaagtgctagattacaggtgtaagccactgtgaccagcccaagcctacagcacccggtattcctaggtggtctcccatccaagtactaaccaggtccgacactgcttagcttgcgaggtgagacgaggatcagatgcttttagggtggtatggccatagatacatccaaggtttttcttttcttttctttttttatctttttttttttttttttttttgagatggagtctcactcttcgcccaggctggagtgcagtggcgcaatctcggctcactgcaagctctgcctcctgggttcacgccattctcctgcctcagcctcctgagtagctgggactacaggcgcccgccaccacgccctgctaatttttttgtatttttgtagagactgtgtttcactgtgttagccacgatggtctcgatctcctgacctcgtgatccacccgcctcagcctcccaaagagctgggattacaggcgtgagccactgcacccggcctccaaggtttttcagacggagaacagatcaaggtccacctccacagatttgctcatctaagacccagctcaggcctcccaagtggggcggccagggtgggggtggggaggcagagaagctgggccccccaggacttcggagctgcttgtgccccactccccacctggagggcagaccacagtgttgggcagggacagacaggagggcatccccactctactcaacttccgttggttcagcccagttcccgcccatggccagagcttgaagggagaagccgtcccctccccgtcctctcctcccgcaactccactcccagcacctgaaaactgcagtcacctgtgccttggctgggctttaaggccaggtgactgggccttgcggggttagaaggagcccttccgcacttcctctttttcttttttttcttttggagacagggtccttcttggtggcccaggctggagtgcagtggcatgatcgtagctcgctgcagcctctcaacttcccagattcaggtgatccttccacctcggcctccagagtagctgggactacaggcacacaccaccacacctggctaatttttaaaattttgtttttgtaggttttaaaattttttgtagagatgtggtcccactatattgctcaggctggtttcaaactcctaggcccaaggtatcctcctgcctcggcctcccaaagtgttggattacaggcgtgagtcacagagcccggcctccacattttctcgacagggtccgtaagacctggttcccagaaaggtggccgtagaatggctttgggagttcagcgtccccagctccctcagtttccccagctgccagggtccagccagactgcaaagttgcaaagttctaagacccctgcatctcccgccagccccgagcccaccagggcaaagcagcctaagacggctgtcttcccccaaccctgctgatcgcgcggcgcctggagtagggtcgacctgggcgcgcctgcggcgaggcggggccgagtcgtccgggggcggggcggggcggctccgggtctcctgtccccgcctgccctgactcaccctcgcggcccgcccgggaactctgcgggagtcgcggcagctccgctcccagagacccaggagttgggcccagcgtccctcccggaacggtgagtaggtggctctttgcctctggacaccccacgaggtggcagggtgggggtcgggctgggagtccccgggtctggacaaggggcagagccgctccaggtgc

SEQ ID NO: 20590 - DNA, 2300 bp, Homo sapien
atctagattctgatcccttttgaggtcctagaccctttgagaaactgatgaagccaggcacctccttcctcaggaaaatgctggtgtacaaatacacacaaagctcttcaggcagctgatagatttcccccagagagctattcaaggacttcctaaggtgggtggactgcagggttaggacacctgctatagaggtgacatttttccaaggacaagcagggactttggtcttgactgttctctgggtgcttaataaataatactaattatgcaagttctagttttgatctcttatgtgcactcctgtcattgtctaacaccgtccattagggccagacatagtggctcatgcttgtaatcccagcgctttgggaggctcaggtgggaggatcgcttgagctcaagagcttgagaccaaactgggcaacatagtgagatctcatctctacaaaaacatacaaaaaaaagttggccaggtgtgctgatgtgtgcctgaggtcccagctactaggcaagcagaggcaggaggattgcttgagcccaggacccaggaggttgaggctgcagtgagctgtgatcacaccactccactccagcctgagcaacagaacaagaccctgtttttctttcttttttttttttttgagacggagtctggctctgtcacccaggctggagtgcagtggcgcaatcttggctcactgcaacctccgcctcctgggttcaagcaattctctgcctcagcctcccaagtagctggaattacaggcgcctgccaccatgcccggctaattttcgtatttctagtagacacggggtttcaccatcttggccaggctggtcctctcctgacttcgtgatccatccgcctcggcctcccaaagtgctgggattacaggcgtgaaccaccatgcccgtaaccttttatttcatgtgaccaagtaacacccgtgtgccagaatcaaggatgagtctcatgttctcagagcagaggcacagaaggctgcctggaagacggaaaggtaaagacctcagctataactctacacttgtgtgtgctccacccacaaatcgtcaccagaggagttccgacaagccggtaactctcatcccaaagtgttccctcgttggaccagaagctggaagggcacttggcagagtctgcctggccctggccacctcccgggtgtccgcaaaatcagaacttccttctcgcatctaagagcagagggaagccgctcttggggggatccctgggttccagatgggacatttccccagcacccgtcggaccacttaaaggagtggtttaggctgccgggggcccaagcactggcacctaaccccagcgcccctcctcagataggaattctccacgtccaggcgctgggctcacgttccgggtgcgagagagataaggggggtgtcttgaggttctatgtgggtctggccaacaactctggccttgaccttggccccgtcgccgagggcaggggtcacaccgctgggttcccatggccgtcccctcccccctggcttcggccaactctgagcctgctggggctggcaagaagggaaagggctctcgacggagcctaattacggtgaggaggcggcaccccgctgccagcaggaggctaggaggtaattaagcacaagaggaatcctaataaagcaccatcagtgaggaaggcattccgaagggacgcccaagccgaccgtgaaaagcgaggaggctgaggctgcaccgccgtggagaccagggatcgactgccgctttgggaacgaggttccaggaatgcgcatgcgcaaaagccacgcgggcgaacacggcttcgcctcgctaagcatgcgcgccgttttccccgcccaccgtcctcagaagaatggtgtttcctcgcagcgcctctctcaggagcgatcgggaattggcgcatgcgcactacggtggtggtggcgacgaaggcgggggttgcacgttgcctgcctcgagctctaggtggcgtcatccttcgggctgagccgaagcacgcacgcgcggaggttcgcacgcggagaagggcgggtgcgcgccgcgggcatgcgcggtgcggggcgagacggcggctcgacggggtcatccgggcgcaggcgcagtgcggtgtttgtctgccggactgacgggcggccgggcggtgcgcggcggcggtggcggcggggaagatggcggcgtcctccctggaacagaagctgtcccgcctggaagcaaagctgaagcaggagaaccgggaggcccggcggaggatcgacctcaacctgga

SEQ ID NO: 20591 - DNA, 2300 bp, Homo sapien
tgtttgtttgtttgtttgtttgttttttgagacggagtttcgctcttgttgcccaggcgggagtgcaatggcgcgatctcggctcaccgcaacctctgcctcccgggttcaagcgattctcctacctcagcctcctgagtagctgggattacaggcatgcgccaccacacccggctaattttgtatttttagtagagacggggtttctccatgttggtcaggctggtctcgcacacccgacctcaggtgatcctaccgcttcggtctcccaaagtgctgagattacaggcgtgagccactgcgcccagcctccaggcactgttgtaaatgttttacgcctatgaactaacttaatccccttaacctctaggcggacactattataatccccattttagagacgagaatgatgaggcattctctgaattaagtaacttgtcaaaagtcacaatactgggtggagcttggattcgaactcaggcagtgggtcacccgcggcaggcgcgggctttgggtcgagccaggggcattaggtgaggagaggcactaggcgaggagaactcagcattcggacccggctcccactctcaccccggcatgcagaccgatggaagaggctagtggtctgctgggaagggaggtggcccgcgtagcgtcccctccctcgctgagcctcagccacccctcccagggatggtgcgcccccaacatggtccggagatacacccagctaccaattcgggaccaggaccaacaggaccggacccgcctccctggacctcggacctgatgaggccacgacccctgcgcttctctcctccccctgtccctcccacctgtgctcaaaataaacctctggactgaccggctaagttctggtgcagtcagtgagcgcgcaacgtgcggggtgggggataggtggggaggcttggggagaaagctgggagcaggacttggggggtattcctgagaaatcgtgacttacaggggtggagcctggggacggggcccatatgcccatatacccgtgtgcactcccaggccatgggagactgtagggcgttttgtctcaaacagaaagcgacacccggccgggcgcggtggctcccgcctgtaatcccagcacattgggaggccgaggtgggtggatcacttgaggtcaggagttccagaccagcgtggccgacatggtgaaaccccgtccctactaaaaaaagtaacaaaaaaagaattagcagggcgtagtggcgcgtgcttataatcccagctgctggggaggctgaggcaggagaatcgcttgaacccaggaggcagaggttgcagtgagccgagatcgcgccattgcactgcagcctgggcaacaagagcaaaaatctgtctaaaaaaaaaaaaaaagcggcacccaaccccacaagcgtaagtttaaaataaaccttccccctccctcctctccttacccggacacctgcccatctgcctcctgcgatctttctcaagccaggccttctccgctctccattacccccgcccggaccctgccctagctccgcttcgaccttctgcctctgctccagttccctcctggtctggacttcgccctcctcttagattgtcagtctagtctagagctccttaaatccctcctgcccgagctccactctaccttacacagacaagagtgggactatcagccccagtctacagaggaggaaactgaggctcggcaaggctaaatcacttgcccaaagtccccaggcctgtctgaccccagagcccaggctcttgaccgactggatcttcggacttgacctttcggccagaacccacccctctgcgagaagcaaagcacacagtagtagcttcatgagttagtccagcaacagagggagggcatgggatccaaggtgtcgtctccacttcatgaatgagataaagtgcaggctgagggtctccttcgccccgccccagttccggtgccgatctccccttcacttccattggggcggttccccgggcctccaaacgcgaagccacgcccccacgcgcgtccgcctccgcgcggttctttctgacctcggcggcccccgtagctccgcccatcggagaagcgaccttacagcgcctgcctctttctgagcggcatgaagccacctcccaggcggcgagcggccccggcgcgctatctgggcgaggtgaccggtcccgcgacctggagcgctcgcgagaagcggcagctagtgcgactcctgcaggcgcggcagggccagccggagccggacgccaccgagctggcccgggag

SEQ ID NO: 20592 - DNA, 2300 bp, Homo sapien
agggatggtgcgcccccaacatggtccggagatacacccagctaccaattcgggaccaggaccaacaggaccggacccgcctccctggacctcggacctgatgaggccacgacccctgcgcttctctcctccccctgtccctcccacctgtgctcaaaataaacctctggactgaccggctaagttctggtgcagtcagtgagcgcgcaacgtgcggggtgggggataggtggggaggcttggggagaaagctgggagcaggacttggggggtattcctgagaaatcgtgacttacaggggtggagcctggggacggggcccatatgcccatatacccgtgtgcactcccaggccatgggagactgtagggcgttttgtctcaaacagaaagcgacacccggccgggcgcggtggctcccgcctgtaatcccagcacattgggaggccgaggtgggtggatcacttgaggtcaggagttccagaccagcgtggccgacatggtgaaaccccgtccctactaaaaaaagtaacaaaaaaagaattagcagggcgtagtggcgcgtgcttataatcccagctgctggggaggctgaggcaggagaatcgcttgaacccaggaggcagaggttgcagtgagccgagatcgcgccattgcactgcagcctgggcaacaagagcaaaaatctgtctaaaaaaaaaaaaaaagcggcacccaaccccacaagcgtaagtttaaaataaaccttccccctccctcctctccttacccggacacctgcccatctgcctcctgcgatctttctcaagccaggccttctccgctctccattacccccgcccggaccctgccctagctccgcttcgaccttctgcctctgctccagttccctcctggtctggacttcgccctcctcttagattgtcagtctagtctagagctccttaaatccctcctgcccgagctccactctaccttacacagacaagagtgggactatcagccccagtctacagaggaggaaactgaggctcggcaaggctaaatcacttgcccaaagtccccaggcctgtctgaccccagagcccaggctcttgaccgactggatcttcggacttgacctttcggccagaacccacccctctgcgagaagcaaagcacacagtagtagcttcatgagttagtccagcaacagagggagggcatgggatccaaggtgtcgtctccacttcatgaatgagataaagtgcaggctgagggtctccttcgccccgccccagttccggtgccgatctccccttcacttccattggggcggttccccgggcctccaaacgcgaagccacgcccccacgcgcgtccgcctccgcgcggttctttctgacctcggcggcccccgtagctccgcccatcggagaagcgaccttacagcgcctgcctctttctgagcggcatgaagccacctcccaggcggcgagcggccccggcgcgctatctgggcgaggtgaccggtcccgcgacctggagcgctcgcgagaagcggcagctagtgcgactcctgcaggcgcggcagggccagccggagccggacgccaccgagctggcccgggagctgcggggccggagcgaggctgaggtgagatgcggttctcgggaccggagccaggctggaggcggggctggggtggggcggagagtgggcggggctgcggcaggagccagcggggcggggccaggaatgtaagcgagcgggggcgtggcgtggggctgagtggcggggcgttagtgggtgagcctgggcggggtgaggggcggggcgtggacgggaagagaagacctaggggcggggcgagcttgggagctagacgtgggcggggcataagtgaagcggaggggcggggcgatgccgggggcggggcgtgcgtgccgctgaggtttggagagtgggtgggtgagtttgaggggcaggacgagcctgggggcggggcgtgggcgggttaatagcaagacttaagggcggggccgttttgggagtaaggcgtgggaggggcgtgggcgggatgagggcaagctttaaaggcggggcgagcctcggggtaatgcgtgggtgaggcgagggctaaacgggcggaatgaactgggagtaagatgctgccgagtccgggcgaaaagcaacgcatgctgttggacaggatacgagcttgaagtgagagggaatagagaagaggggacgaagaagggagttgaacggggtagtagtcagcatagggttgggccctggctgcgtgaaggagccggaac

SEQ ID NO: 20593 - DNA, 2300 bp, Homo sapien
cagcaggcaggggtgtccccttacccctctcctccatccatcactagagtccgctgtggtcctcgacctgctcatgtcacttccagaggagctgccactcctgccctgcacagccctggttgagcatatgacggagacgtacctacgcctgacagccccccagcccattcccgctggagggagcctggggcctgcagcagaaggggatggggctggctccaaggcaccagaggagacccccccagccaccgagaaggccgagcacagcgaactgaaatcgccttggcaagcagctgggatctgtcccctgaacccgttcctggtgcccctggagcttctgggtcgggcagccacccctgccaggtgaggggcatggcgggcaggaggccacaccaggccccccgccctgcccctcggttctgctcggctggccctggctctttctgaggatcccgtcatgggggaaggtccttgagatgatgctcagctgtggggcgggcctctaagatgccccatactttgggggtctcagaaatggaacccccgttgtacaggggttgggtgggggttgcaggactccactcacaagcctcctgatgtcaaggacaggcggacagggctggcctcccccagtccccaagccccactgtgccttgttgtctgctggggggccatagctggcactgcccaccgtaaaggccctcgcacattttcccccttcctgtacacctcggggccagcatcctcaccttcttcaactgaccagtcgtggttactccctgctgccaggtccttccccttcccgggggtattctgtgaccatgaataaagttatcattctctttctctttcacctgtgacttaaagatggaagtgggggccctgaagtgtcagagcttgggggtcacagggctgggggtgtgtgccagggaggagagctgccacctgactggtgtgatgaggcctggggtgaggagccccttggtgactgtgaagctgacaagtgtggatggggagagccggcagggcaccttggggacaggcgtcagggatgggtttcagagtagggcaaaatcacatcgcacaggtggaggggagaaggcagcagagagtgggggtgacccggtggaaggagttgagccccaggctgggcggttagaggaagatagataggggtgggctgccccgagtggcaggaggctagtgggagtggagtgtcccctggggtggctttgggacctcaaggatccctagaaggcggggagggaggggtactggagtcagggctgaccccaaacccctgggggtgctgggaccccgcttgaggccccctccatcagcttcacctgccctgtgggtgtggaccgagggtcgggtcctagagagggaagcagatgtcctcccacggcaccgcgtcccacgcccagctagtaatccaagtcggtaaattctccgttctcggagcctgtgcattcacccagcctgccttttatagaaacgctcattcctccccccacacactgcacacggctcccctggggtgcacatctcttgggagggccttggagcacagccagcccactccgtccgtggtcaccgccccaccgcaccagacccacaaacgctgccaatggtggtgggcagggggaggaggcttaggctgcaggtacggtcggtcgtcggagcctccctccagggctggcagagggtgcgcctcccagttccccacagggctgagtctctctcaccacccccggcgcctccccagatcaacagaattgtgtgtggaggggaggcagctgggggttacacatcagcccccccccccaaagccggtgaaaggtgcttgtgatcttggtgtctttgcagccctgggaagctttaaaaacatgcaaaagccagacctgggttccacttccagccctaccagactctagccatgtgactgtgggcaagtcagtcactggagctgcctggccctcggtctcctggcctgtagaatagggatgctaacagggcctggctcattctcacgatcccgaagaggagacaggctataaacaggaggtgccaactcagcacgctacttggcatgcagtaagcgctcaataatagcttttattatcatgttcggctcagaggcagggaggagtggaacggcatgggagggctgcgggaggcacggcaggggggtcaggggcaagtggcaggagggcggatggggggcagcggtgggcaccggggcagggcgcgctgacctgtcctggggcccgggttgggggcagaaatgagcctgccca

SEQ ID NO: 20594 - DNA, 2300 bp, Homo sapien
ggcagggcacctgggcgccagggtgtgtgggcagcagctctgtgtggcgtggtgcccaccctgggtggcatcacgcaggcgtgtcggcctctcattgcagacttacagccagctggcccaccccatccagcaggccaaggcactgggtctccagttccattctcgcatcctagacattgacaacgtcgacgtaagcacctcgcagtgggggcccgggccaccatcgggggtgggaactatggcccagacaaggcccaggaggtggccttgccaggggctgggggccatgggctgatccaagaggtcttgggcttgtccaaggggagggtctcgagggaggcctggtcctggcctgagaggcaaggcccacggggagggaccggtgctgggcctggtgctggagccttctcctagcagggcctaggcgcaggggtttcacctccaggggagcagccgggctgtcctctgaggcacatcccccctctcggcccctctgcagctggccatgggcaagatgatggagcaggggccggtgctgatcatcaccttccaggcacagctggtgatggtggtcaggaaccccaaaggcgaggtggtggagggtgacccggtgagtgagggagtgggatggggcaggcacatgacaccgcctgtccccaagatctgtgtgtggccacctggcagagaccccagctcagagccctgaagctctgggactgggtggggatgtggagaaacctctgggccagagtttggggttgagggaggtcggagaccagcagacctgtctgtttttaccaaggctgagtggttcctgagtctaggcaattgtgctggcctctgctcccagcccctggggaagttgccggtggctcctgccccacagagcctggcccccccccagagctgcctgggtcacctcaaccctctcaacagtgcccttcccaccccaccctgcaggacaaggtgctgcggatgctgtacgtgtgggcgctctgccgagaccaggacgagctcaacccctacgcggcctggcggctcctggacatctcggcctccagcaccgagcagattctctgagtgtggtgccggagccaggtagccccggcctgggtcatcaggcacagaggcaccgcaacaccacctgcggcaactccagacctctgggaacaagactgcgggctctgcccccagctctgccaggacggctgcaagaccagctggcccgggaggggacaacgggctgttgcgggtgcgcggcagctggagacactcccccgcagggccaacccctgccctgttgctctgccctgcaggggtcccggcgcctggtcacctggggtgcacacaggtcacacagtgccaagaggccccagggcccagggactccccccacagcagggtgggacccgggacccgcggctcagtggcccgctagccacgtcagccaagccactttaggtccattttttaattttaacagtgctcttccatcttgtgcataagcctgagatttggaaagaataaaacaccgaattgcagaagagcagctacggagtctgaagtgtcttctctggcgcgggagtggccgaggcgatggtgggggtgggagcaggcggctgctgtgggaggcggtcaaggtcgagtgaggaactgcagccgcagtgggtggacgccttgcccagggctggaccctgagttggaagacgaggccagtgacagacaaaactagggggacttactcatcccagtgacctgcctgagctctctgagaattgaggtccccagggccgggggagcttgagtgcccatatgagtgttttagggccactgaggtccccccacaaacagggagtctcgagtggggtctatcgcggaggagaatgcaggcacagggcaggctggggggcccgaagtgccaggggaggtgggagtggcagctgcccactccccggcgaggtcgtgggtgctcgcgggtcctcggggctggggttccgtcctcccgcaggcccgggcggggtcgctggctcgcgcgccgctccctgcgcagcctccgccccctgcagccccgccccccgcggcggccccgcccccgtcgccataggaacagccgcggcggcccggctcgcgcgctgcttgcctgcctcggtctccgccgctccaggggcgggtggggtgggctgagccggagcccgggccgccgccgccgccgccggggagaggccgaacgcgcagccggcgcgggtccctgagagagcgcggccgccgggcggtcggtccccgtccgggtcgaagccagg

SEQ ID NO: 20595 - DNA, 2300 bp, Homo sapien
gaggctaaggcaggagaatggtgtgaacctgggaggcggagcttgcagtgagccaagatcgtgccactgcactccagcctgggcgacagagtgagactctgtctcaaaacaacaaaaaaagagatggaggtctcatgctgtcacccagggtggagtgcagtgggtgatcatagctcactgcagcctctaactaatgggctcaagagatcctcccacctcagcctcctaagtagctggaattccaggcgagagacaccatgcttggcttatttttttatttttgtagagatagggtctcgttatgttgcccagactggtctgtaactcctgggctcaaatgatgctcctgcctcaggctcctgagttgctgggataataggactgagccacggatcctggcttaaaggagtcttctatctccactttatctttgggtctttgacatgcttatatgacacactgcctctgagtgtccaatgctgtagttttctttctttcctttctctctctctctttctttcttcttctttttttttgacacaaggtctctctctgttgcccaggtagtgtagtgtagtgtagtgtagtgtagtggcacgatcacggctcactacagccttaacttcccgggcctcaacgatcctcccatctcagcctcctgagtagctgggactacaagcacatgctaccacgccaagctaatgttttgtatttgttgtaaagaagaggtcttcactatgttgcccaggctggtctcaaactcttgggctggagagatcctcccgcctcagtgtcccaaagtgctgggattataggcatgagccaccgcgcccggccaaactccgtactttcaaccacaactaagaatccatatttctagcccagaccttattcttagcaacacacctgtgtacaccaaccgcttaactagtttgctcctcttggcatcaagacatctcgaacaaagccagagtggaagccctcatctcttacccccaccttgagggggagctcctgagatggagaacacaagtctatccatcgcagaagccaggaatgcatgctctccggggccaagctgcctccctttgaaataatgaagtcccataaacccatatcacaggttagtaatgcaaaaagaccgggtgcggtagctcacgcctgtaatcccagtgactcagaggctgaggcaggaggatcgcttgagcttgggaattggaggctgcagtgagctagattacgacactgcactctagcctgggtgacagagcaagcctctggctctataaaaaaaaaaaaggatccaataagacaaacagcaacagcaacatacattagctctcccaggggaccaaccctcctcctcatacccggattgcatggccatgttaaaataccgccacctggtggcggcattcttcgaatggaaaatagcatctggggtgctgaaatgacaaaggcctgagcgtcttcagatcagagtgtcagttcacactgaatcgaagtaggactggaccacagtcagcccgctctcagcttcctcttcttattcggggtcaaaaccaacaggcgtcttcccaaagcgccgcacaagagtgggctccttcgctttctcggagcgactcacttgctggtctctcagccattgtcaatcaatcagtcattgcaggggcagccatagacaattactctggagctggtccgccggtcaatcagaatccaatcgaatccgtccttgtggtcggtggatccacgtgcctgtaccacctgccaccagcgcccggcgcgttctgtagccgaatcaccgcaagtgacggaatacacgcccctgggctccgccccctcgtagtcgcgcccaatcacagatctgaccctcccaggagtgccctcccccgggccacatccagtcacgggccccgtccttccaaaacactgccctatcagaggtcaagctctctaggcattccctacccttttaatgccccgccctatgacggacccaatcggagggctctccctacccgaaaccccgctcctggagcggcttttctcaggcttgcgcggctctaggccgaagcggcggatgacgcaaccgggccgcgccgcgagaaggtcacacgattctccaacatggcggcggcggccctgcggagtggctggtgccgctgtccacgggtgagcggcggtgcggcgctggcagggcgagcttaggggtcttctgggccttcggccaccaaggctttcttctcagacccttggccttcgcgacccttgcttgggctccttagaaagcttggggt

SEQ ID NO: 20596 - DNA, 2300 bp, Homo sapien
tgtgcctggcctgctttgtttatacttctattgcaccgtgatgacccagaatgctggctactataaaatttaacaattaaatgttaaatttaacatttaattgagctaggtgtggtggcacgtgcctataatcccagctacttgggagcctgaggcagaaggactgcttgaggtcaggagttaaacctgtgggatgattgcacctgtgaacagccactgcactccagcctgggcaacacagtgagacccaatctctaaaaagctttcctaggccgggtggtggctcatgcctgtaatcccagcactttgggaggccgaggtgggtggatcacttgaggccaggagtttgagaccagcctggccaacatggcaaaaccccatctctactaaaaccacaagaattagctgggtgtgatgttgcacgcctgtgatcccagctacttgggaggctgaggcacgagaatcacttgaatagggaggcagaggttgcagtgagctgagatcacaccactgcattccagcctgcacagcagagtgagaccctgtctccaaaaaaaaaaaaaaaaaaaaaaaaaacttctaagaaaatatgattaaaaaaagaaacaggctgggcaccgtggctcccgcctgtaatcccaacactttgggaggccaaagcaggaggatcacttaagtctagaagtttgagaccagcctaggcaatacagcaagacctcatcgctacaaaaaaataaaacattagccaggcatagtggcacatcctgtagtctaagctactcaggaatctgaagccggaggattgattgcctgagctggggaagttgaggctgcagttagctgtgatcataccaccgcactccaaattgggtgacagagtgagatcctgtctcaaaaaaaaaaaaaaaaaaagaaaaacaaaattgtaggccaggcgcagtggctcaagcctgtaatcccagcactttgggaggctgaggcgggcagatcacgaggtcaagagatacagatcatcatggccaacacggtgaaaccccgtctctactaaaaatacaaaaattagctggttgtggtggcgcagcgcctgtaggcccaactacttaggaggctgaggcaggagaatcgcttgaacctgggaagcggaggttgcagtgagcggagatcacgccactgcactccagcctggcgacagagcgagtctccgtctcaaataaataaataaataaataaaaataaaaagactattattttcagatcataaaaaaaaaaaagaaaaaattaggcagagtgcaggcatgcctgtaatcccagctctttgggaggcggaggcaggagaatcgcttgagtccaggagttcgagaccagcctgggcaacagaaccagagcccatctttacataaaaaaaaattaaacatgtagcttgcatgtatttctactagggcattctaggccagcgctggtttagaatgttagcccaataagaccaggtattttttttctgctcactgcccatacagtgattgacacacagtaggcgctcaatgacattttaatgaatgaatgagatgctgagccttcgggaactggcttgctcaaagagccagcaccgatgaagcgctgaccacgttccatgccccgcctcctcagcgcaccagagaaggaaactgaggcccggcaaggtgacgtcagctcctgcccaacggcacgtagtgcggaaacgtcggggccgggattcgaacccaggttctgtacccgtaaccccggcgcgctgacctttcctaccttaccgggcggcggcaggacagacaggtgcgggacacacggcgagcgctcaaccagaggcgccgctcctcagccaccgccttccgtcagcctccgagggccggaacccagttcgccccctccgcggccatcgctggctgcccgcgtctccgccggccgcggagcacttcgcaggcggcgccgaccggaagtcccgcctctcccgcgcgccccggagcgccgcgacagctacgccggccaatgagcagcgcgccgtggcggacgtcggccaatgggctcgcgcgcggggggggcgtgtccgggccgcgggccggagcgggtcgtgcgcgctgaggaggagccgctgccgccgtcgccgtcgccgccaccgccgccaccgctaccgaggccgagcggagccgttagcgccgcgccgccgccgcctcccgcccgccccggagcagccccgggcccgcccgcccgcatccaggtgaggcggtggggggccttcggcggcgcccgacggggtaggccgcggc

SEQ ID NO: 20597 - DNA, 2300 bp, Homo sapien
cccggccccttaccataagcgccatctgtcaggctccgcccactgtcttaaatcccactcactctgccctgcccctgactcggagccatatagcaagccccgcccatagccataagccacgcccacccagccctgcccctgggctctaagtgtcatttatctagtcacgtccccggctagaagccacacccaccaggcccggccccacctctaagccccactcacccggccatgtggtttgggacagggaagtaggctaggggccgccgcctctgggctcccagtggaaggggagaaatgagaaaggagtttaggatgtgataaatacccacagaggtcagatgtagctatggatgcaggcgataaaaagtttaaagcaatcagctgtgcggcctctgcagcgctcctttcgccctccctaatcttcacctcgtgtctcccccagtccctgtgtcctggctgggtcctgctgccccagggaaagaagacatgccttctcccatcctggctaacatggtgaaaccccgtctctactaaaaatacaaaaaattagccaggcgtggtggcgggagcctgtagtcccagctactcgggaggctgaggcaggagaatggcgtgaacccgggagacggagcttgcagtgagccgagacagcgccaccgcactccagcctgggcaaaagagcaagactccgtctcagaagaaaaaaaaaaaagacatgccttctcggtgaatgttgctttgcttcctgagggcatggctacccggggctcctggcttttcttccaaaaacaaaacatttcttccattttttctttttcttttgtttttttttttttttttttttttgagacagagtttcactcttgtcgcccaggctggaatgcagtggcccaatctcggctcactgcaacctccgcctcccgggttcaagcgattctcctgcctcagcctcctgagtagctggaattacaggtgcccccccaccacactcggctaatttttgtaattttagtagagatggggttttgccatgttggccaggctggtctcgaactcctgacctcagaggatccgcctgcctcggcctcccaaagtgctggtattacaggtgtgagccactgtgtccggccaccgtttttttttccattttttgagacagggtcttgctctgttgcccaggctggagtgcagtggcatgatcacagctcactgcagcctcaacctccaaggctcaagcaatcctcacacctcagcctcctgagtggctgggactacaggtatgcactactacgtcaggctaattttttaaaaaatttttgtagtgacgcaggtctctctatattgcccggggtggtcttgagctcctgggctcaagcaatcctctggcctcggcctcccaaagtgttgggcttacagacatgagccaccatgcctggcctagagagtttctttcttgttggggttgttcaccggtgggaggtgcaccattgtgccgtgctgactatattcatagagttatgtaaccatcactctcatctaatttcagaacaaaaggaaacccataccctctcacagtcagtccttcattctcccctccccccatcctgtggccaccgctaatttactttctgtttctatggatttgcctgtgatcacaaccagaggatttctgtgacatgctaagttacctaaccatggtgtggaaggagagggaaatggagtgaagttggggacccaccagggaacaggtggcttgagggcggggggagcatgaaggtaagggcttgtttgggggctcaaggcagtctgagccttgttcgcaggcagccagtgtccaccaggtgtgtgcaggtgagggaaacaggggaaaaggccctttctggagacagtaggggtgctggctgggaggcctgggatggggagtggggaggcaagggggcctgtgggtcgaggttggagcttgctgtagaagagggagaattccagaggctgagagtgcaggtggagaggaggaggaagggaggagggcgggcagggggtggctgggtggggctctgtctataaagagtgaagctcagcgtgttggtcctgcagatgggacagcttggcctacagcccggcgggcatcagctcccttgacccagtggatatcggtgagtcttttccttgaacatgactgagatgaacagcttttccctccagcacaacttgttcctactttatacaacctccttcccttgccatatgcctggggcttaagaggggggatgttcccagtacccactcccctcctcttc

SEQ ID NO: 20598 - DNA, 2300 bp, Homo sapien
ctggggtctagtgtttgggggtgttggtcctgagagccgtctggtaaaccctctctccctctctctatgtctcagatgtgaatgaatgtgatgggccccaccgctgccagcatggctgtcagaaccagctagggggctaccgctgcagctgcccccagggtttcacccagcactcccagtgggcccagtgtgtgggtgagtgaaaagggctgggaagaagctgggccctccaccagaatctgctcagagcaggcgactaacagacgccaccctgcaagatgatgtgacaagcacaattatctaaagattgaacaggccagcccagaaggtagtgagttccccactgctggggagtcaaggtgcagcagaataagcatcaaaaagtgtctgagttcattccttagggcatggtggcctggaggactcagttgagaaagattctgagacctgaagtctgcaattttgtgatcacagggaaagagtgctgtgattgattagtgatgtctgccacgagtgtgattagtgatgtctgctatggatgctgcaaggggcaatggaggtgtgcatgctatgtcattgccatagctgttgcagaggccctccatttggggggctagccttctgccccccaaccttcccccatcttctggctgctctaggacctcctagcagcctctttcactgctcttttcattcctccactgcagtgcagctttcaccctctaccattttcaggcccacttgctctctcctgagacctctcctcggcctccatcctctacctccactgctctgggcaccacagtctgccccttcaggctcctggacactctctcctgtggcctttgtgatgtggctatccctgctctcccactgcctcacaggcactgccttctctgccccctccttttgtctgtcatggtgggtctttagctaagttcttcttgggcttcccacaccacacgaccccaccccccaggcaagctgcttgtcccctggggatcttggggatcccacagaccattggcctttgctggcaactcttcctcaacttgtttcctccccccgtactgactcattcattctttccccaactgtttgccaaggacctgcctttcactaggccctgagctcagatgcagaagtgagctgaaaaaccatttctgccttgagtttttcagtccagcaaaggaaacagagattaattagacccctaactaggttctcaacagaggaccattttacccccatagtacattttgaagtgtctgcgagacatttttgatcatcacaattgggatccgccatggtagttcactcttgtgggatattgaggtagggggatcatttgaggccaggagttcaagaccagcctaggcaacatagcaagaccccccatctctacaaaaagttaaaagattagccaggcatgttggtgcacacctgtagtcccagctactcaggaggctgaggcaggaggatcccttgagcccaggacgtcaaggctgcagtgcactatggttgcaccactgcactccagcctgggcaacagagtgagactcccaactccaaacagacaattggaggcggataggttttcctggtgtcaagcgggtggaagccagggatgctgttcaatgtcccacagtgcaaggaggcctcctccctagagaatgatctggccccaagtgtcaatagcactgagggtgagaaagcttgttctagatcatcccacattttggggtttaggggaagtgttgagagatgttgtgaaggagaaccacagggtttggggcagcggggctatggggccgatctagtctcagggctcactgccagcttgctgaagagtttggcattggacttgggctctgaacatacagcattccaggtggagggctctgggggtgtgaaggctgcactgccccacctctgcgtcctccctctcctcctcctttcctcccacagatgagaatgagtgtgccctgtcgccccccacctgcgggagcgcctcctgtcgcaacactcttggtggcttccgctgcgtctgcccctctggctttgactttgatcaggccctcgggggctgccaggaggtggatgagtgcgccggacggcgtggcccctgtagctacagctgtgccaacacgcctggtggcttcctgtgcggctgtcctcaaggctacttccgggctgggcaagggtgagaggctggagtggggcaagcagactccatgccccgcaagcgtccatgcacgcacgcacacacacacacacacacacacacacacacacacacg

SEQ ID NO: 20599 - DNA, 2300 bp, Homo sapien
tggccggggctgggggccccgctgcgagctctgtcccctgcccggcacctctgcctacaggaagctgtgcccccatggctcaggctacactgctgagggccgaggtgggtgcccatgccctcaggacccccagggaggcaagaaacgggggagtttgctcagggtcatgtgtctgtactgcagcaggtgctggaatgtgtgagccacactgtgtgtgtgtgtgtgtgtgtgtgtgtgtgtgtgtgtctttgtgctagcagatatgagaaccagtacgtgtgcaccatatgcatggaagaactcggggggttgagggagcagttgtgtgagccaatgtgtgtgtatgtgttctgagacagagtctcactttgacacccaggctggagtgcagtggtgcaatctcagctcactgcaacctctgcctcccagtagcatacctgtcatcccagcactttgggaggctgaagaaggaggattgcttaagcccaggaatttgaggctgcaatgagctaagatagtgccactgcactccagcctgggtgatagagcaagacctcgtctccaaaagcaataaaaataggccgggcacagtggctcacacttgtaatcccagcactttgggaggctgaggcggccggatcacctgaggtcaggagtttgagaccaccctggtcaacatggtgaaacctcatctctactaaaaatacaaaaaattagctggatttggtggcgtgtgtctgtaatcccagttactcgggaggctgaggcaggagaatcccttgaatccgggaggcagagcttgcagtgagacgagatcacgccattgcactccagcctgggcaacagagagaaactctgtcccaaaaaaataaataaataaaaataaaaagcaagagggccttaacagacccaaaggatctctttggggccgtgggagaggctggctctcccatggccagtaaagatgaggttttgccatgctggccaggctggtctcgaactcctggcctcaagtgatccgcccacctcagcctcccaaaatgctgggattacaggcatgagccaccgcgcccggcccagtgtgtgttctttgtgagtgagagctcgttccggactgcgtgggagctggtgtgtgtctgtgtgtgtcagctgggtgagaagtatacaccatgttcatctgtgaagtagaaggcagtgagagggagccagcggcctgtgtgttgtggacttgggtgagtgtacaagggcaggtatgtgagtgtctgcgtgtgagcgagcataaggacatcagtgcgtctcactgagtgtgtcactgatagtgagatgggttatccatgtgaccagcagtggcatcaacaggactggggagggccgcggtggctcacgcctgtaatcccagcactttgggaggctgaggcgggcagatcacgaggtcaggagattgagaccatcctggctgacacggtgaaaccctgtctctattaaaaatacaaaaaattagccgggcgtggtggcaggtgcctgtagtcccagctacttgggaggctgaggcaggagaatggcgtgaacccgggaggcggagcttgcagtgagcagagatcgtgtcactgcactccagcctgggcgacagagcgagactctgtctcaaaaaaaaaaaaaaagaaaaaatagtaggactggggaggaaatggctttttgggggtgtggctggggggagactcgggagtccctgagtgttggcgtgtgttcccgtgtttctgcaggagcatctaggtgtgtggctagtgtatcatgttgcatgcactgtgtgtctctgttctgcatgttggtgcactgaggaggtgtcgctgttgaggctggggaggggtgggtgtgagtccccttccctggaagcttcatgggcgtgtcctgcgggctcaggtgtcatccgcagcctgaggatggggtccacgtgggctggggtgcagtggccggtgtggaagggaggctggactttcctccgaggagacggctgctgggcagagagaaggagacattcctcggtggaggcgcgaagcagccagccagccccatttgcaccctactttttcccagatgtagatgaatgccgtatgcttgctcacctgtgtgctcatggggagtgcatcaacagccttggctccttccgctgccactgtcaggccgggtacacaccggatgctactgctactacctgcctgggtgagcccagccctctgcacctgcacccttggcccagcctggccaccttctgtgcagcccctgaactcaacttccctgag

SEQ ID NO: 20600 - DNA, 2300 bp, Homo sapien
ctcccactcctcacctctttctggtgtgagcggatgtattttggtcacagcaagattttcttgagtgtgtgctggtttgtggccacaacagcctcaaccagattgcagggctagtgggtcccttcgctcagcatcgctggaagtcccagggggctgggctgcccctgatggcagatgccttctgcagacattgatgagtgtggggagatccccgccatctgtgccaatggcatctgcataaaccagatcgggagtttccgctgcgagtgccccgcaggcttcaactacaacagcatcctgctggcttgtgaaggtgccacctctccctgttcccagccctggggcctgggtgggatgcatgtccgccactgtgcaatctgggcgagtaactaaaactctgtaagcctccatttccctgtatgtataatgggctaacacctttccaagggcctccatctcatataaccacccttactccagctctggctgcttccagagaaaccacctgctccgaagcagtggactgggtttcacgtttgattctgtcaggatgggcttctctgtcacccccacctcatttgctgtattttcccagatgtcgatgagtgtggcagcagggagagtccctgccagcagaatgctgactgcatcaacatccccggtagctaccgctgcaagtgcacccgagggtacaaactgtcgccaggcggggcttgtgtgggtgagcagggtccctgggaggaggtgagggagctgggctctgtcacccatggggacttagatggggtatggctctgtccaggtctttctccttttctatactattaggggggtgggggatgtattgagagtgtctgttaataggatgtgatagaggtgagagctcaggtccatgcagacagcctgacgcccctggtggaagtttgagtggggaacttcaaggcagattctggcttccccattgcagtagggagagctcaggcaaacactgtggtaggagccctgggaacaccatgctctctgcacccccaggacggaatgagtgtcgggagatcccgaatgtctgtagccatggtgactgcatggacacagaaggcagctacatgtgtctgtgtcaccgtggattccaggcctctgcagaccagaccctgtgcatgggtgagacccttatcttccccctccttttcaagccaggctgcctggggtctaaacctcccctgggatggaagtggtgtttctgtccatcctagttcacaaagagatccaagtttgggtcctgagattaagatcttgggtaaatggttgatctgcctccctgtgcctcagttttcccatctgtaaaatgggggtgatatatcataccaggagtacttcccagccatcaccgccaggggtcactgcccagtcatctaggcagggctaggtgcaggggaggagtgctaggtccagctggcctctcactccccaagttccccaatgccctgggtgagctgggttgggctctcggctttgcttctgcagacattgacgagtgtgaccggcagccttgtggaaatgggacctgcaagaacatcattggctcctacaactgcctctgcttccctggctttgtggtgacacacaatggggattgtgtgggtgagtcggctcaggtggcaggctggccacaaagtgggttctcagaatctaaggaagtgaatctagaaattggccacagaaagatgcccagaaagtccccgattatttagaaattaaataacatactcctaaataatccataggtcaaataaatcataaggaaaattagaaaatattttgaagtaaaagaaaatgaaaatgaaagcataacatatgaaaatacataggatgcagctaagggggcacttagaggcaaattcatagcattacatggttatattagaaaatatcagcaactacctcataagataggtagaaggctaatatacatagtctatacatgagtgctcaagttgaagccaatgctgtcagctcaactcagttgtggacagaagtacaaggaaggtttgatcccttcaagttttgtgggtgaactggcctgcccatctcccctctacagattttgatgagtgtactaccctggtggggcaggtgtgccgatttggccattgcctcaacacagctggttccttccactgcctctgccaggatggctttgagctcacagctgatgggaagaactgtgtgggtgagtctgcctatggtgctcggaggcatctcagccagcccctgctccatgtacaccacagtttggtacttct

SEQ ID NO: 20601 - DNA, 2300 bp, Homo sapien
ggggcattttacgtaaatgatgtaatgcttgacatgttggttacaacttgcttttttcgtccaaattgtgtcttgaagaaccggccaggttactatctgctgtgcagcctctctctttgccctgcctaaaagtgtttcatggtgcagatacatcccaggtcccccagtgatgggaacttaggtaatttccagtcccccactgatggacacttaggttgtttcagatctccttttgatggacacttggattgtttccagtcccctattgatagataggtggattgtttccagtcccctttggatggacacttatattgtttataacagttttattgagagataattcacataccacacacttcacccatttaaagtgccctgtttagtggttttgaatacattcacagagttatgcaaccatcacctcagtataagtttagaactcattttcatcacacaaaaagaacattttcatcacagtcccccattgatggacacttagtatgtttccagtcccccactgatggatatttaggttgtttccagtcccccactgatggacacttagtttgttcccagtcccccactgatggacacttagtttgtttccagtcccccactgatggacacttagtttgtttccagtcccccactgatggacacttagtttgtttccagtcccccactgatgcctgtttaggttgtttcccgtcccctattgatgggcacttaggttatttccagtcccccattgattgacacttaggttgtttcctgtcccccattgattgacacttagtttgtttccagtcccctactgatggacacttatattgttttcagtcccccattgatggacacttaggttctttcaagtccccttttgatggacacttaggttgtttccagtcccctactgatggacatttagattgtttatatataacagctttattgagatataattcacataccacacacttcacccatttaaagtgccctctttagtggttttgagtacattcacagtgttacacaaccatcgcctcaatctaagtttaaaacattttcatcacacaaaagtaaaccctgtgcctattagcagtctctccctttagcccctcccttctgcccctggcaaccacaaatcgactttctgtctctattgatttgctacttctggacatttcctttaaatggagtcatgcaatattgttctttcatgtctggcttctcttagcagaatgattttaggtttcaaccacattgtcacatgttacagggctttactccttaataaggctgaagaatattccatggtacagacatcccatattttgctctgcattcatcagttgatgtttccagtttcttgctaaatagcatctcataccgctgtcctgcttacgcttaaggccatttctttccagcagggttgctgggtcacaggaagtgtgtatttttaattgagaaaaacacacacagtctctctgctcttgtctttcctcccactcctcacctctttctggtgtgagcggatgtattttggtcacagcaagattttcttgagtgtgtgctggtttgtggccacaacagcctcaaccagattgcagggctagtgggtcccttcgctcagcatcgctggaagtcccagggggctgggctgcccctgatggcagatgccttctgcagacattgatgagtgtggggagatccccgccatctgtgccaatggcatctgcataaaccagatcgggagtttccgctgcgagtgccccgcaggcttcaactacaacagcatcctgctggcttgtgaaggtgccacctctccctgttcccagccctggggcctgggtgggatgcatgtccgccactgtgcaatctgggcgagtaactaaaactctgtaagcctccatttccctgtatgtataatgggctaacacctttccaagggcctccatctcatataaccacccttactccagctctggctgcttccagagaaaccacctgctccgaagcagtggactgggtttcacgtttgattctgtcaggatgggcttctctgtcacccccacctcatttgctgtattttcccagatgtcgatgagtgtggcagcagggagagtccctgccagcagaatgctgactgcatcaacatccccggtagctaccgctgcaagtgcacccgagggtacaaactgtcgccaggcggggcttgtgtgggtgagcagggtccctgggaggaggtgagggagctgggctctgtcacccatggggacttagatggggtatggctc

SEQ ID NO: 20602 - DNA, 2300 bp, Homo sapien
ccgagtggcagctctgggctgggaacgcggcggggtcggcctctcggctttgcgttcccgccccgggtccccggcgccgcaggagcccgccctgcagcgctgagtcccgcgcgtccgcctgccgtgcccgcctccacgcgcgccgcctcgcaggtaggtgaaggcgcggggccagcggcggggcgagatcgcgggcgctgaagggtggagaaggcgggggcgggggggccggcagggggagggggagaggattcctttgttcgcagccgggcagccccgggcccagccccctcccctctccgccttctagtggcgcccgccgcagtggggagtgggggcgcggggacccggcgggaggggctcggccggggcgcggggcccctgaccccacaggtgagggcggagccaagcgtggtcgcggccgggggccctgccgggtggagatcgcgccccgcgggctccgggggcgccccctccccgtcggcgaagcttggtatccctcgctgtttggccctcagcctccacaccccgtgccgggcgcgccttctctgctcattcattccacaaactccagggtgtggctcgcagaagcagcggtgtgtaggggggaccgaggcaaatcaggccagagactccccccacctaattcccccacccgacccgaggcagggggctggggcggagggagtgggggaggagggcttgcaagccccgaggctgcttggagtccacggagcctcagagtgcggactgacccggacaactgagaagaaaaagagggcgcccctctccagccagccaaccctccaacgttgacaggggtctctcccttctccggggcctttggacaaccaggttggcccagagaggggcgtggccaagaccacacagcagggctccccgcccattctccacctagggccggttcctttcctccctggaacctgaatggaacaggaaggccacttggtctggcttctctccctcaagtattttgcctccaccctccaaacggtcgtctcctgtcccggtcttctccctcccgtccttcatggcccaggaaagacccagccaaggggggcaggagcgagttccgttcctgatcttcttcccctccttcttctcttcgtgggcttaagctccggcttagcccctcactcatggtgtgatggccttagtttgtgcatctgtgaaatgggcacagaagcggtcccttccctgctgggcacagggttactctctgcattgggaagttccagcccctgcctgggccccctgcccagggaggcatccagccctgacctgggagcagtgaacagtcagaggaggcttcctggaggaggtgtgatgttagaaaagggtcttgcggctaagggtgcacagcccaggcaagaccggcgtgggatgtggaggcgaggggacacagggccaggtggggccaggcattgcaggagtgggggtatctgtgtcacagagggacagtggggttgttgccttccacgacttaccatcttcctcctaccctggacgctctctgggctccaccgtcccagctagaactttgggaatctcctcaatgccctccacctcccacgacatgagcctcccattcctctcctctctctcccatctggacagcccccagccttctgacaccctgtttcccccccgggaccctgctgcccttccccacaccacctaacatgcatttctgaccttgctcctcccactcaaagcttttcaagggctcttcattgtccttgacgaatgagcaaaagctgcatgacactgctatgcccactcctgcaacgcctggccccacctggccccacctggccctctctcccctcccttccacttcccactcccgtcttgccttggctgtgcaccctcagccccaagacccttctctaacatcacacctcctccaggaagcctcctctgactgttcaccgcttcccggttggggctggatgcctccttgggctcccagaggccccggggctgccccatttggcaaccaccctgccctcctcgttgtgttgggtcccccatggctagggtggggggctcatctagggctgactctgcttcctctccgcagcctccaggggacacgccatgactctggagggtctgtatttggcaaggggccccctggcccggctcctgctggcctggtcggccctgttgtgcatggcaggtggccaaggccgctgggacggggccttggaggctgcaggtcctggacgtgtgcggaggcggggcagcccaggcatcttgcaggggtgcgtggtacc

SEQ ID NO: 20603 - DNA, 2300 bp, Homo sapien
tactcggaaggctgaagcaggagaattgcttgaacctgggaggtggaggttgtagtgagccaagatcgtgccattgcactccagcctgggtgacagggcaagactttgtctcaaaaaacaaacaaaacaaaacataaacaaaatcctctccctccctgcaaattgtgagtttaccctattgaactcccaaagctgacttgctgaatatactcccaccatagcacttccggaatggagacagggtctccaatttttggagatagggtcttgctcagttgcccaggctggagtgcagtggcacaatcataactcactgcagcctcaacctcctaggctgaagcagtcctcctgcctcagcctcctgagtagctgggactatagatgcatgccaccaggcctggctaattctttttaattttttttttttttttttttttagagatggggtctcactatgttacccaggttagtctcgaactcctggtttcaagcccactgggcttacttatttattagattccggaagtactgtggtggggggatattcagcacaatcagctttgggagttcaatagagtaaactcacaatttgcggatagggagggaatttttgaactggactttgacagatgcgtaggagtttgctggatggagtaacagcttcaggcccaacgcacagcttctgacagatccccatgttaagggtctattctcaaaggtatgaaggtagtggaaaagcctagaaatttttgtttggagtactgacaacagatagggagccaaaattcttgtctggtccctttggtaggtggacaaacaggttcaaagagatttgaaagtttacaccgtttgaattgttaacctcttcattttgagaaccagatgaaaaacctgggcccttctccctgggaaatacagctttgcccaatgttttgtcaacatatttaggggcccctgatctcagcctagttaagaatccaggctccaagagccaggtgagtttccaacgtcactctcgcaattctccttgctcgagggagggggtggcggcttgggaggccctgagagggccgcccaggtgagtcccgggacttctctgcccaggctgtcgtccaggccctccaaaagtcagagccccacctccaccttagtctcgatccgaaaacgcggccccggcagcccctactaggcgcccccagcccgccctcacatccctccagtccatcggagtttttcactcggagccccggaccctcccccgagccgcagcctctctccccgccccggatcggagccccccgtccccgccccgggagctaagaggtgcaaacgcgccctcctccaactcctcccgcccccaactcccccccgagtggcagctctgggctgggaacgcggcggggtcggcctctcggctttgcgttcccgccccgggtccccggcgccgcaggagcccgccctgcagcgctgagtcccgcgcgtccgcctgccgtgcccgcctccacgcgcgccgcctcgcaggtaggtgaaggcgcggggccagcggcggggcgagatcgcgggcgctgaagggtggagaaggcgggggcgggggggccggcagggggagggggagaggattcctttgttcgcagccgggcagccccgggcccagccccctcccctctccgccttctagtggcgcccgccgcagtggggagtgggggcgcggggacccggcgggaggggctcggccggggcgcggggcccctgaccccacaggtgagggcggagccaagcgtggtcgcggccgggggccctgccgggtggagatcgcgccccgcgggctccgggggcgccccctccccgtcggcgaagcttggtatccctcgctgtttggccctcagcctccacaccccgtgccgggcgcgccttctctgctcattcattccacaaactccagggtgtggctcgcagaagcagcggtgtgtaggggggaccgaggcaaatcaggccagagactccccccacctaattcccccacccgacccgaggcagggggctggggcggagggagtgggggaggagggcttgcaagccccgaggctgcttggagtccacggagcctcagagtgcggactgacccggacaactgagaagaaaaagagggcgcccctctccagccagccaaccctccaacgttgacaggggtctctcccttctccggggcctttggacaaccaggttggcccagagaggggcgtggccaagaccacacagcagggctccccgcccattctccacctagggccggttccttt

SEQ ID NO: 20604 - DNA, 2300 bp, Homo sapien
gagacttctaggactgagtcgctccctggcccacagttcttccaggaaagccctcctccagacttagccatggcaacagtggctgtgcagtgtccctgggatgggacaatctctccccaccttttgcacctatgctgggctgcttctagggcacccggtgcttgtccccgtgcccatgtaagattcatttgttgcagaacaaatctgggtggaccttggcagaggagcctggaaagaggtgtccaaggtggccggggaaactggtttgtccacaatagcccctgggcccaccctccaacaggaaccccacccccctgtctctgctgggccacctccatcctggggttccctccccagtccaccctccccatgccccagcaccccacctgacccttctcacagggtccacgggcccctcccttggccaggatgactggatcttgtccctgaagtcggcgtctgtcccatgctccccgagcccagccctggggccctcaatgctccccggacacagtctaagacctggaagtggagccttgggagaacctcccctttctgtgagtccaccgtgtctcccctcagaggtggggggggagcctgctgagggctcctcggtgcttctagcctcttcttatgtttcctgctttcctcttgctccctccccttctcctctctcctaaagttccaacctcactccatccaggcatgtttgttctaagttctctccttctccaggcctttgcctgttctgtttcctccagcaaactcctatgcaactgtcaaaacctacttcaaaaatccccttctgggccagactcggtggctcacgcctgtaatctcagcactttgggaggccgaggcaggtggatcacgatgttaggagttcgagaccagcctggccaacatggtgaatccccgtctctactaaagatacaaaaaatttaccgggcatgatggcacaagcccgtaatcccagctactcggaaggctgaagcaggagaattgcttgaacctgggaggtggaggttgtagtgagccaagatcgtgccattgcactccagcctgggtgacagggcaagactttgtctcaaaaaacaaacaaaacaaaacataaacaaaatcctctccctccctgcaaattgtgagtttaccctattgaactcccaaagctgacttgctgaatatactcccaccatagcacttccggaatggagacagggtctccaatttttggagatagggtcttgctcagttgcccaggctggagtgcagtggcacaatcataactcactgcagcctcaacctcctaggctgaagcagtcctcctgcctcagcctcctgagtagctgggactatagatgcatgccaccaggcctggctaattctttttaattttttttttttttttttttttagagatggggtctcactatgttacccaggttagtctcgaactcctggtttcaagcccactgggcttacttatttattagattccggaagtactgtggtggggggatattcagcacaatcagctttgggagttcaatagagtaaactcacaatttgcggatagggagggaatttttgaactggactttgacagatgcgtaggagtttgctggatggagtaacagcttcaggcccaacgcacagcttctgacagatccccatgttaagggtctattctcaaaggtatgaaggtagtggaaaagcctagaaatttttgtttggagtactgacaacagatagggagccaaaattcttgtctggtccctttggtaggtggacaaacaggttcaaagagatttgaaagtttacaccgtttgaattgttaacctcttcattttgagaaccagatgaaaaacctgggcccttctccctgggaaatacagctttgcccaatgttttgtcaacatatttaggggcccctgatctcagcctagttaagaatccaggctccaagagccaggtgagtttccaacgtcactctcgcaattctccttgctcgagggagggggtggcggcttgggaggccctgagagggccgcccaggtgagtcccgggacttctctgcccaggctgtcgtccaggccctccaaaagtcagagccccacctccaccttagtctcgatccgaaaacgcggccccggcagcccctactaggcgcccccagcccgccctcacatccctccagtccatcggagtttttcactcggagccccggaccctcccccgagccgcagcctctctccccgccccggatcggagccccccgtccccgccccgggagctaagag

SEQ ID NO: 20605 - DNA, 2300 bp, Homo sapien
gaaggggtttcgccatattggccaggctggtctcgaactcctgacctcacgtgatccacctgcctcggcctcccaaagtgctgggattacaggcatgagccaccacaccctgcctaccaaagtttttttatttaaaacaaaaaaaaattagccgggcatggtggcaggcatctatagtcctagctcctctggaggctgaggtgagaggactgcttgagccctggagtcccaggctgcaatgagctgggatcatgacattccattctagcctgggcaacagagtgagactcccatctttaacgaaattttttttgatagagtctcactctgttgtccaggctggagtgcagtggcacgatctccacgcactgcaacctctgcctcctgggttcacgtaattctactccaggctaatttttgtgtttttagtagagatgggattttgccacgttggccaggctggtctcaaactcctgacctcaggtgatccacccgcctcagcctcccaaagtgctgggattacaggtgtgagccaccgcacccagcctctaacagatttttttaaaaaaagaaaagagaaggtcgggcatgctggctcacgcctgtaatcccagcactttgggaagccaaggctggtggatcacgaggtcaggagtttgagatcagtctggccaacattgtgaaacccccgtctctccaaaaaaaaaaatatatatatatataaattagccgggtgttgtgggcgcctgtaatcctagctactcgggaggctgaggcaggagaatcgaatgaaaccaggatgcagaagttgcagtgagccgagatcatgccattgcagtccagcccgggccacaatgcaagactccgtctcaaaaaaaaaaaaagaaaaagaaaaaagaaaagagaaacagtgtagcagagggaaggccaagtgcaaacgccaggagtctgaacttggagggacaggttcttccacacttgcaacagaggtctcctgcctccctgaccgccccgccccccgcgcccctgtctgtgtgaggaaatcaaatctcagcttgcctagggccctgtggcagggaggccccaacttcaccccatgggtcttgggtctgctgagctgagtcagagaaaggtttattatccccattttacagaggcttattgtccaaaggcgaagccacttgcccagagtacatgcggtgggccagcgactatgaaaacccctggggctgtcctctgttcagggatcgcccaggctccctgcccctgcgcgctgctgagactgggtcattttcggttctaccaggcaagcgggggacccagcccccactgctgctgccctcagccaaaaccagggctgcgccaccacccacccggcctatctcccatcttatctccccagctctgtcgcctgacccctgcaccccaccaaatcgcagcctttgcccggtgccctcaccgcctcggttggcccccgcgcgcgcctcgggcgaacccctggactggccctccaacagggccccagactcggggtacccagggtggccgctgaggcctggagaaatctgggcctcccctgtgcaccatccaactgcgcgccccagaggctcagggcgccccgggagtgtgggggtgtggacagatgagcagagccagagcatctcgggcagaagaggggacctgggagggggccggggagacagacagcgaacaggggtgaagccggggccggacggagcgcgcagcggacaatactgggttcaaaggggagagataaggcgcagactagaaacgctaggctggacccgggccaggcgcgccgcggggcagagatgggcggagcgggaacgggggcgggggcgagaatgggggggcggggacgggggcggggatggggtgcgggtgcggggtcgggggccagggagaggcctagttgcgtcgaggggggcaagcgcctggaggacccggcgcccgctccaggccctgcccctccaagtcccccgccccgcgccaggccccgcctctccagggccccagccccgcgccaggccccaccgttccggggcgcgtgccccgcccaggccccgcccccacggccccgccccgggctccccccactcaagccttttttcccctgctgggggccgaggcccggccaggagcagagtccggctgcctggggcgggcggcgcgtgtctgcagctgctccgggtagcccgctaggcgcgccgtccccagccccgccgccggccctcggtgcgcccggccgcctgcacccccaggtaagcgagcaccccgcg

SEQ ID NO: 20606 - DNA, 2300 bp, Homo sapien
ccaaatcgcagcctttgcccggtgccctcaccgcctcggttggcccccgcgcgcgcctcgggcgaacccctggactggccctccaacagggccccagactcggggtacccagggtggccgctgaggcctggagaaatctgggcctcccctgtgcaccatccaactgcgcgccccagaggctcagggcgccccgggagtgtgggggtgtggacagatgagcagagccagagcatctcgggcagaagaggggacctgggagggggccggggagacagacagcgaacaggggtgaagccggggccggacggagcgcgcagcggacaatactgggttcaaaggggagagataaggcgcagactagaaacgctaggctggacccgggccaggcgcgccgcggggcagagatgggcggagcgggaacgggggcgggggcgagaatgggggggcggggacgggggcggggatggggtgcgggtgcggggtcgggggccagggagaggcctagttgcgtcgaggggggcaagcgcctggaggacccggcgcccgctccaggccctgcccctccaagtcccccgccccgcgccaggccccgcctctccagggccccagccccgcgccaggccccaccgttccggggcgcgtgccccgcccaggccccgcccccacggccccgccccgggctccccccactcaagccttttttcccctgctgggggccgaggcccggccaggagcagagtccggctgcctggggcgggcggcgcgtgtctgcagctgctccgggtagcccgctaggcgcgccgtccccagccccgccgccggccctcggtgcgcccggccgcctgcacccccaggtaagcgagcaccccgcgccgcgaacaccgccccgaacgccaccctcacggcggtccccggccccgcctccgcggccatggcggccccagcccggcccccactcgcagctgggctccagcccccatcaccccgccggggactgtccccctcggggcttcccatcatggccgtctccccgagctatccgcgctcccccacgagggccggggcgcaacgggtgcccgaggacgcggctgtgaaacgggctggagcgagtaggggcgatcctggcctcgtgacgcgggggaatccggatgtgtgagccgggggagcgccccgtttccccgacgtgccagggctggggacgcagctggggccctggcctcggagtccgcagcccggccgcgtagacggcttctgagaaccgcttaaacacgtcattccaagcccgagctaacccatcaggcggccggggtgaggtggaggtgcccaggcggggataatgtcatttggcctggttggaccagccagcgagggctttttaggcccagggcctagccgggagtgtgtgcggagcagaaaagaggccagcctggctgaaacgcggagagggagggtctgaggtggagagaggttggccggggcctgggaagcggcgaggagagtgtggaacccgttctcggggcggtggggaccagggaggcttggaacagcaggtgcatggcgtgatcggattgtgtcttaagaacatcccgtagccgctgtgggtaggagagatggggatacttggaagggggcttctggcttgacctggctggaaggtgtgataggaagtgggtgaactgaaaattcgctttggcagagtaacatcgtctaattctgtctgtttgcaagtggagcgtgggggaccgatgtttctcctgggtagttaggagtatatagaagaggctttcattgctgggttgggagacttgaggagaagctgctctgggggacacaggaaggtgggcagggggagaggctgttgtggtttgcaaaacctaccagatgggggaatgctcccatcgactccagtctgagctcaggcaaggtctcaggcatctgagcgcagaggccagggtgaccccactggggcgacctgggtctgttatatggggatagggttcctggactgtggaattgtctttgaagccctcggcctcccccagcctcaaatgggtctgccttccaggagcagctgctgtgaataaacacagaagtggagctgggggactgattagaagcctcattcagtgcacctgggccccagcaggcccagccaggcgtggaggaagaggcattgaggactttccttacctgtttttccagctcacccactgccagcagaggtactttgagcctggggtgtggggggtggggggcggccttggtcgttgaactggctgtagggcccccagggaaaggtt

SEQ ID NO: 20607 - DNA, 2300 bp, Homo sapien
tgatgggtagatggacagatttttggatcagtggatggatgatggctgggtggacagatgtttagatgggtggacagatggatgatggatggatgggtgaatgggtaggtggatggatgatgggcaggtggacagatgtttggatgagtggatggatgatgggtgggtggacagatggatggatgaatggatggggagatggatgaatgggtgggtagatggatgacagatggacgataggtggatggacaggtgtttggatggatggatggatgatgggtggatggatgaatgggtaggtggatagatgatgtttgtatgggttgatggatgatgggtgggtggacagatctttggatgggtgggtggatggatggtgggtgggcagatgtttggatgggtggacatatggatgatgggtagatggatgagtggataggtggatgatggataatgggtggatggacagatgttttgatgaattaacagatgaatgatgggtggatggacagatgtttggatgggtggatggatggatgatgggtagatgagtggataggtggatgatgaataatgggtggatagacagatgttttgatgggcgaacagatggatgatgggtagatggatgatgagtgggtggacagatgtttggatgggtggatggatgatgggtgggtggacagatgtttggatgggtggatggacgatgggtggatggatgatgggtgggtggacagatgtttggatgggtggatagagggatggatcggtagatagatggacagggggatgcgtggacagacgaatgaacgaacaaactttctgagtgggaaccactgtggtaggctggacccttggctcaagatctcagggaagggagcagctctttgggctcctcaagcaggctgggacacgctggccggagctgccccacctcgaccgccactccattatcaggcaagctcagttatgcagtaggctctcttaccctcttgctttgtgggctctgggatagcaagagacccccctgaaattcccacctagagaggagcctaccttccatagatggccaggaaaggaactctggattttttttttttttttttttttgagacagagtcttgctctgtcacccaggctgcagtgcagtggcctgatctctgctcactgcaacctccgcctcccgggttcaagcaattctctgcctcagcctcccgagtagctgggattacaggcgcacaccaccatgcctggctaatttttgtatttttagtagagacagggtttcaccatgttggccaggctggtcttgaattcctgacctcgtgatccacctgcctcggcctcccaaagtgctgggattacaggcagtgagccactgagcccggcctctggatttctttaaatccttcatctttgggggctgcttcagaggcagcttcctgcagtggaaagaaaccttcctggacgtttgaggactcaagttcttttttttgagacagtttttctctgttgcccaggctggagtgcagtggcatgatctcggctcactgcaacctcctcctcccgggttcaagcgattctcctgcctcagcctcctgagcaggtgggattataggcgcctgccaccacgcccggctaatttttgtatttttagtaaagatggagttttgccatgttggccaggctggtctcaaactcctgacctgaagtgatctgcccacctcagcctcccacagtgttgggattacaggcatgagccatggtgcccggccacgactcaagtttctgaccccaagcagccactcccttgacttctggctaccatcttggcatcagttaagtgcagagtaataactactattttgggctgtgttattattactcttgttaaagatcaatcggccaagcactttaggttgagaagcctgggtattactgtctctgtttttttgttttgttttgttttgtttttgagatggagtcttgttctgtcacccaggctgcagtgcagtggcacgatctcggctcactgcaacctccgcctcccaggttcaagtgattctcctgcctcagactcctgagtagctgggattacaggcatgtgccaccacgcccagctcatttttgtatttttagtagagacagggtttcaccatgttggtcaggctgctcttgaactcctggcctcgtgatccacccaccttggccttctaaagtgctgggattacaggcgtgagcaactgcgcccggcctactactctgttttacagatgaacttgaggttcagagaggtc

SEQ ID NO: 20608 - DNA, 2300 bp, Homo sapien
gccaaggcctttaacctcttccacctttacccaccagccatgagcctccaaccccccactccccactgccagcccctcctcggccttcaggcctaattgcacctacttgccacagggtccctgagctctatggatcccagaagagctgtggacaaaccggtgcctgcttccttccccgcccccgggagatctggcagcctccaggtgtggctctccacccaggcgcagacttccacagccctgacacctctgacctcccttcgctggactgcgggagtgtgtatccctctgcaaagtggacagtagagcacagcagtccccgcctcatagggtgtaagcctgacaggagttacagtgaccagtgactttctctcctggcctcagtttcctcacctgtaaacggggtatgctgggaatccctacctcaacatcctgagaaaaaagagactgtgtatagagttttgtcctgtaatcccagcactttgggaggctgaggcggacagaacacttgaggtcaggagttcgagaccagtctggccaacatggtgaaaccccatctctactaaaaatacaaaaattagccgggcatggtgacggtgcctgtagtcccaagctactcgggaggctgaggcatgagaattgcttaaacccgggaggcggagggtgcagtgagccaacattgcactgcactccagccagggcgacagagggagactcaaaaaaaaaaaaacaaaaacttttgtacttggttaacgtgaacgctgcctccttaaaaaaaaacaaacaaaaaaaaacccaggaacatttaacgtgaatgtcagggactttgggatgagtccagggacctagaagtgcggaatgcacaaaggagctgggaaagtgtgtgagcctgagcccagggctgcaagttgggagtgcctgagtgcacagggaggccactccaaccctccagctgcctctaggggtatcagagagggagcccgtccccactggccaccaatacctcttaggccagggcgaacacgtccacgggggtatattcaacttgtgaccccagtctctgcgagagcctgcagtagcatgggggggagagacctcgcgttctctaaggatggaggacaaaggaggagagactgggagggcagggacggttgcggaacggtcacaaggcctgggcgcgagggtttggaaggcaaaggtgcgagaggcaccaggtgacccgtcctgcgtgattagcggtcggacaatctgagcctgctaagagctttcctgaccacgctggtatgaagggcggcttggaggtgacaatgggggacgacagggcacagcaggtgtggagacggtgtgcagggccggagcaaaaccgttaaaggcaggtggagacaccctcctcccctcccccagcatggggtcttcctagcaccagtgcgcgccttcccacaagcgatgaagtccaagtccacgtgctgggggagtgtcatgaactgacgtgcggtgcagccagtgactaggcgttgtcggtgcgcggcggcggggcgaagcctcgcgaggggtgggagcccgcgctgcggggcgtcactcacctgcggcctgggcagaggtcggggtggaaagcgggctcgcggcggcctccaggcctagtccgaggccgagcagcagcagcagcgccaggcccagagcccctgttcgccacgctccaacctgcgccatccaaccgccgctcatgctgtccccacagcggcgccggccacgcgctgtccagaccgctctcttatccctgcgcacgcgcacgcgcggggttggggcggggcccaagcccctgagttctgcggcgcccgcggctacgcgtaccgtaaatgtcagaatagcagggaaaagagaattagaggcccgtccccactttccccagtgaccagatcagttgaaaggtatggagcccgcttgaagttagaaacttctggggatgggaaggaatttgttggtgttcatttgcattatttcccgttccaaatgaggactgctgcaaatgttactgcctcgtgatcttctttaatatggcagccacgcccctcaggcactccgcatttcctccctcatcccactgcttttgtggcgccgacaggtaatttattttatttacttattctggtttgttgtccgagtccccatagaatgctagctactggagggcagggatcttctgttgctcactgctttattctcaggatctgacacatagtgcttgactcatagtaggctcttagtaaacatttggtgagtaaatgaataaatgaaacgtc

SEQ ID NO: 20609 - DNA, 2300 bp, Homo sapien
gaggcatgagaattgcttaaacccgggaggcggagggtgcagtgagccaacattgcactgcactccagccagggcgacagagggagactcaaaaaaaaaaaaacaaaaacttttgtacttggttaacgtgaacgctgcctccttaaaaaaaaacaaacaaaaaaaaacccaggaacatttaacgtgaatgtcagggactttgggatgagtccagggacctagaagtgcggaatgcacaaaggagctgggaaagtgtgtgagcctgagcccagggctgcaagttgggagtgcctgagtgcacagggaggccactccaaccctccagctgcctctaggggtatcagagagggagcccgtccccactggccaccaatacctcttaggccagggcgaacacgtccacgggggtatattcaacttgtgaccccagtctctgcgagagcctgcagtagcatgggggggagagacctcgcgttctctaaggatggaggacaaaggaggagagactgggagggcagggacggttgcggaacggtcacaaggcctgggcgcgagggtttggaaggcaaaggtgcgagaggcaccaggtgacccgtcctgcgtgattagcggtcggacaatctgagcctgctaagagctttcctgaccacgctggtatgaagggcggcttggaggtgacaatgggggacgacagggcacagcaggtgtggagacggtgtgcagggccggagcaaaaccgttaaaggcaggtggagacaccctcctcccctcccccagcatggggtcttcctagcaccagtgcgcgccttcccacaagcgatgaagtccaagtccacgtgctgggggagtgtcatgaactgacgtgcggtgcagccagtgactaggcgttgtcggtgcgcggcggcggggcgaagcctcgcgaggggtgggagcccgcgctgcggggcgtcactcacctgcggcctgggcagaggtcggggtggaaagcgggctcgcggcggcctccaggcctagtccgaggccgagcagcagcagcagcgccaggcccagagcccctgttcgccacgctccaacctgcgccatccaaccgccgctcatgctgtccccacagcggcgccggccacgcgctgtccagaccgctctcttatccctgcgcacgcgcacgcgcggggttggggcggggcccaagcccctgagttctgcggcgcccgcggctacgcgtaccgtaaatgtcagaatagcagggaaaagagaattagaggcccgtccccactttccccagtgaccagatcagttgaaaggtatggagcccgcttgaagttagaaacttctggggatgggaaggaatttgttggtgttcatttgcattatttcccgttccaaatgaggactgctgcaaatgttactgcctcgtgatcttctttaatatggcagccacgcccctcaggcactccgcatttcctccctcatcccactgcttttgtggcgccgacaggtaatttattttatttacttattctggtttgttgtccgagtccccatagaatgctagctactggagggcagggatcttctgttgctcactgctttattctcaggatctgacacatagtgcttgactcatagtaggctcttagtaaacatttggtgagtaaatgaataaatgaaacgtccattctcggagtcgggttgcttgggggggaaaaaggaaaggaaatcaattaattaattaaatttaataataaaggccgggcgcggtgggtcacgtgtgtgatcccagcattttgggaagcagaggcgggcagatcgcttgagcccaggagttcgagatcagcctgggcaacacagcaagtccccgcccgcctcaagaaaaaagaaaattagctgggcatggtggctctaatttgtagtcccagctactcaggaggctgaggtgggagaatcacttggggctgcactccagcgtgggtgacagtgagaccccatttgttagaaaagttggccggcgcgctggctcacgcctgttaaccccagcactttgggaggccgaggcaggcggatcacgaggtcaggagttctaaaccagcctggccaacatagtaaaactcccgtctctaccaaaaatacaaaaattagccgggtgtggtaacatgctcctgtagtcccagctactagggaggctgagatgggagaatcgcttgaacccgggaggcggaggttgcagtgcgccgagaccacatcattgaactccagcctgggtgacagagtgagactctgtctcaaaaaaaaaaaaaagttgt

SEQ ID NO: 20610 - DNA, 2300 bp, Homo sapien
agccacagacttctcacttcttttttttttttgagacagagtttcgctcttgttgcccaggctagagtacaatggcgcgatcacggctcactataacctctgcctcctgggttcaagtgattctcttgcctcagcctcccgagtagctgggattacaggcgcctgccacaagcccagctaatttttgtatttttagtagagacggggtttcgccatgttggccaggctggtctcaaactcctgacctcaagtgatccgcccacctctgcctcccgaagtgttgggattacaggcgtgagccaccgcgcctggcctaacttccatctcttgagggctcccacagccacttctcacatgaaccttcctcagcaccttcccactgaggctcctgcttgaccatggtcaccctgcagctcaacggggaaggcagaggacagtaagggctgctcacagggaaggcaaacctagggcagatcaggaaaggcctccctgagccagatcccattatgctggggctgtgggataagaatgaattcgccccagaaggaaggcagctggttcctggggaggagacagaaatctgcaaagggagggtgtccaagtctggctgcaggagccacccagtgaccctacgcaggggagtgtcatggcttccccagggcacagccccagacccttcagcagctaaaaaagatcagctgtggaccaagagggtgctgagaccgccctgccctctggaaggggaaaggccacggctacaggcagcaggtaccagtgtcccagagtgggtcctacaaaggctaacaccttcctggagaaggtgggattctgcttggggcaaaaggatgaatcagattcagaaaggtcaggagggaaggaaagactaggcagggtgtgcagaggccacaaggagggcaagaccctaggcaaggcatgccgctgacggcatctgaaccaagttttatgaccacaacttttttttttttttgagacagagtctcactctgtcacccaggctggagttcaatgatgtggtctcggcgcactgcaacctccgcctcccgggttcaagcgattctcccatctcagcctccctagtagctgggactacaggagcatgttaccacacccggctaatttttgtatttttggtagagacgggagttttactatgttggccaggctggtttagaactcctgacctcgtgatccgcctgcctcggcctcccaaagtgctggggttaacaggcgtgagccagcgcgccggccaacttttctaacaaatggggtctcactgtcacccacgctggagtgcagccccaagtgattctcccacctcagcctcctgagtagctgggactacaaattagagccaccatgcccagctaattttcttttttcttgaggcgggcggggacttgctgtgttgcccaggctgatctcgaactcctgggctcaagcgatctgcccgcctctgcttcccaaaatgctgggatcacacacgtgacccaccgcgcccggcctttattattaaatttaattaattaattgatttcctttcctttttcccccccaagcaacccgactccgagaatggacgtttcatttattcatttactcaccaaatgtttactaagagcctactatgagtcaagcactatgtgtcagatcctgagaataaagcagtgagcaacagaagatccctgccctccagtagctagcattctatggggactcggacaacaaaccagaataagtaaataaaataaattacctgtcggcgccacaaaagcagtgggatgagggaggaaatgcggagtgcctgaggggcgtggctgccatattaaagaagatcacgaggcagtaacatttgcagcagtcctcatttggaacgggaaataatgcaaatgaacaccaacaaattccttcccatccccagaagtttctaacttcaagcgggctccatacctttcaactgatctggtcactggggaaagtggggacgggcctctaattctcttttccctgctattctgacatttacggtacgcgtagccgcgggcgccgcagaactcaggggcttgggccccgccccaaccccgcgcgtgcgcgtgcgcagggataagagagcggtctggacagcgcgtggccggcgccgctgtggggacagcatgagcggcggttggatggcgcaggttggagcgtggcgaacaggggctctgggcctggcgctgctgctgctgctcggcctcggactaggcctggaggccgccgcgagcccgctttccaccccgacctct

SEQ ID NO: 20611 - DNA, 2300 bp, Homo sapien
gccatttcctcaactggcccacaactaccctgatagaaagccaactaggggggtcgggggttgggggggagagagcatcaggaagaatagctaatggatgctgggcttaatacctaagtgataggttgatctttgatctttgcagcaaactaccatggcacgtttacctttgtaacaaaactgcaaatgtaccccagaacttaacgttaaagttgaaaacaagccgggcgcagtggctcacacctgtaatcccagcactttgggaggccgaggcaggcggattatgaagtcaggagttcgagaccagactggccaacatggtgaaaccccgtttctactaaaaatacaaaaaattagtcaggcgtggtggcacatgcctgtaatcccagctacttgggaggctgaggcaggagaatcgcttgaacccgggagatggagattgcagtgagctgagattgtgccattgcactccagcctgggcaataagagcaaaactccgtctcaaaaaaaaaaaaaaaaaaaagttgaaaacaaagtttgatacttctaatatttggaattagtcacaacatataggcatttacataaatttcattattttaatgctatttttcttcctttcattataatcctcaatgactgccttacctctgcctaccctttgacttcatagattataccattatccctttccctcaatgggttccatccatactggcctccttccactcaggctctgtccagcctgacactcttagcccttcctgttccctctgctcagaatgttttttcttttttatttttttgagacagagtgttgttctgtcacccaggctggagtgcagtggtgcgatctcagctcactgcaatatccacctcctgtgttcaagcgattctcctgcctcaacctcccgagtagctgggactacccgcgcgcgccaccacgcccggctaatttttgtatttctagtagagagggggttttactgtgtttcactgtgttggccaggctggtctcaaactcctgacctcgtgatccgcctgcctcagcctccccaagtgctgggatcacaagcgtgagccaccgcgcccggtcagaatgttttttcaataattattctttgaatgggtccttcccatcattcaggggactcaactgtcaatttccaaagaaagatctttcccaatcatctgactttacgtagccaccctccagcttccacttattttgttttgtcttcaaagcattccagaacaatactacctgctgtgtttgtttccctactatgcttctccctagaatgtggcgtccatgaaagaatgtggataagaactttcctggttcacaaagttaaacccaaggctgaggtcatacatgacgggggcttgtaaatatcaactaatattttaatataaatgagtctgaaatcaggacacttctgggttcaagtccccgctgccactttttagcttctgagtgacttgaggcaaatgatttcgcctctctggacctcttttttcatctgtagcttggggataacactgactaacatggccacgctgagcactgcaaatctagcctgattgccagtcagaatgcacgcccggcctcgctgtttcaggagggctgtcctccggagttcagcaaggttaaaggcaaacctctgcctccacagcctggcaggggactggtggcaggatgtcagccctccgtttcaggggtctaaaggaacacagatttcgtttttggtggagaaaggacagagccagaggctgggcagcgagcggggcctgctcaccgcttggagatctcctggtagcgtagctgcagcttcccctgcaggtcatgctgtgggaagaggagaggagaggtcggcctgcaaggcaccccaggagagaggaaaggagagggcaagggaccagggatggtccggggatgcgcattttaagggaaggcaggggatgaacactcggggaaacggatgtgggtcctgcaggtgaagagcaaagccagagtccgggcccacagatccaaggctaagaaggtcggggactggggaaatcccaggcctgagtggttcccaggccaggagagggtcccgggctgaaggggtgactagctgggggttcccagggagattcggggagagcgaagggtcccggcttaggagggaggtgaggagcaggagcgggtcccggacacacggagcccgaagccccccatggtgcagccctgtccgccccgcgcaccccggacgcccagttccgcagccgctggatgagacgggtggcggacgcca

SEQ ID NO: 20612 - DNA, 2300 bp, Homo sapien
cctcccaggttcaagaaattctcctgcctcagcctcccaagtagctgggattacaacagctgtgagccatcgcgcctggcacaacttacaattttttgacttcatgatagcataaaagcaatgtgtgcttagtaaaaaccacacttcagcagagtattcaataaattacataagacattcaatactttattaaaacaggcttcgtgttagacgagtttccccaactacaggctaaggcgttctgaacaagcttaagatggaccatgctaagctgtgatgtttgggagattaggtgtattaaacacatttcaacttgcaatactttcaacctatgatgtactcaccggaatgtaacccattgtaaactgaggaacacctgtactcaccccactggaagggatgtgggaggaaggtcaagcgcctcttccaggtcagaaggggcagaggttggatacaaaccaggcagcctgggtccatggtaaaagaacctccactaagtgaggctggggctgaatcccacgtttcctgcctcaaggagattgcagcaggcccccctcttttcccctctctccagagcgagtcaccccctggctcccagacagccacacctggtgaaggagaatgcggtgacaatggagagaacccccaggttcagtaagctgcctcgtctggctcactacacctagctgtggggagatctcctcgtcagtcacctcagcctttggcgcacagaagggtccagggtcccctgctcagaggctaacactggccgaagagaaaggcaatttcagttggggtgactgtggcaggaaggggctcactctggccccaccaaggtgaggtggggaccaagtgatagagccctgatccacccactctctgaaacttctttgctaataaaacattcctactacgcttgtgttttgtttggggtagagggtgcaatcgacaaacacgaccccccgcctcaaaaaggaaaagcttcgtttggcaagaccgcacggccaggatttccagagtgcggaggatcggtgaccgcctgggagccactcaagaaacctggagaaaccctagtcgtataacccagacaagaacctgagttaacttgaaacacaaacgctttatttaaaggagcatctcagttacgtgtggcggacaaaaaaaaggagcagactgtgacagaccattcccatcggccaagtggtcgaacccgacatccaagaccctgtaaacagacccaaacatgagatgttgacaggccccgcagcaattggcaaactcccgcctccctcttgtcagtctctgtatgtagactctgcctcccaaaccctctcaccctgggcttaacgaagcctccctaccaccaaccaaaggtctatcaaaggggtgtcctctttgcacccaccagcgagcagccaagctcagcgcaacctccgggcttctcgctctgactccaaaagggtgagcacgtcgccctcgcgcacggggccttttacattgcggatgatggatcggctcgtgtcgtccatgaattccacgcgcacctacgggtccccaccggagtggaggaagaagtaagggcgggccgcggaaaggcaccgcggagtgggaagcagatatgaattcagagaacgtgtcggggccagaatacagatcgttaaagggaaccatcagaaccccgtgatgaaatgagaatcggctcccggattccggctggcaggggttagggcagggtagaggtcacatcagggtttaggtcgccggcagtcggccaaatgcccccacccgattacctgcgtgcactgtccctgagaaccggtcctgcccaggaccttggtgacctggaggaaagaagctgggttcagacccggcccgtttggctcctctaatccctccccctgcccccaaattcgggcccccacctcaccctggccagcttgataggctgcacacggctggtgtccatgatggcggcgcggcggcggtctggcggagaggagtcacgtgcttcggggagagcctttataggacgttctagcaccgcccactcccgtctcgcgataccacgccgcgtctttcccagcagccccagcggtggagacgtcaccggctgcgcccttcagtatcgcggacggaagatggcgtccgccacccgtctcatccagcggctgcggaactgggcgtccggggtgcgcggggcggacagggctgcaccatggggggcttcgggctccgtgtgtccgggacccgctcctgctcctcacctccctcctaagccgggacccttcgctctccccgaa

SEQ ID NO: 20613 - DNA, 2300 bp, Homo sapien
tttctgtggggaaacgcgacagaattccacagttttaactgaaagaatcaaccaattaaaatagcccaggaattttgtttttttttaaaaagtatcagatgttaaaatacattttaaaatattactatattctggccaggtgctgtggcttatgcctgtgatcccagcactttgtgaggccaaggcaggtggattgcttgagccaaggagttgaagaccagcctgggcaaagtagtaaaagcccgtctctactaaaaataaaaaaaattagctaggcgtagcacacacttgtaatcccagctacttgggaggctgaggcaggaggatctctttaacctgggaggcggagtttgtagtgagctgagatattgtgccacagcactctaccctgggcaacagaatgagaccctgactcaaaaaagaaaaagaaaacattatttcagcaaacatttattaagcatctactgtgtactagggtcgctggataaagcagttatcaaaaccagtttcctgttcccatggtgctgacacttaatttagagacagagtctcactctgttgcccaggctggtcttgagctgctgggctcaaaagatcctcccacctcagcctcaggaggtgctaggattacaggcatgagccaccccacctggccttggtgccgacactttagtgagatggcaagcaggtaaaccaataaataaccagccaggcatggtggctcacgcctgtaatcccagcactttgggaggctgaggtgggcggatcacctgaggtcaggagttcgagaccagcctgggcaacatggtgaaaccctgtctctactaaaaatacaaaaattagctgggcgtggtggtgtgcgcctgtaatcccagctacttagaaggctgaggcaggagaatcgcttgaaccccaggaggcagaggttgcagtgagccaagatcgcaccactgcactccagcctgggacagagcgagactctgtctaaaaaaaaattaaattaaattaaaaaataaaccaaataaataactgagtgtttcgtttttgtctttttgttttgttgttttcttttgttttgagaactaggtcttgctatgttgcccaggctggtctcaactcctggctcaagctatcctcccatctatgcctccctaaatactggatttacaggcgtgagtcactgcgcctgccaataacagagtctgcttttttttttttttccagatagtaaaagtagctattaggttaatacaatagagtgatgagaaaaatactaactggggaggggctatgtcaggaatttagggggcagcaacacaaaagctgaacctcagaaagtagggaaggccgggcgcggtggctcacgcctgtaatcccaacactttgggaggctgaggcgggcggatcacttgaggtcaggagttccagaccagcccggccaacatggtgaaaccccatctctactaaaaatacaaatattagctggacgtggtggtgtgtgtctgtaatcccagctactcgggaggctgaggcaggagaattgcttgaacccaggaggcggaggttgcagtgagtgtcactgcactccagcctgggactccgtctcaaaaaacaaaaacaaaacaaaacaaaaaacagtaggggagcctcaaaaagtacctacgtgtacaggtgcaagggaaagcatttcaggtaggtggaacagcatgtgcagaggccctgcggtggggaagatccgggacctgatacttcacccaggcactgcgaaataagtgccagttatagaaatcccaccgggttactcttctactcatagttctcccatggctccctcgtgcctgtggatcaaatccaagctccttggcccggcgctgggcagagacttgacctctgctggtgcagaaatgccgccagccagcgctcggcgaccgtcactccagggcccgccctcagtcaccacccctacattccaggccccgcctgcctgtcccaccccaccgtcccactgggcggcttggagagcctcgggtgctggttggctggcgtggccgtcagttagggcgaaggccttgataatcagtccccggacttcgagggggcgggctcgggtgcgggcgcggctggggctgcggcttcaggtaaattgccagcttgcggggacacggatgggggacccctgggtgggtggattcggggacgcaccgggacccggcgctgcgctgcgtttccagccccactgagggctctgcccgctgcgacggggcgggcgtcgtgtcctctggccgggacccctcccacat

SEQ ID NO: 20614 - DNA, 2300 bp, Homo sapien
acctactcctcactggggttttcctccctccctttcctgtccactgctgctgggagggatttgctgtcctggcatctggcccagctgacggggccaagtgtatgagtggcagcctgcacgtcagcccttgggtgtgcagtttcagattccagagaatgagctggcttggagccctgctgagtcaatgcccttctccttgccagtgctctgagccaacctgccccgagttcttcctggcaggctggttttctgtgccagcctccccttcctgacagggtataggggaatgggtagggaagaggcagaggagatcggtgcaagtttgaatgaacacttagccctgtggaatgaatgtggtccagccctttagcctcactcagtacttcctttgtcccaactctatccctaccccaggctcagaatgttggggtatctccacctgcctgagaacttcaaacatacaggggctgggcttagagggcagcagcaccttcgttcagtgcatgagtgaatgaatgaatgagggagagaaagaggaaggtcttccatgtctgaaacttttttttttttttttgacacacagtctcactctgtcacccaggctggagtgctgtggtgcaatctcagctcactgcaacctccgtctcctgagttcaagcgattctcctgacacagtctcccgagtagctgtaagcacgtgccaccacacccggctaattttttatttttagtagagacgaggtttcaccatgttggccaggctgatctcgaacccctgacctcaggtgatccgcccccccccccctcccaccacccggcctcccaaagtgctgggattacaggcgtgagccaccgcgcctggccacagacttttattttatttcttttttagagacaggatctcactctgttgcccaggctggagtgcagtggcaccattgtggctcactgcagcctctacctcctgggctcaagtgagcctcccacctcaggctcccaagtagctgcgaccacagtcatgggcgaccgccctggttcctcccttccttgtgtctcctctttctgttctctaagttcctgctttattataggcaaagctcaggacattaaagaccctggcggtagagggtaggctatgggggtgaggccctgatccaagtcctgccgctaaggcactcataatttcgggctcaggggagaaatggaagtcaaagaatctcataaacacagctgcgatgacgaaccctttcacgggaaggaacatgcgagcccagaaaagtctctcctggtcttgggatggaggtcacacgaagcctccgcaaggcaaggacttttggtgagttccgggctccgctgaactcagctctttttcttttccttcctttctttccttcttcctttctttccctccttccttccttcctctttctctctttcctttctctctctcttttctctctctctctccttcttccctccctccctacctctctctcttttctttttccgtccttccttccttctttccttctttctctctcttttctttcttttcttttcttttctcttctttcattttgagacgtactctggctctgtcgcccaggctggagcgcaatggcgccatctcggcgcactgcaacctccacctcccgggttcaagcgattctactgcctcagcctcccgagtagctgggactacaggcgcgcactaccaagcccggctaatttttttttgtatttttagtagagactgggtttcacgatgttggccgggctggtctggaagtcttgacctcaagcgtgcgccctctccgccactgggtaaggcgggggcggaatagggggcttgcaatttcacactagaggcgggcaccgtgggggaaagaagagtcacgtctcccacggttcgtagaggaaggcctgcctgagcctggagcgggggcgggagagccacagtttggcatccccagggcatcccccagcccgcagactaccaggcctccagaggacaggaccccacccccggccacaggccctgcccccagcactccccgcaccccgcctccaagactcctccgcccactccgcacccaacttataaaaaccgtcctcgggcgcggcggggagaagccgagctgagcggatcctcacacgactgtgatccgattctttccagcggcttctgcaaccaagcgggtcttacccccggtcctccgcgtctccagtcctcgcacctggaaccccaacgtccccgagagtccccgaatccccgctcccaggctacctaagaggatgag

SEQ ID NO: 20615 - DNA, 2300 bp, Homo sapien
tctgctctaataactagtacattgactctaggcttagattattcaccactgaataaataaacgtatttattcagcagtggggaacttacagcaatgatggggacagatacagtccctgatgtcatcaggctgatatgctgctgacagaggacaaaaaacaaacagatcaatgggtcaggaaagcaaggcttttttttttttgagacagggtcttgctctgttacccaagctggagtgcagtggggtgatcatggctcactgcagcctcgatttcccaggctcgaatgatcctcccgccttggcctcccaagtatctgggaccctggcatgatgcaccacatctggctaatttttgttgttgttcttttcttttttttccttttctcttttttttcctttttttctttttttttttttttttttgagagactgggttttgacatgttgcctaggctggtctctagctcctggcctcaagtgatcctcccacctcagcctcctcaaagggcatgtttttaggcataagccaccgcagccagccaaaacaaacaaacaaaaagtaacgtatactttgtgttaataattttgcatagtatattgaaaatttgccaagaaagtacattttagatactctcactacacacacagttaattatggaaggcaatggataggttaattgcttaactctcataattggccatgtgtggtgaaaatgcctgtaatcccagcactttgggaggccaaggtgggcgaatcacctgaggtcaggagttcgagatcagcctgaccaacatggagaaaccccgtctctactaaaaatacaaaaaaattagccaagcatggtggtgcatgcctgtaatcccagctattcgggaggctgaggcatgagaatcgcttgaacccgggaggcagaggctgcagtgagccgagagcacaccattgcacttcagcctgggcaacgacagcaaaactccgtctcaaaaaaaaaaaaaaaaactgtcataattattatttcactgggtacatgtgtatcaaaacacacgctgtacaccctaaatatataaaacaaacacatactgtattgtcaggtagtgataaatcctatcactacctgacaatacagcagtatgtgttttattttctatattacctatttttatattttacctatgtggcaaaatataggacaaaagaggggtagtggtaggaggtcctgttggagagcattggtatccagtaaggatttaaaagtatttatttaacaaagaatagcagaaagtggacggttgattcacacttggtgcaatctcggctcactgcaacctccacctcccaggttcaagcgattctcctgcctcaacctcctgagtagctgggtttacaggcaccagcgaccacgcccgactaatttttgtatttttagtagaaacggggtttcaccatgttggtcaggctggtctcgaactcctgacctcgtgatccgccagcctcggcctcccaaagtcctggaattacaggcgtgagccaccgcgcctggctgatctggttattttcaaaagattccatgagacgggtttcttcagtttacagaggaggaaactgaggcacagaaggataacccagtgagtcccaatatagagatggagactgcaaccgagaaaggggacccagcgctgaggtccccggaaatggtcatttatgggcttggggggcgaccagggcagcgcgcgctgacctatgacgtcatcgggacgttaagcatcgtagcattacctggacgtagccccatttctcttcccggacaggtcctctgatagtcgggtaggttctcaatcaagcctctcattagttatttggtctgtcaatccatttcattcctgcagtcttccgccccgccctcttgagctcgcccctgataggctggcgcgtccgtcacttcaaaaaggtccgcattccttccgcctttctccaggacaccgagggcgaggagggtggtaccaagcggcgcccaccctcagagcactacttccatctctgattggcttcgctgggtgcccgtcgctactccactcgccgctgataggccattcaaccgccgctctgcgcggcgccggctccgcccccgtcgggtgtttgtggtggggctgcggagtcgccgatcccgccggaagcgccaggacaatggggacccgggacgacgagtacgactacctattcaaaggtgcggccggtggggcacagacgggcgaagtcgtggcggcgaggcggcgggcagacgggccaaggccgcgctccaggc

SEQ ID NO: 20616 - DNA, 2300 bp, Homo sapien
ccgggagacggaggctgcagtgagccgagattgcgccactgcactccaggctgggtgactagagtaaaattctgtctcaaaaaaaaaaaaaaaaaaaaaagaaaagaaaaaggaaaagaaaaatattgaaagagaatagaggaggtcctctgatgaggcacagctgtgaaggtgagacggcagatgaccagtttgggaaaagctgaacttgtgggttagatttttgctaccaactagcttgagaaggtcagcagggcacctgctagactcagtaaaaggaggccagtgtggggagggcagcagggcaggcaccgcccccccccaccccacaccgcctgcccgccaaatgccagatgccgcagaagctaaatcagtgtttccaggaagcagtctctgcagacaagtcccgggaaccacacagcctctccattgctcctgacccagtaactgttctgctgggaacgcacttcaaggaaataatctaaagggcaaaaccatgacttgagcaagcactcggagctgggtcatttaacacagcaaaagggcaaaaataacaagcaggggataaccacagaaacctggatggggcatgtggggagcaacacccctgccctggcagtgccacgtctgggtgggtgcccagccaggacctgggagcagctgcctcacggtgggctgagtggagatggcacccgatcagcaggacccaaagtttagtccccctgtctccagacggccccttagaatcccagtctccaaaacccttccaaagcttcctcctgccacgaggggcgagaccttgggccgggcacctgctgaccacagagcctcacccaccagtgacattatcaacctgtgtgcagctgccagagccctcagtgccacaggacgactctaggcccttgtagaggcacttcctctccctccccccggaaggctttcgccacacggacagcccaggtggggagacctctgcctcattccccacaatcagaagacgctggatgagaccagacacaaggcccagctaggcctggtgcaagccacagagcacactcggaggaacggctcagcgaggtgaggataccaacagctgatgtgcgacgcaggccctcatagagcaggccgcagggtgaaggcaccttggatccaggggttagccctcaagggctgccattgtcagccagggagcccagcaaccagggcagaccactaggccaaagtgtagctgggcacagaaggctcagctgagaaacaagggactccggcttcctccagctgtccctaaatgggcaatggctgcctgatctacctaggccttatgtgatgctcctagagccccctcagtccctcgggcggggaagaccctccagcaggctggctggggccccggccatcagtgcgcacgtgttggaagaagttggtccaacaacccaaagtcccagatgctggccacaagccccctaagacacgcttcctaagtggtaaggcctacaggtggcctgggctcaatcgggttccaacacttataaactgtgtctttgtcactctgggcctcagtttcccaacgtgtaaaaagagaggctggttagtatcaacctcaaagggctgcagtgaggattttagttaattcgggtaaagtgctcagaaaagtgcaagtactggcttagcactgttgagagttctgagtgaagagatggaattcttgctgcacacacgggtgcctttccactcaatcccagctttgcaccccaatccaaggctcccaccaccacacacctcacccccaggccctcatctcggcccagcccccattgcctgccccgcctctcccgggccccacccccaaacacgctgccccaatcaggacaagcctcgtgagagccccgcctccgtttgcccaggcccaacccacctattggtcacgcccatcacgccttagccccgcccctaaaaaccccgcccccatcccgaatcacgctttcagcccagcccggcccgccaaatcttgggaaagctccaccccctgcggaggccccgccctaacagcctctcccaccgctccgggccccaccccctctaggctctggccccgccccggcgcgtcctaggtcccccaggtctctccgggcctccggctccgtatagccgcgcatcctagcccgaagctgatgctgcccggtcggctccggccttcccggctgcctgacccgccgggccccaagccccgggctccggcctgggcccagcggcctggagcgcggccttggcccgtctgcccgccgcctcgccgccacgac

SEQ ID NO: 20617 - DNA, 2300 bp, Homo sapien
actccagcctgggtgacagagtgagactctgtctcaaaaaaaaaaaaaaaaaattaaaattaaataaaatattaaaaacaacaacaacaacaaaacaccacagtgtaacatactaacctcacactggagaaactggcagacaccatttgaaccaagttagcacaatcgatagtggacaaaatcagcattgtatgcatcctgaaaacacaacgtcacatctgtttcctgccacaaatgcaaaatcatgagaaagtattagacaaatagcaatggaaggacttcctgcaaaattactagcctggaatttttgaaaaatattgatgtcatggagagaaggtaagattgataaaatgttccagaaagagagactaaattagagtcgttaacaacaaaatacaatgcttgatcctgggatggatttgggattttttgttttttgacacaggatcttgctctgttgcccaggctggaatgcagtggtgaggtaatggctcactgcagcccagaactcctgggctcaattgatcctctcacttcagcctcccaagtagctgggaccacaggaggatgccaccacaactggctaatatttttattttattttgtagagatggggtctcactgtgctgcccagactgatctcagactcctagacccaagagaccttcctgccttgggctcccaaagagctgggattgcagacatgactcactgtgcctggcctggactttggatttttaaaggactttattggaaacttttcttttcttttttttgagacagagtctggctgtgttgcccaggttagagtgcagtggcaagatctccgctcactgcaacctccaccttgcagattcaagcaattctcctgcctcagcctcctgagtagctggaattacaggtgcccacaacaaaacccagctaattatttgtatttttagtacagacagggtttcaccatgttggccgggctggtctcgaactcctgacctcaaatgatccaagtgctgggattacaggcatgagtcactgcacctggcctttgaatgggctctgggaattacatgataatattagatgaacattaattttctgattttgaaggttatactgtgattatgtgcaaaagtgtgcttatactaagtgaacatatagtgcagtatttttttaaaaattgatctgtcttagagatgggggtgggtgagtttactatgttgcccagactggcctcgaactcctgggctcaagtgatcctcttgcctcagcctccagagcagctgggactacaggcctgggccaccacacttggctaacttttattttattttattttattatttatttatttatgtatttatttgagacagagtctcactctgtcacccaggctggagtgcagtggcgcgatgtcggctcactgcaagctctgcctcccgggttcacgccattcctctgcctcagcctcccgagtagctgggactacaggcgcccgccaccacgcccggctaatttttttgtatttttagtagagacggggtttcaccgtgttagccaggatggtctcgatctcctgacctcgtgatccgcccgcctcggcttcccaaagtgctaggattacaggcgtgagccaccgcgcccatccttttaaattttttgtagagacgggaactcaccatgttgcccaggctggtccccaacatctggcctcaagcgatccttccgtctcggcctcccaaagtgctccgattacaggcatgagccactgcacccggccagtctcaaaaaaaaaaaagttaaattctgcagaggttttatttattagaggacgctggccgtctgcaggtggcgcagcagcaccccctcgtgcctggggcggggctggggcggggccagtgctggggcggagccggagctgggggcggagccaagacgcggcaggggcggagccagcagctgcggcacagcggggcctgtgcggcccaagtcgtccctgtggcctccggccccgcctcttagggcgggacgtgcaaggcgattggcgaatgcaggcgagaggcggtcgctattggtccgcggcgctgtcggctcggcgggcggtgcccggacgcaggtgccggccggagcggagctagtggcgccgacgggccgggccgggccgggaccggggccgaggcgaaccgaggggcctgtgcggccgcccggcccggccgcggatcaggtaggcacgggcctgcaggtagggccggaggacgccagtccgcgggccggccccgggttcgaggccggagctcggcacccgg

SEQ ID NO: 20618 - DNA, 2300 bp, Homo sapien
tactccagcctgggcgacagagcgagactctgtctcaaaaaaaaaaaaaaaaaaaaaatgactgcagcagcaaccagaaatgcagcagctctgggctagacagagggccaggtgctggggacagcgggaggcaatctgacagggtctcttttttacagaattcactgtagggtaggacaacagacgtggctaaatacgtaggtgaataagtagaatgtttcagacagggacacatgccacgagtggaatcaagtggaccccattggcacttcattgattgattgagacagggtcttgctctgtggcccaggctggagtgcagttgtgtgatcatggctcactgcagcctcaacctgggtgcaagcgattctcccacctcagcctcctgagtagctgggattacaggcgcacatcaccacacccggctcatttttgtattttttgtagagacggggtcttggtatgttgcccaggcttctctcaaactcctgggctcaagcgatcctcccacctcagcccccaaagtgttgggattacaggcatgagccaatgcgccaggccccagacagcattgtcgagaaggcttctccaggaaggtgacctttgaaggagacacttataacaactgtttcgagttcagtgagatgatgactatgtatggagattgcttggcatagtgtctggttcttaatagatagaagctgctagtataattttggtggtttgcaggccttgcattaagagatttacctgtggttttttttttttctccctgatagaagaaatattagaacaccacatgcaggagctgggatagttcctgtaatatccagttatttgcagaaatgtaaagaccaggccaggggtggtggctcaagcctgtaatcccagcactttgggaggccgaggcgggcagatcacttgagatcagcagttggagaccagcctggccaacgtggtgaaaccctgtctctactaaaaatacaaaaacgagctgggtgtggtgaaacacagctgtagtcccagctactcgacaggctgaagcaggagaattgcttgaacccaggagcctgaggttgcagtaagctgagatcacaccactgcatttcagcctgggtaacagagtgagaccctgtctttttttttgggcggggggatgaagtcttgctgtcacccaggctggagtgcagtggcgtgatctcagctcactgcaaactccatctctcaggtttaagcgattctcctgcctcagcttcccaagtagctgggattacagttgcccgccaccatgcccaagtaatttttgtgcttctagtagagatggggttttgccatgttggccaggctggtctcgaactcctgacttcaggtgatccgcccgcctcggcctcccaaagtgctgggattacaggcatgagccactacgcccggccaataccctgtctttttttttttttttttttttttttttttttgagaaagaatttcactcttgttgcccaggctggagtgcaatggtgcgatctcggctcactgcaacctctgcctcccaggttcaagtgattctcctgtctcagcctcccgagtagctgggattacaggcatgcgccaacatgcctggctaatttttttgtatttttagtagacacggggtttctccatgtggtcaggctcgtcttgaactcctgacctcaggtgatctgcccacctcggcctcccaaagtgctgggattacatgcatgagtcaccacgcccggccaagaccctgtcttaaaaaaaaagaaatgtaaagacctagcctcagaagggctgggctggaggaaaggactcgcctctgcctgccttcccgtaaagagcccagccgcttcccctttggcctctgagcttaaggttctggttgcagggacttgggagggagagcagcaggcaccctgtgtcaggcccggccactgccctgtgggtgttatctcaggcctgcagtcttcctcttgggtccctgcctttgggcaatacttgcttatctggcctgcagaggcctgactatgatgctcagaagaacatgtgaggccaggaaggctgctggctgagctgtttagagggcatttatccagcagtgaaccgtcctagcgcaagagttagtaattgctcccctgttccttcacctccccactttggagctcagatttgtttttttgtttgtttgtttgcttgctttcttttgttctgttttagagactggagactgggtcttgctctgttacccaggctggagtgcagtggtgtgatcatagctcactaca

SEQ ID NO: 20619 - DNA, 2300 bp, Homo sapien
gagctgagatcaggccactgcactccagcctgggcgaaagagcaagactccgtctcaaaaaaaaaataaataaataaataaataaaaataaaaaataaaaataaaaataaaaataattgccgggcgcagtggctcacacctgtaatcctagcactttgggaggctgaggcaggtggatcacaaggtcaggagatggagatcatcctggctaacatggtgaaaccccgtctgtactaaaaattcaaaaaattagccgggtgtgttggcgggcgcctgtagtcccagctactcaggaggctgaggtaggagaatggtgtgaacccaggaggtggagcttgcagtgagctgagatcgcgccactgcactccagcctgggcgacagagtgagactccgtctcaaaaaataaataaataaataaataaataaataaataaataattagctgagtgtggtggtgggcccctgtaatcccagctacttgggaggctgaggcaggagaatcgcttgaacccgtaaggtggaggttgcagtgagccgagatcatgccattgcactccagcctgggcgacaagagtgaaactccatcttaaaaaaaaaataaataaatataaataaaaatacaaaaactagccaggcatggtggtgcatgcctgtagtcccagctacttggggggctgaggcaggagaatcgcttgaacccaggaggtggaggttgcagtgagctgagatcgtgccactgcgctccagcctgggcaacacagcgaaactctgtctcaaaaaaaaaaaaaaaaaaaagaactggttctgataccttatctggaaaggtgatattagttgaaaggtggtcctggccctggaggctttgagggtaagaggaggcctagcttttcttgtcttctcttttttagagacaggttctcactctgtggcataggcaggagtgctgtgggcaccgtcatagctcactgcagcctcaaactcctgggctcaagtcatcctcccacctcagcctcacaagtggctgggactataggcttgtgctaccatgcctggctaatatttttggttttctttagtagagccagggtttcaccatgttgcccaggctggtctcaaactcctgagctgaggcaatcggaggcaggcggattgtcttgaatccaaagtgctgggattacaggtgtgagccactgctcctggcctaattttctcattttttataaagatagagtcttgatgtgttgcctaggctggtctcaaactcctggggctcaaacaatcctcctaccttggctttcaaagcaccgggactatagacatgagccaccacacctggccaggcctagctttcctgttttttttgggtttttttttttttttgagacagagtcttgctctgtcgcccaggctggagtgcagtggcgtgatctcggctcactgtaacttccccctcctgggttcaagcgattgtcccgcctcagcctcccaagtagctgggactacaggcgcgtgccaccaagcctggctaattttttgtatttttagtagagatggggtttcactgtgttagccagaatgggaaacctagcttttcttttttttttacttttttctttcttttcttttttttttttttttttgtatttttagtagagacagtgtttcaccatgttggccaggatggtcttgatctcttgacctcgtgatccacccgcctcagcctcccaaagtgctgggattacaggcgtcagccaccgcgcctggccagggaagcatagcttttcttaggagagtgagaaataatacaacccaagctcctgctgtataccagccttgtgctgagttacatgcatcgtctccttgaatcctcactggccctacagaggcccattttacagatggtgcaaactgaggctcagagatgtaaatggtctagtggtccctacagccttgacaagaggggactcaaaccttagtccgtcaggctcattaaccttgcccctaacctccgcactggcctgttcccaggctcctggaaccatgggcctcaggccctgaggatacggggctcccggtggccatgacgacgggtgactgctgccacctccccggctccctgtgtgactgctccggcagccctgccttctccaaggtcgtggaggctacgggcctcggaccgccccagtatgtggcacaggtgacttcaagggatggccggctcctctccaccgtcatccgtgccttggacacaccgaggtgagtggtgactgcgtggatatcctggcctttgttgcctctt

SEQ ID NO: 20620 - DNA, 2300 bp, Homo sapien
ggcaagagagaatcacttgaacccgggaggcagaggttgcagtaagccaagatcaccaagatcacgccactgctctccaacctgggtgatggagtaagactctgtttcaaaaaaaaaaaaaaaaaaaaaaaaaaacacgtattctgcatctttcctgagtcttcctccaaaaggagtcctggtgtcaccccggctccacttcctacagctctgagaccttagattaaggcttccctgccctgggcctcagtcttctcacctgtaaaatgtaggtaataaccacttcttccctaacaagtgacagtcaaaggagggagagactcggaactatgcctaatctatagtcaccctaagtcagcgtggatattgtcaccatttttaaaaaattgtttgtttgctttagagacagggtcttgccctgttgcctagaatagacaacagaagtataattatagctcactgcagcctggaactcctggattcaagggatcctcccacctcagcctcctgagtaactgtgaccacaggtgcatgccaccatgcccagctaatatatatatatttatatatttatttatttagtaaagacagggtctcactatgttgccaaggctggtctcaaactcctaggctcaactgatcctcctgccgaagcctcccaaaatgctgggattacaggcatcagccaccaggcctggcccatgctggactctctacacttaactaaaaactaacagtggctaggcgcagtggtgcatgcctgttgtcccagctgccagggaggctgagacaggattgcctgagcccaggaggtcgaggctggagtgagctgtgtgattgtgcctctgcactccaatctgggtgacagagcaagaccccatctcaaaaaaagaaaaacagaggccagcatggtctgtggactggcagatgcaaagtaagaggaaattgttcttatgtctattttatttttctattttttattttttgagacagagtttcacgatgtcacccagtctgaaatgcagtggtgcaactgatctcagctaactgcaacctctgtctcccaggttcaagccattctcctgcctcagcctcccgagtagctgggattacaggtgtgcgtctccacgcccagctaatttttgtatttttagtagagatggggtttcaccatgttggccaggctggtctcgaactcctgacctcaggtgatccacccatctcggcctctcaaagtgtgattacaggcatgagccaccatgcccagcccgtatgtatattttaaaaatcatttttataaccctgctacctgatttttacttgaagactgagcctttgcttcttcccatgggcttcagaacagatccctcaaaacaagccagtggtttttattgttttttattttattttattttttttgagacagagtctcgctgtctcacccaggctagagtgcaatggtgcgatcttggctcacggcaacccctgcctcccgggttcaagcgattctcctgcctcagcctcccgagtagctgggactacaggtatctgccaccacgcctggctcatgttgtatttttagtagagacgagatttaaccatattggctaggctggtctcgaactcctgaccttgtgatccgcccacctcagcctcccaaagtgctggaattccatgcatgagccactgtgcctggccaaccagtgttttttgttgttgttttgttttgttttgttttggagatggagtctctctctgtcgccaggttggagtgcagtgacgccatctcagctcactgcaacctccacctcccaggtgcaagcgattctcctgcatcagcttcctgtgtagcacctgggattaccggcgcgcaccaccatgcccaagtaatttttatatttttagtagagacagggtttcaccatgttagccaggatggtctcgatctcttgaccttgtgatccacccacctcagcctcccaaagtgctgggattacaggagtgagtcactacacctggctggccgccagtgttatttttttacctccatgtggtccctccctgggaggcctcctttgagaaacataactgacaagtccattttgtccagccagggctccttttattcattcaggggtgggtttttgaaacgcagtgcaacttttatataaagtcgagggtgccaggaaagtgggcctgccgggtgcagagaagcgcaagaagcttgctggaatgttccagctttaagggcgcccttgatacaccggccacagctgctggcccagaaggtgccatgtgga

SEQ ID NO: 20621 - DNA, 2300 bp, Homo sapien
agccaagtgcagcggcgtgcacctacagtcccagctacttgacaggctaagcaggggaggatcgcttgagttcaggagttcaaggttgcagtgagctatcatttacaaaggtagattgaaatattattgataggctgggcacggtgactcacacctgtaatcccagcactttgggaggctgaggtgggcagatcacctgaggtcaggagtttgagactagtttggccagcatggcaaaaccccatctctactaaaaaatacaaaacttagccaggcgtcgtggtgtgcacctgtaatcccagatacttggaaagctgatgcagaagaatcgcttgaaatcaggaggcggaggttgcagtgagctgagatggtgccactgcactccagcctctgtgacagagcaagactgtctccaaaaaaagaaaaaaatatattattgataatcgctgcattgaaggccaggcgcagtggtttacgcctacaatcgcagcactttgggagcctgaggcaggcggatcacgaggtcaggagttcgagaccagcctgaccaatatgatgaaaccttgtctctactaaaaatacaaaagttagccgggcgtggtggcatgcacctgtaatcccagctactcgggaggctgagacaggagaatcgcttgaacccaggaggcggaggttgcagcgagccgagatggcgccattgcactccagtctgggcaacaagagcgaaactccgtctcaaaaagataatcgctgcatcttactgcccaagttgccacaagcacacgtaacatctgatggtgccaattcgactgtctgcacttggaaaatggcacattggaggctgcacagcaccataaaactgatgccacgaatgcacacaaaaataagaccatacagcattatgcctagtacagaatacaccctgaattctgtcacagttcactttatgcaacattgcaagagtcctctcgctctttattattatttttaatttttttgagatggggtctcactctgtgaccaggctggagtgcagtggcccgatcttggctcactgcaacctcctcctcctgggttgaagcgattctcctgcctcaggctccccagtagctgggattatgggcgcctgccaccacacccggctaatttttgtatttttagtagagacagggtttcatcatgttggccaggatggtctgatctcttgacctcgtgatccacccgccttggcctctcaaagtggtaggattacaggcgtgagctgccgcgcccagccattaattttttttttaattttgtttttaacttttaggtttgggggtaaatgtgaaggtttgttaaataggtaaacacttgtcatggaggtttgttgtacagattatttcatcacccaggtattaagcccagtactcaatacttatctttttgttttttgagatggagtctcagtctatctcccaggctgcggtgcagtggcgtgatctcggctcactgcaacctccggctcctgggttcaagcgattctcctgcttcagcctcccgagtagctgggattacaggcgcccgccaccacgtccagctaatttttttatttttagtagagacgcggtttcaccatgttggccagtctggtctcgaactcctgacctcaggtgatccgccgcctcggcctcccatacccaaagtgctgggattacaggagtgagccatcgcgcctggccccattattagtgaattttaacagttttccgtttcttctggacgaactgtttgcaattataatgcgaattacggataatactctgatattattccatgccgttccgttgttgcctacaaagttcgcgctggagaaccgcgcaattgcgttacaaaaagaaaaaaatcacacaaaaagacacaatgttttaagaaagtttacgaatcgtgtgccggaccgcgggttgaacaagcttcatctaaaacttccaggaatctctagacaggatcattgcttcccctctgctccagctctggttacagaaagctgagagtgactaggtctaggtgtttgtgtggggtggggtggggagatgcctcctctatcggactcagaggacgcgcgccgggaacagccagtcggtgcctaacgcgagtgtatctcgagagagaagcgatcaacagctgccggtctgcgcctgcgcgcggcgggggcgtggcccggggcgagtggggccaaggaggcagccgggagcggcgggcgcaggtgttactggttgcgtcgggtcacgtgggcgcgcaggcgcagcgcggtgcagccc

SEQ ID NO: 20622 - DNA, 2300 bp, Homo sapien
gcccaggctggtcttgaactcctgagctcaaatagtcctctcacctcagcctcccaaagtgctgggattacaggtgtgagccactacacccagcacaacttcagttctcgataaagcatacactcaaatctctgctctttggatactctcttccctgcccctccccaaccatcttcttctcctccacttccacacgtcttcctgtcatggaggaacaggtccctgcccccagcaggtggcggaggtcacctcctccattctttctaccaagcaactccactaacttctatcacagcataattaccttatgttatggtaattacataacatacataacatacaaatatgttaatggcctctccactctgcatggagtgcaaaagtataggcttctaaagagatttccttaagacttgtaatgaaaaaaaaaaaaaaaagttttccacaggccctatcaaaaatatccaagtgttgccagcttcctaaactatcctctatgaagctagtactagactttgagactttgagcctctttctcacaacggctattttattctacaattttcaggttccaacagtccacatgtatttgtaaaatgactcagtcacaaaatgactatttgaaaatggacaggggaaaagggaaaatttgtaatctattaatttaccctatcatctagcaaggttctaccagcactccttcctgcatacggtaaataaatttatcttaaagccctccaaataccaccctcagaaatcctaccagcttccgtagatagacgctgaaaaagtcaaaattaacacattccttcccagagttttcaatagtaaaatgctgggaatagaggaagtttttctcatttctaagggccagtaaccatggtattttatttctccctacttaaggagggaaagaatctggaattttctccggatttattatctaccaatatagctagcacttagggaacgttcttaacctaagcgctcaactaggcagggcgcagtagctcatgcctgtaacttcagcactttggaaggcctaggcaggaggatggcttgaacccaggagtttcagaccagcctgggcaacacccggagacctcctctcttcaaaaaattagccgggcatggtggtgccgcgcctgtgatcccagctactcaggaggctgagatggaaggatcgattgagcccaggagttcgaggctgcagtgatctgtgatcgtgccactgcatcccagcttgggtaacagagggagaccctgtctcaaagaaaaaaattaaatatataagtgctcaaccgcattcacttttaatctccataaactaagcttcacacattacaatatgaggaaggcaaagtcacagacagaaaggaaagaaaacggagggagttagtatttaatagctacactttctgtttccgatgatgaaaaagttctggacatgaagcagtgacggttacagcacactgagtcagtatactcaatgccactgaattatacgcttaaaaaatggttaaaatggcaaagtctacgttatgtctattttaccacaatgaaataaatgtctgggaaattcaatgtgtacccaggcttccccttccttcccggccgctgatcttggagccaaaacctctctgtctctcttaagtgtctgtaatcagaatgaatgagtttcaccggggcacaagtcgatgcttcctcctttaaagaaacttttaaaagccaaggagtcaaagagccccaagcaggactcgaaaagctgatgaagtctggaagtaaatgaacccgcctcctgacagaacagcttccccgaaacacgggaaaaaggggattcctcccccgacttcgtatctgtctgcttccgagggtgaacgctaagcagcagatcccatctctccactaatacctgcggcgcacccggggaggaggagcgggaaacggcgagggacttgagccagggccagagcgtggggcgaggggcggttccgagggaggcacttcccgcggagcgcggtcggcgcgcggggactaaggggcggggcaggaggggagccccccgacccggcttcgcggcccttcctgacgcttccctcgctcggttaccgttgactcgggctgactgcgcgcgaggcctcccgggcgcgcaccctctctcctccccccacgttacggatcagaaaacagaccccgggaggagaggggacggggggctgaaacccggcccccgaggtcaccctcccggggagcggtcgggtaggcctcggaggctctccggtccgggcccgcgccatcaa

SEQ ID NO: 20623 - DNA, 2300 bp, Homo sapien
tgctgcagtgtggatgaacctcgatttcatctacaggaaatgctccgcatagataaatgcataaaggcagaaagtagattagtggttgcctgaggccgggaaggagtaagtagggacgggactgctaataaggttggatttcttttttgggtgatgaaaatgttctggaattaaatggtagtgatagttgcatatctctgaatatactaaaaaccaccgaatactttgagttttatggtatgtgaagtgtcttgaacaaataatttgtatgcagaggggaaagggatcagctatttgtgacacccaggtgaaaatctgtctcgtgacagggaaggctagttgatgggctaccacataggtagaagtggcaaatattagtgcagagtcatagataagccagaggctggaagcaagaacctcagtgcatacagcggtgggacgactcagggaatcactggcgcaggtaaagctctcctggagaagaaagatggatgagggtgagaggcctgtgtgtgctgtgctggggtgacctccaccaggcgggttgagggggcctggtctggagcagcagctcaagctcagggccctactcactgagttggatgggagcccaggccagagcacctttgcagcgtagcattatggcagcatgacagatgtatcttgaagggaaatctgtggcttcatgagaaggctcatctgttgaaaggcaacattagttagagaaggattgcatttcctggacataacatactcatttcccaaataaattgtcagtgtgctcacctgagcagtggtcaccctggaccatggcgatggctcttgttgactcttgtgctggagcaggaggaggagcacactgctccagggagcctgttatccatggctcttggtctcccggccatttcggaggcttgacttcaaagccttcagtgctttgggagagtaagtcaccgtggcgatctcttgctgctgttgctatgcaattaaagatggaatgttcatcagatgaaacgcctgggaagtggtggcaggttttatttactttttaaatgaactttgtttgctttctttccttcctttcttcctttttctttctttttgatggagtctcgctctgtcgcccaggctggagtgcagtggtgcggtcttggcttgctgcaacctccatttcctgggttctagtgattctcctgtcagccttccaagtagcagcgattacaggcatgtgccaccatgccaggctaatttttttttttttttagtagagatggggttttgccatgttggccaggatggtctcgaactcctgacctcacgtgatccacccgccttggcctcccaaagtgctgggatttcaggcgtgagccactgcgcctgcccttgttacgatttttaaaagcttacctggttgtagtttaagcctcagatggtggttaccccagatattgcaagtgtcagctcttttggctgtttccagagaccagcctgtatttctgtgtccctgtctgtgttggtagggcatggagttgagtgtgggctgggtatccagttgtgggttgggaagctttgggggaaggaagataggttctttgaatacatacattagcttcattgttactaaaaccacccagattcagagagtagtggacacccaggatgttgattggctggtttgtaacgtgttttttcatgagaaacatcctttgggctactagggattgggcacatttgtgctgcttgccacctgatgtcttgagtcaccttttttgatcagacagttctcagtccatgggttagtgaaacaaataggctctcaagaatcttagtgtgggggttgttaactttcccgtgttggttttcagccgcctttgttgtatacacacatatcccaaacgccggaacaaggctctgtttccaagtgtgccgatgttgaattttgcattgggccctgaggtcactggtgggtgggggtgggtaggctgaagtggatagctgcaactcactaaacactcttttcctttgagggtcaaggtttgctaaataggggaaaactaagcttctttctcttttctttccagatggccttggtggtattggcatggggttaggaccaggagggcaacccattgatgccaatcacctgaataaaggcatcggaatgggaaacataggtcccgcaggtgagaatgacagtgcaccttgcttggtggtttggggaagtgaaaattattaattattgggacaactggactttgagtagtttaaatggaataaatatttaactgggacaaaattcc

SEQ ID NO: 20624 - DNA, 2300 bp, Homo sapien
cagccggcaaagggtgagtgaaagcaggaagaaaacacgatgcttaccatttatcctgcccatgttcatcccagatccaaatcgacccatgttttccataccaccaccaaagggcccctccattcctgcaagagaggttcacatttcagcatcatccaacaagactgcttagactaagcagggaaagaaaaattctatcacatgtttcaactggggtatcttctgccaagaacttaccaagtttaaaggcttttgaaaaacaaaaaaaatgctagcacccttgtttaaaaatcacccatcttcaaaaagctggtctgatccaaccccctcaatgaatagacaagcaaaaagaggcatagagatggagtggtctgcccaaggtcacagagctagttagtgagacagccagaaccaaaagccaagacacccgctggaaggatggacaggcaggaggaagtcatttctagactcaaactgaaaccaaagagaatttcatgcagggtttaaacaagaaagaaaagaggaaagagagaaaactatgcctaaaagtgattatgcttgtacttcattttaaatttcttacctcccattttatttattccaaatcctatgccttccattcccattccttaaaaagaaaaagtcaatgcaaactaaaattatgtcaaagcagtaaataacgtttgaacttaaaaagcataattccaaaccagcaaaagaactcaaaagaaaatccctgatgacaagtatattttatatattttaatcagcaagaaaaaaagcccttaccatttcaactgtcaaatatcatatagctattttttttttttttaaacacagtattgctctgtcacccaggctggaatgcaatggcacaatcttggctcactgcaacctccacctcccgggttcaagcaattctcctgcctcagcctcccgactagctgagattacaggcgcctgctaccacgcctggctaatctttttctgagggatctacatactttaatgacccagtcgggcagggtttttgtgttttttttgtttttgagacagggtctccttctgtcactggggctggaatgcagtggcatggtcacagctccctacagcctcaacatcccaggctcaagtgatcctcttgcctcagcctcccaagtagctgggactacgccaccacacctggctgattttttttatattttgtagagatggagtctatgtcgcctagactagtctcaaaccctcggcctccaaattgctgggattacaggcataagccaccacaccaggcctcaagttaggcagtattaaacatgaaatagaattataagacacattctatggaacataaactttttagaaaattttagggaacagaagtagattttttttaagaatccctgttaagggtgggcgtggtgactcacgcctgtaatcccagcacttcaggaagccgaggcgggtggatcacctgaggtcaggagttccagcccggcctgaccaacatggtgaaaccctgtctctactaaatacaaaaaattagctgggtgtggtggcacatgcctgtaatcccagctacttgggaggctgaggcaggagaatcacttgaacccaggaggcagagattgagtgcggtaagctgagattgagccactgcactccagcctgggcaacaagagcaaaattccgtctcaataaatcaatccctgttaaaggtaaaatcttcaaaataaaaaccagttcctaaaaacaccaagacttcctccccaacccccagtctttctgtttagatgtcagacatggggtgtgtgtgttttgggtcgggggaaacgttaacagccatttgaagttgtggcccagaatttaagtcagccccagggtgactctggaagagagtctagggatatgcaacactgacaatggtgggatagaggggcttccatattccaatttcaaaggattccaacaaagaccaaagtctaaggtcataaaaatgacatattccttaatagaatcaaaatacatcattacacagcaatgaaaatgctaaacagcaaagcctgagtttattctacacatcaaagctttcatgcaggttttttttttttttttttttctggagacggactctcgctctgttgccaggctgaagtgcagtcatgtgatctcagctcactgcaacctccgcctcccgggttcaagcaattctcctgcctcagcctcttgagtaactgggattacaggcgtgcgccaccacgcccggctaattgttttatttttagtagagatggggtttc

SEQ ID NO: 20625 - DNA, 2300 bp, Homo sapien
aaaccccatcgcccagtgatgactgccggaaacattttgttctgaatctttcattcatacacagctttatggatactgagaacaaaatgtactttttgagcatttttggagacagtctcgctctgtctcccaggctggagtgccgtggtgcagtctctgctcactgcggcctcaacttcccaggcctaagcgattctcccactttagcctcccaagtagctgggactacaggcgtgtgccacctggtttggctaattttttgattttttttgtagagatggcattttgacatgttacccaggcttatctcaaactcctggcctcaagtgacctgcatacctccagagtgctgggatgacagatgtgagccaccacacctggcccaaatgtactttttcagcctgattttccctctgagtatcttggcatctcacctcctgacttctgtgttgggctggctctggagctccacgctggtaccatttcctcccatttctttttttttttttttttttgagagacggagtctcactctgtcgcccaggctagagtgcagtggcacgatctcggctcactgtgacctccgtctcctgggttcaagcgattctcctgcctcagcctcccaagtagctgggactacgggcgcacgccaccatacccagctaatttttgcaattttagtagagatggggtttcaccatgttggccaggctggtcgcgaactcctgaccttgttccgcccgccttggcctcccaaagtactgggattacaggcatgagccaccacacccagctgccccacctcatttctgatgcctttgggcaaagtgcccattctcgctaggttccttatactgtggggaagttctgagacgtctcccctctgaaagtcacacattcttagagtcgggcctgctttggccgctcactgtgtgctgtgcagctagagaagcaggcgcggtgtggccagttacagagccagttagagaaactgcccagtttcctcttgaattggtatctttgactaggctgcttgggtcggtcacaggctggctctgggctgatggccactctcagaggcaagcgacagggtttcggggaggagccccaaactcggcatgtggaaaggggtggccttgctgacggagccagaccctgctttccagagttgcaagcaccacgggtgggggcgtcccttcgttctgctgactgacccccagccgctaccagagcccactctgcagtgccatcaacatcttctttccaaagccagcaagtcatttggtttccctgacaatagggtccccaaaagtggccagctgtgtgcatttgtacacagaggatctctcggtgtgtgtttttttgacctctgcttgatggtgtggccgaaaatcctttctctgtgccctgggagcgctgaggaaatgcagccagagtggcccccagcagagcatcctagagggacaggctgggaggggaaggtgggagtgactccgacttgtctccacataactcctgttcattaccctgggtggccccccgagtggggggtgtccatgcctccccctggagcatttctcagtgtctgctgatggagaaacctcagatgtctcaggaattgacgtccatggttcacaaagcttgtcacagacactagcacctcacagacacacatacaggggtgttctttagaagttgtgttatggaaatctcagctgtggcatagagcagagagaatgctgggaggcccccatgtgcccaccacacagctgtagctgttgtcaacatttgaggggtgtcttaatggtaaattatggtgggcctttacccctgatccatgcccatgagctgaagtggtctggcgtgttgtgcacacgcacactcaagttcttgacacccacctgtgttttgtgtccctgtttcaggtggaggtggaggaagcgtccctgggatcgagaggatgggtcctggcattgaccgcctcgggggtgccggcatggagcgcatgggcgcgggcctgggccacggcatggatcgcgtgggctccgagatcgagcgcatgggcctggtcatggaccgcatgggctccgtggagcgcatgggctccggcattgagcgcatgggcccgctgggcctcgaccacatggcctccagcattgagcgcatgggccagaccatggagcgcattggctctggcgtggagcgcatgggtgccggcatgggcttcggccttgagcgcatggccgctcccatcgaccgtgtgggccagaccattgagcgcatgggctctggcgtggagc

SEQ ID NO: 20626 - DNA, 2300 bp, Homo sapien
gcctcctgggttcaagcaattctcctgcctcagcctcccaagtagccaagattacaggcatgcgccaccacgccgagctaatttttgtatttttagtagagatggggtttctccatgttgcccaggctggtcttgaactcccaacctcaggtgatcaacctcaggtgatccacccgactcagcctcccaaagtgctgggattacaggcgtgagccacactgcccaaccgccggttcttttttttttttttttaactgttcaggcaattccaacatgtgctcaaactgaaaaccagggctctctactctcttagcaggtgttttctccctttgtctaccgtgacggagattactgatctcctgtgggctgagctctgtggtcagggcttgtccttatctggccagtcctcggcaccacaagtgactgccttcaccccctcttggcccctgtctctgtctcctggttcctcttctctctactacctctaacctctgggaatctggtgtgtcctcgggtcctcagaccccctcactcctccagaactgcaaagcctttttttttttttttttttgagatggagtctctctctgtcacccagcatggagtacagtggcgtgatcttgactctgcaacctccgccttcagggttcaagtgattctcccaccccagcctcccaagcagctgggaccacaggcgtgcaccatcacacctggctaattttatattttttgtagagatggagtcttgctacattgcccaagctggtcttgaactcctgggctcaagtgatcctcctgcctcagcctcccaaagtgttaggattacaggcgtgagccaccgtgcgtggcccaggtgcaaggcctttgacaccactcacccaccgacccccaaatctgctgtaccagctaagctttctgcccagggcggcagcctgggacatccatggcctgtgatatctgccccagaacaagtgagtcctgctcagagccgggaattggatttcatggaagtgttgaaatgaggaaggcggatgagccaaccagggcagacagcagaggcctcacccggtcacatgggcccccacgtcctgggcctctgggcctccccaggagcctcctaaaccccagagctgtccgtacccctgatctgctgagatctccccatcctgtggctctctagcccaggaggtcaccagggcctggcatggagtcctccctggagtccagagatggggacaccaaagtagtaggaatgatggggactatagagagtaagaaactagttggccaggcgtggttgctcacgcctgtagtcccagcactttgggaggccgaggcgggcagatcatctgaggttgggagtttgagaccagcctgaccaacatggtgaaaccccgtctctactaaaaatacaaaaaattagccggcagtggtggcacatgcatgtaattccagctactcaggagactgaggcaggacaatcgcttgaacctgggaggcggaggttgcagtgagtcgagattgcgccactacactccagcctgggcaacaaagtgataccccgtctcaaaaaaaaaaaaaaaaaaaaaaaaaagaaagaaactagtgaccatgttaggaacatgcgggcaaccagtgccccaagcttgggacagtagcaggcaggacaggaattcaagcgaaatagaagtgcccagcaggggccggggcagtggctcacacctgtaatcccagcactttggtaggccgaggcggaccgatcccttgaggtcaggagtttgagaccagcctgcccaacatggtgaaaccccttctctactaaagatacgaaaagtagccaggagcggtggtgcgcgcctgtaatcccagctactcaggaggttgatgcaaaagaattgcctgaacccgggaggcagaggttgcagtgagccgagatggcaccatggcactccagcctgggcgacagagcaagactcagtctcaaaaaaaaagaagtggctggcaggatctggagacggactggagcctccccacctccttcccttcctcctctgccctcccccgccccacctctagcagcccccaccctgtgtgctgaccgtggagcagaagccacagtcacttcctgaaggcagcggccccagctcgggtcccactcatcccatggcccatcacctgcctgcagccatggtgagtgctggaagaggcctgtgcctcactggctgggaagcaagggacacagatgttcccagaaggataggatccacctgtggaggggcgggcgggggggcggggggtgg

SEQ ID NO: 20627 - DNA, 2300 bp, Homo sapien
gcgtggtggcacaagcctgtagtcccagctacttgggaggctgaggtacgagaattgcttgaacccaggaggcggagcttgcaagatcatgccactgcactgcggcctgggggacagagtgagactctgtctcaaaaaaaaaaaaaaaaagtgcataggtacaacttgctttgcagatggaaatacactgcacataaaacctacaattgtggccaggtgcagtggctcatgcctgtaatcccaacactttgggaggctgaggcaggcggatcacctgaggtcgggagttgagaccagcctgaccaacatggagaaaccccatctctactgaaaatacaaaattagcctggcatggtggcacatgcctgtaatccctgttacttgggaggctgaggcaggagaatcgcttgaacccaggaggcggaggttgcagtgagctgagatcgcgccactgcactccagcctgggtgcagtgcaagatgtcgtccaaaaaaaacaaaacaaaacaaaaaaaaccctacagttgcctagaactcaacgaatacctcttgaatggcagcatgatgagatctaagatgatctcatcttagatgatatggcagcagagagatctaagatgttagatctaccttaccgccctctcaacagcccatcctactccaagtgactgccaggaatcagatgatgcgcctccccctgctaaaaattcatcagtggttacaacataaaccacactcctctctctgcaccactcccatggccctgcgtgacctgccgcgcaccatattcgctttctgacctccacaccccgcctccactctgctccagtggtgccctggccacctcgctgctctttgaccaaaataagcccgtcctgccccactccaggacatcaccaccagctatccggtagagccccctgctcctcgggctttccaccagctcactccttgatcatctggagacagctccgaagtcacctcctcagagtggcttccctgacccatcacttcgacatttcattgtttccttcattgctctgaataggacaaaagattgtttttgcacttgttgatttactatttccccatttttatttaacttttagagatgggggtctcgctttttcgaccaggcaggagtgcagtggtgccatcacgctcactgcagcctcgacgtccctggctcgagcgatgctgtttccccattttaaaatgtgagtgcaaggggaggcgaggtggctcacgcctgcaatcctaacatttgggaggccaaggcgggaggatcgcttgagcccaggagtttgagaccggcctgggcaacacacagagagaccctgtctctaaaaagaatttaaaaattagctgggcatggtggcacacgccagtaatcccagctactcgggaggctgagatgggaggatcgcctgaacccaggaggtcaaggctgtagcgagctatgatcgcatcactgcactccagcctgggcgacagagcaagaccctgtctcaacactataaaaaataaagaactggccgggcgcggtggctcacgcctgtaatcccagtactttgggaggccgaggcgggtggatcacctgaggtcaggaggtgacgaccagcctggacaacatggtaaaacccagtctctactaaaaatacaaaaaattagccagacgtggtggtgggcgcccgtaatcccagccacttgggaggctgaggcagaagaatcgcttgaacccaggaggcggaggttgcagtgagccgagatcgcgccattaaactccagcctgagcaacaagagcgaaactctgtctcaaaaaaaaataaaaaatataaagaaagaactgctgtttatcgcctgtccagggctgatcttgggacaagactagagggatgaaggtgcccactttgaagactaggacagcgaggtcatcccggatctccgtgcacggagtctgctgaagtgcgcgctgactgcccggggatagatagcaagattgcaccagcgtccgacctgagctccagggtgactctgccctcaggccccgccccctctccgagcgccctgcgcaggccccgcccccagtctcgcgagagctgagaggtggaaaatggcgctgacgtgagcgcgaactcgcactgcccagagggtggccgccgcctaagctgcagccgccggagccgcagaaacaagaggccgagccgtgtcgaagatggtgagcgcggcaccggggtcgcgggcgcggcggagctgcggggactggcggggagcggccctgtcgcgcctacagcctccggc

SEQ ID NO: 20628 - DNA, 2300 bp, Homo sapien
tggagttcagtggcacgatctcagctcactgcagccttgaactcctgggcttaaacgattctcctgcctaccctgccaagtaactgagattataggtgcaacagcacacctagctgattttttaattttttgtagagacgaggtcttgctatgttgcccaagctggtctggaactcctgggctcaagcgatcctcccacctcagcctcccaaagttctgggattacaggcatcagccaccatgcctggccctcacagaggctcttaaagccacacggtctagcacctgccaccctggccatcacactctccgtcactccgcatgctccagccacaccagcctccccgaacttcctcaattgccctatggttttcccatatctgggcctttgcttgagcgcttagcatggccaggtgcacgctcctgcccctttaccttttttaactccagcttactcgccggtgtcagcacaaacgttgcctcttcctagaagcctcccctgatggcccccaacaaagtggggtcctcttacccattcatattcactcttgagtgcctggagacattgctgagaattgcatgccccaagcccgtcaattctgcaaactcgctcaggagattccagcagagacgggctccttcccagctgtggccactaggggcgctgcatattaacatcttcaagggggatgcgggtttatcgccctggaccaaagatagatctgaacatgggtcccccagggtctcccagggtcgggtcctgcctcggccacctccttgctgggtggtgtggggaagtaacaacctattagaactgccatttcctcacatgtcaagaggagcctcaggtggttggctggtgtcccaaagaccagctcataggctgacacgtacctgggccaggctctgctggggggacccacgttcccattttacaatgagaaaagggagtaactaagtcatccaggaagtagccaaactggaggctgttaaatctagatgtgacatccaaagtcagggacctttcagatgcacctgcttcccagtaccctccacttctgcacacaaacacgtgtgacttctgagggtcatctaaagagggaggttgggccaggcgtggtggcttatgcctgtaatcccagcactttgggaggccgagttgggaggatcacctgaggtcaggagttcaaggccggcctggccaacatggcgaaattccgtctctactaaaaatacaaatattagccaggtgtggcggtgggcacctgtaatcccagctactcaggaggctgaggcaggagaatcgcttgaacccaggaggcggagattaaagtaagctgagattgcaccactgcattctagcctgggtgacagagctagactccgtctcaaaataataacaataataataatgaaggaggttgcccagggatgcccagagcagacacagctgaagaaggcacccttccctgttgttgttgtttttttggtttttttgttttttctggtttgtttttagagacagggtctcactctttcgcccaggctggagtgcagtggcgcaatcagggctcactgaggcctccacctcccaggttcaagcaatcctcccacctcagccctctgagtagctgggactgcaggctcatgccaccatgcccagctaattttttttcttttcattttttgtagagatggggtcatgctatatagcccaggctggtctcaaactcctggactcaagcgatcctccaaccttggccccccaaagtattgggattacaggcgtgagccacctcccctgggccccttccttggttttaaaaagagacccgggaagcccaaatgcttcctgaatcgccctgaaaagaggtggttcgtcctgcagccagctgacccaaatgttcctgcagcagccctgtccccaaggagttggggaagaggcctctgaggtccagtagtggctgccatcaagttctgacccctcccttcaggctcagagccccaaacagccagctccccgcccccctccacacccagcttccctcccccatggcctcggcccctcccgccaaaggaagtgagaaggggctgttgtaagaggaactaaagccgggagtccggtgaacgggcagaagcagggccatgcccaagccacccccaagatccccctgaacctgcacctccatcacgacccattcaggagcctccaggagcccagacaccagccccccaccatggtaagtccttcaagggtgggatctggaagaagaaagaggagggacaccagccaggtggag

SEQ ID NO: 20629 - DNA, 2300 bp, Homo sapien
tttccatcctctgtgagccagaggagctgcgagaatgaatgttctgtgctagcagggaaaggcttactacgggaggggatattcagagaatgtagaaagcaccttttccagcttgggctttgggcaagtgacagagagcccagggagtgggcaagaggggaggaggctcaggaaatatctggaaggctgaggaagccgtaggcactgtcagagggagggagtgtgtccaggtgaggcaggagtaggttgcagagtgtgagtttcagtccccaggtagagtcccattggggttttataataagcagcctggccgctggcatcaaaagtgagacaggcacggtggctcacacctgtaatcccagggctttgggaggctgaagcgggaggatcccttgagcccaggagtttgagaccagcctgggcaacctagggagaccccaactctacaaaaaaaaaaattttttttgagacagagtctcaatctgtcacccaggctagaatgcagtggcttgatctcggctcactgcaacctctgcctcccaggttcaagaaattctcctgcctcaccatcccaagtagctgagactacagacatgcactacatgcccggctaatttttgtatctttagaagagatggggtttcaccatattggccaggctggcctggaactcctgacctcaagcgatccacccacctaagcctcccaaagtgctaggattacaggtgtgagccaccacacccggccaaactctacaaaattcttttttttttttttttttttgagatggggtctcgctctgtcacacaggctagagtgcagtggtgccatctcaactcactgcaagctccacctaccaggttcatgccattctcctgcctcagcctcccaagtagctgggactacaggagcccgccaccacgcctggctaattttttgtatttttagtagagatggggtttcaccgtgttagccaggttggtctcaatctcctgacctcatgatctgcccgcctcagcctcccaatgtgctgggattataggcgtgaccactgtgcccggctacaaaattcttttaattaggcgggtgtggtggtgtacacctgtagttccagctgctcgagaggctgagaggcaggaggatcccttgagcccaggaggtcaaggctgcagtaacctatgatcgcaccactgcactccaacctgggtgacagagtgagatcctgtctgaaaaaaaaaaaaagctggccaggctcataccggtgctcccagcactttgggaggctgaggcaagaggatcacttgagcccaggagtttgagaccagcctgagcaacttaaggagacccccaactctacaaaaaaaaaaaaaaaaaaaaaaaggttttttagttagccaggtgtggtggctcacgcctgtagtcccagctactccagaggctgaggtgggaggatcacctaagcctaggagtctgaggctgtagcaagccaagatcacttcactgcactccagcctgggcaacagagacatcctgtctccaaaaaaaaaaaagaaagaaagaaagaaagaaaaatcctaacccagtcatttcctagctgtaaaacctggtcaagttccttagcttctctgagcctcagttttgtcagccctaaaatggggataatgaaacacctggttcacaagggtggggcaggggtgcagttagatgtgtgtttagcgcagtaatagttagctgttatcctcatgggccggggacaggggaggcaggcaggtgttggggacatgccaagtgggtgacatctgagctctgctgttcagggtacgaggatgtcgtctggattcccaaaggctccgtccacatcttcatccaggatctgaacctctctctcagtcacttgggtgagcagatggtggggaggggatgaggattaggggtcagtggggagggcggtttcagcatgactagaattctgaaccctgcatcgtcccccagccctgaagggagaccaggagtccctgctgctggaggggctgcctgggaccccccagccccaccgtctgcctctagctgggaccacctttcaactgcgacaggggccagaccaggtccagagcctcgaagccctgggaccgattaatgcatctctcatcgtcatggtaacagggagactgggggcaaggtgcagcctttggaattagagactccatgcgatccttccactggctgccgccccctttctccaggtgctggcccggaccgagctgcctgccctccgctaccgcttcaatgcccccatcgcc

SEQ ID NO: 20630 - DNA, 2300 bp, Homo sapien
taggcaagacaggcattaggctgcccatcttgtagatgagtaaactgaggcccagagaggggaaatatattgcaagttggtagcagaattgaggtctctgcacaactcaaatatgccacagtgcctccttgtggagaggaggacaaaagcagagctgaaatcattatcttgaagaggtgtcagaagtgggattgcgacaggactgatgtgatatttttagatatggccaagaggacacagtctgagtttttagctgagaaatgtcctctataaggcagaaggcagagattctagaggacctttgagggagaatgtatttgagaacaactcttccagcttcttacatatgtacaggtatctctcaggggctgacctaggaagggtcctttcctgtggccattgatcgatccagtcccacatctggaaagcttacaagaattgggttcaaagcggggattacacttgataattacagaaggaccacctacttcttagaggaaagacgctgggaggttgcttaggatgtgggccaagagggtcagagaggaccacctactttttagaggaaagacgctgggaggttgcttaggatgtgggccaagagggtcagagattttgcttcacctgaactcactggggcttctccagggatattaacctggactttaagagtcagagtgagtccctgggactagttcagcccatccaggattcagacgggaagaaggtggggctgatttttcacctggagaaagagaggcatgtcccacacagacctaactcggcattgtcccctcccaaactcccacccctccacatagcttaaaagtgttgggggcttctccagtttagatgggggaacaaagagaaccaacagctggaaaaaactagagatgaggccgttggcctagtcatcatccaggccgatttctcagaaccaccactttctcttcggctactttgcccatcccataaaagaaccccaaatccttcctgttcattcctcagcagttcccacgtttccttccagaaactcagaaggcaccaggaactgaattgcaaagttcgttagagcacagactctgaattaaagagctgggttaaactccaggctattcccttagtagctgtgtgaccttacctgtctgaagcttggttttctcccagtaagatggggtagtactgcctaaagaggtatatggcatgtataaagtgctccataaatggagcttattgggagagtataagtcacaggccatgccccgcaaggggatgcacgaagacccaccgcgagccaggaagggagcaccgggctctctgctctgggaccggcagtgagccggacatctgggtcctcccaagccgggcgggctgccccagggaggaagggaggggggcgagcctgagcgggcacctcggcccgcaggaggtctgcagcgagctgtggtgtctgagcaagagcaaccggtgcatcaccaacagcatcccggccgccgagggcacgctgtgccagacgcacaccatcgacaagggggtgagcgccggccagggcccccaactgggccacgccccctgagccacctcccgcgttggccacgcctacccgcctgtccttcggcctattatctgctccctcccacattggccacgcccgccatttgtgctccctcggctgtggccacgcctactgcttgctccttcccgcgttggccacgcccaccgtctatgcgtcccttggttctggccacgcctactgtttaactccctcccgcgttggccacgcccaccgtgtaatgattcccacggctctggccacgcctactgtttgctctctccctcattggccacgcccatcccctgtgctgccctcggctctggccacgcctactgcctgtagacctcccctccccagcctgaagccacgccccacctcgtctccacgcttatcgtggtcctgtctacacccctccccgttaagcaccctgtgctcaggccacgcctctcgcttgtacctggtctgtctcccagaccactctcctacgtaacctgactctgttcgcatgttcagaccccgcctctgcccatcccggagaggctgatatctctggctggggcctggagtggggaacggtgcatggggccgacgagtgtcctccgggctggactcactccttcctgtctccccccacccagtggtgctacaaacgggtctgtgtcccctttgggtcgcgcccagagggtgtggacggagcctgggggccgtggactccatggggcgactgcagccggacctgtggcgg

SEQ ID NO: 20631 - DNA, 2300 bp, Homo sapien
caaggtggtcggatcacttgaggtcaggagttcaagactggcctggccaacatggtaaaaccccatctctactaaaaatacaattagccgagcatggtggcaggtgcctgtaaacccagctactcgggaggctggggctggagaattgcttgaacccgggaggcggaggttgcagtgagccaggatcacaccaccacactccagcctgggcaacacagcaagactccatctcaaaaaaaaaaaaaaaaaaaaagtagggacaggtggctggaccagtcactaggctaacagtgggagcctttagtatctacagcaaagaaaggaagccaccacctctttgatggagaaagagggccccataggtagtagaagaacagctaacagaggccagaaatggctgacttagactcgttcctcaaatgggggcccgagaggccctggtgggaaggagggagtgtggggagcaaacaggagggtgggggctgcacctctggtctagcctggagtcccaggaggttggggtaaggtagtgtggtgggaactccaggagtctggtatttatgcagcacctgctgtatgcgtgagtaatgacaggtcattccaagttcaaaaggaaaaattccgagttgggaagctgccctcctggtctcagctgtgtccctggaacccagcacataacaacaaatctttgctgcagaatgaaacccctcctccaccccctactccagccctgggaaggctgttattacccccactgtgtggatgagtaaacccagactcagacaaagccaaggccaaggctctggccagctccctgggggggggcgttcctgggaaatgcctgcaattgtgaggcctgggggtcaccgcccttccctggaaccaggcactgtaccaggcgcctgggattcaaatcccagccctgccccaaccatccaggtcctcctcattcacgcattcgttcattttatggagcgagacccagagtgaccaagaccaagagggctccggttccaacagaattttcactctccccatctctgtggcctcagtttcctcatctgtgaaatgggaccagctgagcctacgtcaccgcaaaggagttaaggcacagagaccaaggccaggcccaggaccgatcaaacccccctgagagctcggagagggcggggccgagctgggacttatttcccgccccgggcaccgtgcctggcacacgggaggcgcccaataaatgcttgtttgagccaggcccagccctcaataaataacagctgttgttgatgccgcagaggctggcgaggaagtgggctctcccctccccaaccccagcatctcatgctcccatcccccctccagccccattccttacccctctccattccttcccgtggcccccaacccaactcagccccttcctccaggcccccacctccccccaacccactcagcccctcctccagggccccacctcccccaaccccactcagcccctcctcaagggccccacctccccccaccccactcagccccttcctccaggcccccacctccccccaccccactcagcccctcctccaggcccccacttccccccaccccactcagcccttcctccaggcccccacctccccccacctcactcagccccttcctccaggcctccatctccccctaccccttcccattcaaacttccccctcccccaacctctcccttctcttcctccctttccccgaacccccacccacccaattcggcctccatccccatcccccacctgattctttctcccctcccccacccattctccccgccgccactcgatttctcccgcttcgtcccctccccgccccccgcggttccccagccccctcccacgcggcgggggcgctggtcccgggcggggcggcccgagttcccgggtccctggctggggtccagcccgcggcccaggccgggcggcggcaggcgggcggggtttctggccgcgcgcagtttgggggtttttttataaccctggcaggcggctcaggaagtgccttccccgcgccccctcccctggccacgccgccgcgctcgctcgctccctcccttcctgcgcgcgcggggcggcgagacagcggcggcgacggcgcggaggccccgggcgcggcgcaggtagcggcgcgggcggggggcccgggggtgcgtgattcagtgggactttgtgtgtccgcatcgggctgtgagggcgtggggctgtggtgccctggatgggggagggcatcccgctgtgcgactccggtcggtgcctgagg

SEQ ID NO: 20632 - DNA, 2300 bp, Homo sapien
gggaggatcacttgagccaggagttcaaggctgcagtgagctatgatcatgccactgcctgggtgacagagcaagaccatgtgtcaagaaaaaagaaaacataaaaaaaaaaaaaggaacactgcgggccaggtgcaatggctcacgcctataatcccagcactttgggaggccaaggcaggcagatcaactgacctcagttcaagacaagcctggcctacatggtgaaaccccatctctactaaaaatacaaaaattatccaggcatggtggcacatgcctgtaatcccagctacttgggaggctgaggcaggagaatcgcttgaacccacgaaggggaggttgcagtgagcagagatcgcaccactgcactccagcctggcaacagtgcgagactccatctcaaaaaaaaaaaaagagactcaaaaaaaaaagagactcaaaaaaaaaaaaaaagagactcaaaaaaaaaaaaaaccctggagcatcagagctcgaatggggaaactgagtcacggtgtggcacagtggcctgctcaaagccatccagcatgtccgtggcagagttgagatcccaggtttcctgcctgccagatccagctcatctcaccaccctcccctgtttccggaggaaatggaatttgagttaggatttggattattcctgggtttgccaaggaggagagggatgaggacattctgtgtaagggaacagcgaggataaaagtgtggagtctggagtaaagcaagatgcagaaaatgaataacagtgacagccagcatgtagcaggtgcgttaggacctgccagactcagctctcacctccccgtgggtgtcacctcctcgacttctcccacagccctcggggggtaggaactacaattatccccattctgtagaagaggaaactgaggcccagagaggcaaagcaaagtcgtgagaagcagggcagagccctctcccctctgtctaagaacccaggctgggacgggggttcttagtctttccccatgaccccaaacccaggccccaagacaggaagacagtggccagggcagccctgctggggacgaaggcgggcgaggacggcctaggccaaaccacaggacaggatttctcagaatttacagtatgggggagaggggaggctggggctgctcccaggtccttcataggcgggagagatggggtgatgggggagggggcacaccagtggccttaggggagggaactcaactctcccccatcccctacatcctccgcaaggcttcagccccacaacacggcttgtgggggggcatatggagagacttgaggcggttccttcacccccaggctcaagcacacatgtgtatacatgtaggtatcatgcccacacctacacgccctgatctgagcacatacgtgaacacgcatatgctgtgtctcccacgcaaaaaggggcgggagtgtgtgtgcatgtgagttacttccctacccaggcaggtccaggcgcttcacaccctgtcaccctggcatacccacaaagccagggctggcagggctcccacgcccccatttccaagtgggggccaacaaggggtgattctcctcccatatcctcatactctgcgccctgttccctgatctctctgtcccttttgatctcaggtgcaggccttcctctgggcatggcagactcactagctttttttttttttttttaaacatagtcttgctctgtcacccaggctggagtgcagcggcacgatcttggctcactgcaacctccgcctcctgggttcaagtgattctcaagtctcagcctcccaagtagctgggattacaggcacccaccaccacgcccagctaatttttgtatttttagtagagacagggtttcatcacgtcagccaggatggtctcgaactcctggcctcaagtgatccacccacctcagcctctcaaagtgctgggattataggcgtgagccaccgcacccggcctcattagcatttttttaattgaggtgaaatttacataacataaaattaatcattttaaagtgtccaatccaatgtggcctttagtgccttcacaatggtgtgcagtcaggcatcagtggttcagtggtagaattctcgcctgccacaatggtgtgcagtgagtgcctccagccaaaacattttcatcatcctcaaagaaatcccatccccattagcagtcactcccattcccacctctcccccagcccctggcaaccaccaatctgcttattgtctctaagaatcatgtttcaaatatttcacacaaatgaagtc

SEQ ID NO: 20633 - DNA, 2300 bp, Homo sapien
atcacttgagcccaggagctcaagatcagcctgggcaacatagcaagaccccatttctacaaaaaattaaaaacttatccggagatagtagcacatgcctatagtcccagctactttggaggctgaagtgggaggattgcttgagaccacgaggttaaggaggctgcagtgagcagtgattgcaccactacactccagcctggacaatatagcaagacccagtctcaaaaaaaaattgaaaacaataaagtgttatcacttagtgtatttctggttgttgtgaacagtccaaaaaacagaccctcaataaattgctgagtaaatatttccaaaagcatggattagaccacacataccagtaaatcaataattaattaaaatgctcaataaaccacactctggcagagtaataaatctagacacaactagaaaattaaacctctttcatttagatatcccataagacattcactagcactattcctggtgatttctaccaccacatgcatgaacatacactaagaaaaacgtttttatttgctttaactaacaggtgatatctgatatcaccaaaaacagccatggtcttgaagcaactctcctaatgcattttgaagcctgctatttattgttgagataattccttcctcccaaatgcaccctctccccttttatctatactgaaaccccttctcgtatctcactgagcccctctcctgccaggaggaagcaggtaacaacccctggagagaaggcagacttcccccatccctcatctagttggagtacagagtagaaatcagggttggcttccaggaggaggtggcatcagactgagatttgaagaggcaaattccttcttggcaggaatgggacagggagaatgattcaggcagtgaatatagcagaggaagcaaagaatctaggacaggggtgttcctgtctctccctgcctctctccatccccaaccaaggctggcctctgtctccatttggaaaccaggaagccatgctagcccgccccaccttctaattaatattctgaggaggaatattctaatattctagggaggcctgtggcaagctctctgccactaggctgtaaatagcttcatggcgaggtacccagaggaggattcctgggtcttcctgaaagcgtggcccaaagagttagagaaaccaattttgcatgtttttagtgaaaccatgccccaaagaaatgtttgagcttgcagaatggcagatcaaaaaagaaacaacttgctgaaatgccttccacttatgagggttttttgtttgtttctttgtttgtttgtttgtttgttttgagatgagtctcgctctgtcatacaggctggagtgcagtagcatgatcttggctcactgcaacctccacctcccgggttcaagagattctcctgcctcagcctccctagtagctgggactacaggcatgtgccaccatgcctggctaattttttttcttttattttctttttcttttgagacagagtctcactccatcccccagcctggagtgcggtggcatgatcttggctcacttcaacctccacctcctgggttcaagtgattctcctgcctcagcctccccagtagctgggaccacaggcatgcgccaccatgccaggctaatttttgtattttttggtagagacgggtttcaccatgttggccaggctggtctcgaactcctgacctcaggtgatctcccacctcggtctcccaaagtgctgggattacaggtgtgagccacagcccccggccccagaacttttctaataaaattactgccttaaagccagctgagaaacagacttgtgctggattcctagctcccagtgggttgacatgcaacaaaaagcttgtcttttctcaaaaaccaggtgccatcgtattagcttctagcgcatccgacagaaatgtgttaagagggccctgctctgagatgctcatctcctcctccaaatttggctcttcagagaagagatgacagcctttgggcaggcagggctgggcagggacccatcctcttggctgcattgtgatgtcttaagaagactgaaggggcaccgtgacgtcatagattgcgggcccacccctccccctgtctgcctgccctccccactggccgggcctcaacctcttctccccacaaccccaaccccagaggaaaagccccctcacctggcgtcccgcaaccatggatgcaagtcgccccaagtcctcggaatcccagtcctccctggaggcccccaggcccggcccaaaccccagtccca

SEQ ID NO: 20634 - DNA, 2300 bp, Homo sapien
attgtcgattccatcaagggtattgtccttgggatgatagtagggaagccagattgcaccgtgtgaggactcaggaaaggggacagagtgaagagctgtggctgggatgggggatacagacggggcagtaaccggaaagaaagctgtaccccaaggatgggctcatcgcactacagaagatgccacatcaggcttgaggggcatgaggaagggtctagcagcacgggagagctagaagggaaagggcggaggagagagcttcgagcacagacagctcctcaaaagcaggagggtggaccccaggccagaactgcccagcaagccctgcggagaaggcaggcagctccttgtctgcgatgggaggaggcagaagggtggggcacaggttgcagtgctggcagcaacacaggaaagtagattcctcctcatgatctttaccctgagaagcaggatcgggattgtctgctgaaaatgagatgatttgtcatctcttgctgcctaacaaatgatctcaaaccttagtcacttgaaacaatgaccatgtatcgtctctcactgtttttgtgtttcaggaattcaggagcagcttggctggaaggctctggctggaaacttgcagaaggctgtcagctgggtctgcatcatctgaaggctcaacgggtaccgggggccactccatggcctgcgagtcagagctggccgtcggtgggaggcctcagttcctctccacataggcctctccacagggccacttgagcgtcttcccaccatggcaactggtgtcctctagagcaacatccaggagaccaaggcggaagcagctgtagtgccttccaagacctggtcctgaaagtcacccctgcacccacccccgctgtctcctcagccatattctgctggtcacacaggtcagctctaattccgtgtgtgcgtcgggcctacacagggtgtgagcaccgggaggctgggatcgtcaagggctcgttaggaagcagttaccacagaggggacaggggaggaggtgtgaagtttaaagagaggagaggaggtttgacgagtgggaagccatgctgacctgtgggatcgccctgcaggctgagggttctctacacgttggtgaccgtgttattccagagtggcaacgtcacagcctttgcacagggtggtctgcccgaatgtcccctggagcaggtggatgattgaagtcacgcctggctggagttctgctgggctggcatgacagtggggggtagggaggaggaaatcagctgaaatgagggacagtgacatccaagctgggtgaggatgaaatcaagagagggggtggctgaggcaggagagggggtgaccaaggcagagcataggtaggagaggggctgactgaggcaggaggggggtgactgaggccgagcacaggcaggagcagggtgaccaagggcaggagttggggtaacaggcagaacatgggcaggagagggggtaactgaggcagagcacaggcaggaggggggtgaccaaggcaggaggggggtgaccgaggcaggaggggggtgaccgaggcaggaggggggctgactgaggcaggatgggggtgaccgaggcaggagaggggttgactgaggcaggaggggggtgaccgaggcaggaggaggtgactgaggcctgcgtgtggtcggaggacatgcggtgagagaaaaaaggagtgaacgccgtggaagttgaggagggaggttgggttcagagagaggggagtttctgaacgttgttctgggtggtgggacagtgcccggtgatgaccaaggctgaggggacctgtggaaacatgtggctgatgagagaaggaacaaagggccctggagctgaggaactcctgagactctgggggtctctgacatcctccaggagctgggactggaggtgggaggagttatggaggcgccggagtccccggggaaggagggagtagccgggaatgcgtttgtggtgcgcttggatgggaagaacatgccgtgagactgcgtgaagccgaggttctcaaagcgggtgggtcagggaggtactggtcgttgtgttggggacagaggaaggcaagttttccatcaggtggccctgaattcattgcctgctcagcaaaataaaggcccagtgtggaagccggaacttgcatttgaagaaggatgggaaggatgggttgaggagggcccatccccagcagcccgagagggaggaggccacggagacttggagcattcccgtttcttccagagcgctgcgggataaaggaggagcgtcctgcttcc

SEQ ID NO: 20635 - DNA, 2300 bp, Homo sapien
cagcctaccaaagtgctgggattagatgtgtgagccaccatgcctggcaggaaatctctttaaatacaattaaaggaaatttggaaacattcaatgcttatcagggatatttgcagatttggcaactaacgtctttgggaaccatcaggtaagttaaggagaattaaatatctatgaggaaaaaagaaagctggagaaaattttgcaacaggttttggggaaaatcaaggagtaaacatgacagtgcatacacagaaaataaagtttctacgcatgatggattcttcccagttgatggagaatattttgtatttatagtggcactaagacgtcatgtcacgtgattcttttttcagcagtgatcatatgacggtggtagccatggcgtcacagagaacagggaccttccaagtttgaagttttacaaggcaggtgtgataagtggtaaggaattttggattaatctaaatgaatttttttttttttttttagacagggtctcattctgttgctcaggctggagtgcaatgatgtgatctctgctcactgcaacctccacctcctgggttcaagtgattctcccacctcagccttccgagtagctgggactacaggtgtgcgccaccacacccagctaattctttttttttttttttggtagagatggggtttcaccatgttggccagcctggtcttgaactcctggcctcaagtgatccacccacctcggcctcccaaagtgctgagattacaggcgtggagccaccgtgcccggcctctaagggaaatattgaggtcgcagaccacagaatccaagagtgctaggaatcagaggagagagaggaaggtgaagatacggaggtccggagtaattcaaatacccaaatcacagatacttgctcctcaaggtatgttcatcaagaacaggtatctatggtatgggcatttgaattaaaaaacctggaaatcagaaatttatagtgggtgaataagttttccgatttatttatttatttgttttgagacagtctcgctctgttgcccagactggagtgcagtggtgcgatctcggctcactgccacctccagctcccgggttcaagctattctcctgcctcagcctcccgagtagctgggattacaggtgcccgccaccatgcctagctaatttttgtattttttgtagagatggggtttcgccatgttggccaggctggtcttgaactcctgacctcaagcgattcgcctgccttggcctcccaaagtgctgggattacagatgtaagccactgtgctgggtcagaattatttatttttgagcatggctgtttgggttgctgaaaatgtctggggtgtgggattaaggctcaaagagcagagcagttgataatttcattattgacttacaagctgcaggaactgtgcaaaccaagaggtcaatgtgttaaacagatgaatagtcaagtaatgcataagaatggcaggatttgggctgggcacggtcgcccatgcctgtaatcccagcactttgggaggtcgagggggggtggatcacttgagttcaggagttccagaccagcctggacaatatggtgaaacctcgtctctacaaaaaccacaaacagccaggcatggtgatgcacgcctgtagtcccagctacgcgggaggttcaggtgggtggatcacttgagcctggggaggtaaaggctgcagtgagctgtgattgcaccactgcactccagcctgagtgacggagtgggacaaaaaaaaaaaaaaaaggcaagatttgagatttagaaaaagactgtcatatttgtcatgagagggagtatcaggacttgagcatttaagagtgacaagggcagaaagagaataaaatagtactcaaacaaggagggggtttgcaggatgatgaaggagattttgaccttgaactttctgtgcttgactcaaatctgcctgatgatgtcccaggaagcaggtcagacctatccccagagggagagaggaaggatgaaagtccagaacagctgagatccttgtcctgagaaggcaggcttcattgatcaatttgaccccatttcatgatttattttaatagtgtaagaggaaaagaagtgtgatggccaagagttcacagaggaagcaacgtgactgtgtaaaccaatgcaaatcaaagcctggcttgagcacctcaatccctttgagaatgtccagttacacattcaagaggccagtaacgagaattacaccccatcctggcaatgaggtcagataccatcaatgggaggagagcttg

SEQ ID NO: 20636 - DNA, 2300 bp, Homo sapien
ccaccgccctgaccccaaaatccctgggctagacagacagcagctatactgggagctgagccagctgacccacagcatcactgagctgggaccctacaccctggatagggacagtctctatgtcaatggtaagcagctctgatgtgattagagtctctttctcctgcctgggcagcctctactctcttacttgaggtcacatgccctgcttggacactgaaggctaggacacgtctgtatgtggtgattgatgtcagaatttcatgatttcttctttatcttgaactgatttcatccttagtagcttcttccctgatactcagattctgacagagaatctccaaaggcccctgttccatgaaactcctttcattccaccagggtagccctgacttttttttgaccccctacctcccccttgactcttatccacactcctccctccctctctatgcaggtttcacccagcggagctctgtgcccaccaccagcagtgagtattctactgatgttcccatggccccaatcttacaacaaacttagcaggagctgacccctattcataagcccttatgtcctttccataagggaaggaacatagaggacacaaattattccccttccccactgccccagctaatcagaatcccagctgaagccccacaggcaaaaatccccatgaatagtccctcctgctggcattacttccatgagagcacttgctcctttcactgttgagggcttctcctcagctcctgggactttcacagtacagccggaaacctctgagactccatcatccctccctggccccacaggtaaataccagtcaatggtatttggagcatggttgatgagtgtaaacatctctgtttatactctgttagagcatggttgatgagtgtaaacatctctgtcattattcactcaactaaagatggaaattcatagtaaatgtagtaaccataggtcaaccaacccagttcattgagcactgcctctgtatcaggacctggatatacatcagggaacaaaaaaagaaaaaacactgccctcagtgagcttatattattgtgatgatgatgatgatgggggtggcggtgatgatgattgcagtggtggtggtggtggtggtgatggtaaggataatgatgattatgctggtggtaatcatgggaagaatgatggtggtggtggggattacaattgacaataattatggggattttgacaataatgataataataatgatgatgatgacggttgtgttgattgtggtgatgatgttggagtggtgatgataacaatggtgacaatgatggtaaagatgatgatggttgtttggatgatgacagtaatgttgctggttatgatgctaatgatgatgtgattatggtgatgatgatgatgtttgtggtggtgttgatgtggattgtgacattcgtgatggtgaggatgacaatagtgatggcgatagtgattatgatgacaatgatcgtgatgatgattattcagataatgacagtgatgatgattatgatggtaatgatgatatgactatggtgataatgatgtttgtggtagtattgatggggattatcgttgtggtgatggtcttggtgctgatgctgacaataatggtgatgatgatgatgatgatgatgataatggtgatgacaaaggtaacaggtaatatctgatatttttcagcactgaatatgcaccaaaagctgggctcagaatctaacaaatattatgtaatatgctttttaaaaaaataatttctatcaagaagggcatggaaacctttaattttgtcattcattttaaattctgttgcatatgattaaaaataaacttattgcaaactcttcaagtctattgcaaaagtcgagaaacttgaggagtttgcaatagacttatttttaactatatgcaacagattaaaaatacaaacaaacacaatagtgtttgtttccacaccttttactacagccactggccctgtcctgctgccattcaccctcaattttaccatcactaacctgcagtatgaggaggacatgcgtcgccctggctccaggaagttcaacaccacggagagggtccttcagggtctggtgagacccctgtccaacttactctgcccctcccacgttacctggtcccaacaacatcacccatgccagggccatggaagaaaatctcatccatctcccctagagacacaagccctgcccactggtgccagctgcactcgccacacttgtgccccaccactatatccccagccctccta

SEQ ID NO: 20637 - DNA, 2300 bp, Homo sapien
caggaagttcaacaccacggagcgggtcctgcagggtctggttagtgctccaccctcctcactccgccccaccccagagagtcagtacctcctacatcatccatgccaggtgatggaacaagatcatacccacctcacccttgccccaagagatgcaagccatgcccattgaaaccagccccactcactgatgcctgttctgcccacctgacttctgccctacacacccacacacgcaacttagccctcctactcatctccttctccctcctccacagcttggtcccatgttcaagaacaccagtgtcggccttctgtactctggctgcagactgaccttgctcaggtgagaccttagaagatcaagcttggctgccccacttgttctcactccaatcgactttgcactgcttccttgctgcacttcctagggatatcctcaccaaaggtggaattcaggagtcactggcttcatgaccaatgtgttttctgatagtaacacccccaaaccccacctcaacagggagaatctgaatggcccatcatcaggattgagcctctaccctgatcatccctctgaattccctcctgtccctgcacctccctttcctttaggtcttaaattctgtccccaggatttctctcaagatgatcgtgcctcatccacaggctttcatgcccatttccagctcttcattggtctcacgtctggtgtctctgtccccatgccatgagaatgcaggttttaacttgcacttttttattttattttattttattttattttattttattttattttattttattttattttattttattttattatttcattgttgaaacatagtcttactgcacaccaggctggtctcagctcagtgcaacctccgccttccatgttcaagtgattctcctgcctcagcctcccaagtagctgggattacaggcacccaccactatactcagcaaatttttgtattttttgtagagactgggtttcaccatgttgaccaggctagtcttgaactcctgacctcaagtgatctgcccgccttggcctcccaaagtgctgggattacagacatgaggcactgtgccaagccactttgcactttcataaaaattcttgtattcattaccctgcttgcagttcaaagcaagccagtagtcggtgcattcagagaatctaagtgtgatttctcacctctttcccagacttctcatttcctctggttccttgcagtccttccctcagcaatctcaaaacccttcctagttaatcttttgattgcattcctcccaccttccttccccaggcctgagaagaatggggcagccactggaatggatgccatctgcagccaccgtcttgaccccaaaagccctggactcaacagagagcagctgtactgggagctgagccagctgacccatggcatcaaagagctgggcccctacaccctggacaggaacagtctctatgtcaatggtgaacagatgtgatgtggttggagtctcttcctccctgctgagcagactctaatctctggcttgggggcatactctctgcctggccattgaaaattctgttatgtgctctacatgggatgactaagttctggacttcatggtttcttcgtcatcgtgaactgcattccctcagggcattcttctctgttgtgaggatgccgataggaaacttttaatggtccctgtcccatggcaccaggatagccatgacccctattgcatcccccacatctccttaatccttacacaattttctccctccttctctatgcaggtttcacccatcggagctctgtggcccccaccagcagtgagtattcaactcaagtccacatgcccctgatcctacaccaagcacagcagaagctgcccctcctcataaacccataagtcctcctcatgagcaaaggagctgggaaggctgaagttattgaagctcccttccaccccagctccaaagacaggcccagctcatgcccacatgcagcagacctcataatagtcccctgtttggccatttctgccatgagagtgcttctgctttcactgatgaggacttttcctcagctcctgggacctccacagtggaccttgggacctcagggactccatcctccctccccagccccacaagtaagtaccagtcaatgacatctctattacagcatgcctgatgagtgtgaacatctctgccattttcactcaaataaagatgtaaaattatagtaaatctggtaatagtgagtgaaccaaaaatatttgttggc

SEQ ID NO: 20638 - DNA, 2300 bp, Homo sapien
agacggaccagccaaaaagggcattttccccaagccatttagctcccttgagtctcataacaaatctcctagccctgctggtccataggatctagagaggatgacttgaaccttctgatcccaccatttgaaaacgccatgccatgggcaccagtaggagggccactgctacgtgcaccagtacaagggccactgccatggattacagattaaccctaagtatagctgtcgcacacctagtacttcaggaggcttattcggggccatgcagatccctggcattattatcctaggatcctacaccaagcaaagcaggagctgcccctcctcataaacccataagccctcctcttgagcaaagcagctgggaaggccagaagttattcaagctcccctctgccccggttccaaagacagacagctcaagcctacatgcagcaaaccctataaaagtgtcacctcttggcatttctgccatggtaatgctttctgcttccactaataatcctagtaatttgtttatggtgggcatctctctgatgagaaccacattcttttttttttttttttttttttttgagatagagtctcactctgttgcccagactggagtgcagtggcgcgatctcggctcactgtaacctttggctcctaggttcaagcaattctcctgcctcagcctcccaagtagctgggactgcaggcacgtaccaccatgcccagctaatttttgtatttttagttgagacggggtttcaccatgttagccaggatggtctcaatctcttgacctcatgatccacctgccttggcctcccaaagtgttgggattacaggcatgagccaccatgcctagcctgagagccacattcttgttaaccacaattttctcagagtctgcattaggggttgacaaagagtggaaaggaaggacaaaaggatggagaggtggatggactaagcatatgtaggttcttacccaggccagagaaggatagctcagccacggcagtggatgccatctgcacacatcgccctgaccctgaagacctcggactggacagagagcgactgtactgggagctgagcaatctgacaaatggcatccaggagctgggcccctacaccctggaccggaacagtctctatgtcaatggtgagcagctgtgatgtggttggaggctcttcctccttgctgagcagcctgtaatcactggcttgaggtcacactcactgtcaggcaattgaaaatttggtcctgtgctctacatgggatgactaatttccggacttcatggtatctttttttttttttttttttttttgagatggagtctcgctctgtcaccaggctgaggtgcagtggcatgatctcagctcactgcaacctccgcctcccggattcaagcaattctcctgcctcagcctcctgagtagctgggactacaggtgcatgccaccacacccagctaatttttgtatttttagtagagacagggtttcaccatgttggtcaggatggtctcaatctcttgaccttctactccaccttgccttggcctcccaaagtactgggattacaggcttgagccaccacacctggccaggacttcatggtttcttcatcatcatggaatgaattccatcagggcattcttccctgatgtgagggcactgataggaaatctttaatggtccctgctgcatgaaactgcttccattgcaccagggtagccctgacccctatttggtcccccacatctccttgtaacttacccacactcctccctccttctctgtgcaggtttcacccatcgaagctctatgcccaccaccagcagtgagtattcaactcatgtccacatgcccatgatcctacaccaagcaaagcaggagctgcccctcctcataaacccataagtcctcctcttgagcaaagtagctgggaaggcagaagttattcaagctcccctctgccccagtttcaaagacagactcagctcaagcccacatgcagcaaaccctataaaagtctcacctcttggcatttctgccatggtaatgctttctgctctcactaatgaggacttctcctcagctcctgggacctccacagtggatgtgggaacctcagggactccatcctccagccccagccccacgagtaagtaccagtcaatggcatctctattagagcatgctatctctgtcatttttactcagatgaagatggaaaatcatagcaaatctactgatagtgagtggaccaacgaaatttgttggccacctagtgtgtacca

SEQ ID NO: 20639 - DNA, 2300 bp, Homo sapien
taatatttcataaattgtttgcaaatgttatatgcaactctacgtaagaacacctagcacaggggctaccagggaatttggtttaacaaatatttatcaggcacctattctgggctgggcaggggggataagatgttgactaagtcaaatgcagtccctcccctcaccaagtttacagtgtattgggcaagactgaaatggaacaagcaattacaattgacaataaaagacaaccaagttattgagcacttactatatggcatgccatatgctatgtattttttttatttttaacttttcattttgaaataaataataaatataaagtaaataataatataaataaataataaataacttttcattttgaaataaataataaataaattcaggagatgttgcgaaaatagtgtagcattcccctgtatccttcacccagtttctccccaatggctacatcttacataactctaatacaatatcaaaagcaggaaactgacattgttaaaatccattttactggttttacacgcgtgtgtgcatatgtgagcttgtgtatgtgcgtgtgtgtgcaggcatgtgtgtgcatgcacgcctgtgtgtgcatatgtgcatgtgtgcatgcgtgtgtgcatgtgtgcatgtgtgtgtgcatgcgtgcgtgcgtgcgtgcatctgtgtgcatgtatgcacatgtgtgtgtgtctgtgcacgtgtgtgcatgcatgtgtgtgtgcgtgtgtgttggtagccctatgcaatttttatcacatgggcatagccctataatcaccaccaccatcaagattcagaactgttccattcccccaaagattcccctcatgctagccttcgtaatcatgcccactgagcccaacactattgcatagaatagctattctactctccatctccatctctgtctctacaattttcttttgaagatgttatataaatggaaatgtacaacatgtcacctttgaaattggcttcttttccactcagtgtaatgccctggagatgtgctctttttaacagtcatgtaaccttcctaatttccctccaaaatatcattatgcccctcgccgccttttttttttttttttttttttgagacagagtctcgctctgttgcccaggctggagtgcagtggtataatctcagctcactgcagcctccgtctcccgggttcaagggattcccctgcctcagcctcccaagtagccaggattacaagtgcatgccaccacgcctggctaatttttgtatttttagtcgagacggggtttcattgtgttggccaggctggtctcgaattcctgacctcaagtgatctgcccgccttggcctcccaaagtgctgggattacaggtgtgagccaccgcgcccgacccatattgcccattgtattacagcggaagaaactgaggtatggacaggtaacatgtccatggtcacttggctggtgaggggcagagaggagatttgaaaccaaatctgactcactagtgtggccgtaaccatggtaactatgtctctctaccatgtggtctcctctttattaaaggaagggcaagttctgggagttttgggagttttgggcttgagtggggaagggtagccaagtaaagcaggtgagagaaggtctgctttaaggactgctgtttgatttttattgttgttgttcagtgttcaatgggattgagttgactcttttttcccttcttgttccccaaagcatgagactgttccggtccttttcccttttaacttctcagctagagtttgttagggcgggtatgggcacctggcagagtctgagacctcagcttccagtaggcacacgttctgacccaatacacctaccctggtcccctaacctgcttctggtcccctaacctgcttctgggcccaggtaatgcattttaggaacatcccacttttctccttacctggctttccattatccgtccaaactaaagcacccacctgtctgcttcagactcttgcttcaagcactccgtctgggtcctcagaaattgacttacagtcagttcagatctgactcaggcgtggccttcttttctccttccttgcagcagccacagtcccattcatggtgccattcaccctcaacttcaccatcaccaacctgcagtacgaggaggacatgcggcaccctggttccaggaagttcaacgccacagagagagaactgcagggtctggtgagagccccgcccaccgtactcctccctcgcccacttagacaaaccagcccacctcacactgcctcgccc

SEQ ID NO: 20640 - DNA, 2300 bp, Homo sapien
tgaccaatcttatgagcaggggtcctgaaagtctgtcatggacgagccctcgctttgtggaaacaactagatcttcctcttctctgacatcattacctctcacgacctcactttctcctgtgtcctccacattactagacagtagcccctcctctcctcttcctgtgacttcacttatcctcccaggcctggtgaagactacagaagtgttggatacaagctcagagcctaaaaccagttcatctccaaatttgagcagcacctcagttgaaataccggccacctctgaaatcatgacagatacagagaaaattcatccttcctcaaacacagcggtggccaaagtgaggacctccagttctgttcatgaatctcattcctctgtcctagctgactcagaaacaaccataaccataccttcaatgggtatcacctccgctgtggacgataccactgttttcacatcaaatcctgccttctctgagactaggaggattccgacagagccaacattctcattgactcctggattcagggagactagcacctctgaagagaccacctcaatcacagaaacaagtgcagtcctttatggagtgcccactagtgctactactgaagtctccatgacagaaatcatgtcctctaatagaatacacatccctgactctgatcagtccacgatgtctccagacatcatcactgaagtgatcaccaggctctcttcctcatccatgatgtcagaatcaacacaaatgaccatcaccacccaaaaaagttctcctggggctacagcacagagtactcttaccttggccacaacaacagcccccttggcaaggacccactcaactgttcctcctagatttttacactcagagatgacaactcttatgagtaggagtcctgaaaatccatcatggaagagctctctctttgtggaaaaaactagctcttcatcttctctgttgtccttacctgtcacgacctcaccttctgtttcttccacattaccgcagagtatcccttcctcctctttttctgtgacttcactcctcaccccaggcatggtgaagactacagacacaagcacagaacctggaaccagtttatctccaaatctgagtggcacctcagttgaaatactggctgcctctgaagtcaccacagatacagagaaaattcatccttcttcaagcatggcagtgaccaatgtgggaaccaccagttctggacatgaactatattcctctgtttcaatccactcggagccatccaaggctacatacccagtgggtactccctcttccatggctgaaacctctatttccacatcaatgcctgctaattttgagaccacaggatttgaggctgagccattttctcatttgacttctggatttaggaagacaaacatgtccctggacaccagctcagtcacaccaacaaatacaccttcttctcctgggtccactcaccttttacagagttccaagactgatttcacctcttctgcaaaaacatcatccccagactggcctccagcctcacagtatactgaaattccagtggacataatcaccccctttaatgcttctccatctattacggagtccactgggataacctccttcccagaatccaggtttactatgtctgtaacagaaagtactcatcatctgagtacagatttgctgccttcagctgagactatttccactggcacagtgatgccttctctatcagaggccatgacttcatttgccaccactggagttccacgagccatctcaggttcaggtagtccattctctaggacagagtcaggccctggggatgctactctgtccaccattgcagagagcctgccttcatccactcctgtgccattctcctcttcaaccttcactaccactgattcttcaaccatcccagccctccatgagataacttcctcttcagctaccccatatagagtggacaccagtcttgggacagagagcagcactactgaaggacgcttggttatggtcagtactttggacacttcaagccaaccaggcaggacatcttcatcacccattttggataccagaatgacagagagcgttgagctgggaacagtgacaagtgcttatcaagttccttcactctcaacacggttgacaagtaaggacccacagcccctacaatcccattattgggggctcataggaaatgaccccttcctaagaagcaaaaaaagagttaactagtttattcctgtaccagaaattctcttagcaaacatgtgtttatct

SEQ ID NO: 20641 - DNA, 2300 bp, Homo sapien
ccctctgtggaagaagccagctctgcctctttctcactgtcttcacctgtcatgacctcatcttctcccgtttcttccacattaccagacagcatccactcttcttcgcttcctgtgacatcacttctcacctcagggctggtgaagaccacagagctgttgggcacaagctcagaacctgaaaccagttcacccccaaatttgagcagcacctcagctgaaatactggccatcactgaagtcactacagatacagagaaactggagatgaccaatgtggtaacctcaggttatacacatgaatctccttcctctgtcctagctgactcagtgacaacaaaggccacatcttcaatgggtatcacctaccccacaggagatacaaatgttctcacatcaacccctgccttctctgacaccagtaggattcaaacaaagtcaaagctctcactgactcctgggttgatggagaccagcatctctgaagagaccagctctgccacagaaaaaagcactgtcctttctagtgtgcccactggtgctactactgaggtctccaggacagaagccatctcttctagcagaacatccatcccaggccctgctcaatccacaatgtcatcagacacctccatggaaaccatcactagaatttctacccccctcacaaggaaagaatcaacagacatggccatcacccccaaaacaggtccttctggggctacctcgcagggtacctttaccttggactcatcaagcacagcctcctggccaggaactcactcagctacaactcagagatttccacagtcagtggtgacaactcctatgagcagaggtcctgaggatgtgtcatggccaagcccgctgtctgtggaaaaaaacagccctccatcttccctggtatcttcatcttcagtaacctcaccttcgccactttattccacaccatctgggagtagccactcctctcctgtccctgtcacttctcttttcacctctatcatgatgaaggccacagacatgttggatgcaagtttggaacctgagaccacttcagctcccaatatgaatatcacctcagatgagagtctggccgcttctaaagccaccacggagacagaggcaattcacgtttttgaaaatacagcagcgtcccatgtggaaaccaccagtgctacagaggaactctattcctcttccccaggcttctcagagccaacaaaagtgatatctccagtggtcacctcttcctctataagagacaacatggtttccacaacaatgcctggctcctctggcattacaaggattgagatagagtcaatgtcatctctgacccctggactgagggagaccagaacctcccaggacatcacctcatccacagagacaagcactgtcctttacaagatgccctctggtgccactcctgaggtctccaggacagaagttatgccctctagcagaacatccattcctggccctgctcagtccacaatgtcactagacatctccgatgaagttgtcaccaggctgtctacctctcccatcatgacagaatctgcagaaataaccatcaccacccaaacaggttattctctggctacatcccaggttacccttcccttgggcacctcaatgacctttttgtcagggacccactcaactatgtctcaaggactttcacactcagagatgaccaatcttatgagcaggggtcctgaaagtctgtcatggacgagccctcgctttgtggaaacaactagatcttcctcttctctgacatcattacctctcacgacctcactttctcctgtgtcctccacattactagacagtagcccctcctctcctcttcctgtgacttcacttatcctcccaggcctggtgaagactacagaagtgttggatacaagctcagagcctaaaaccagttcatctccaaatttgagcagcacctcagttgaaataccggccacctctgaaatcatgacagatacagagaaaattcatccttcctcaaacacagcggtggccaaagtgaggacctccagttctgttcatgaatctcattcctctgtcctagctgactcagaaacaaccataaccataccttcaatgggtatcacctccgctgtggacgataccactgttttcacatcaaatcctgccttctctgagactaggaggattccgacagagccaacattctcattgactcctggattcagggagactagcacctctgaagagaccacctcaatcacagaaacaagtgcagtcctttatggagtgcc

SEQ ID NO: 20642 - DNA, 2300 bp, Homo sapien
caggatggagtgcagtgctgcgatcttggctcactgcaacctccacctcctgggttcaagtgattttcctctcttagcctcctgagtagctgggaccacaggtgcgcaccactatgtctggctaatttttgtatttttttgtagagacatggtttcaccatgttggccaggctggtctcgaattcctgacttcaagtaatccacccacctcagcctcccaaagtgctgggattacaagcatgagccaccatgcatggcctaaagcttcttttaaagccaccaagtcccttcccatgttagcccactaatccatgggttagtcatgaatggattaatctattcatacggacagagccctcatcacccaatcacctcttaaaggccccacctctcaatactgccacactggggattaagtttcaacagagttttggaggggacattcaaatcatagtaatgcccaaagtgaaaaatcttccctgcacttttccctcaacaaaaacagccagagatagtgagctgccaggaaattcttttttttttcctcttctgtcctaaatcagcatcgctagacctttacatgattcaacctcatcttcttcaccctctgggtcatgaaattttatttatttatttattattttcttgggacagactctggctctgtcgcccaggctgaagtgcagtggtgtgatcttggctcactgcaacctccgcctcccgggttcaagcgattctcctgcctcagcctcctgagtagctgggattacaggtgggcgccaccacacccagctaattttttgtatttttagtagagatggggtttcaccatattagccaggatggtctccatctcttgacctcgtgatctgcccacctcagcctcccaaaatgctgggattacaggcatgagacaccacgcccagcaggccagggtcatgagattttaatcaagagcaacttccactgattcctgagagtgcatctgtgggcccctgctctgatctgaacagaagtgccgtgtcttctctgacctccacttctcaattcaagagccttagtatctgccagtatcacacactgagcattagctccatctcatgggggtgtaggtaggggctctatctgcatctttctttctttttttctttctttcccttcctcccttcctcactccctcggtcctctctttctttccttttctttcttccttcctcccttcctccctccctccctctctctttctctctttctttctttccttctttctttctttctctcttccttccctccctccctccttccttcctttctctttctttctctttctttctttttttccttccttccttccttctttctctttctctccctcccttccttccttccttccttccttccttcctttctttctttctttctttctttctttctttctttctttctttctttctttcttccttccttccttccttccttccttccttccttccttcctttcttttctttctttctctttctttttgagacagagctcttattacccatgctggagtgcagtggtgtgaccttggcttactgcaacatctgcctcctagggtcaagtgattctcctgcctcagcctcctaagtagctgggattacagacacatgccaccacacccaatatttatttttattaaaattttttttaaaattatttttaaaaaattaaaaataattttgtatttttagtagagacggggtttctccatgttggtcaggctgatctcaaactcccaacctcaggtgatcctcccacctcacctcccaaagtgctgggattacaggcatgagccaccgtgcccagcctggttcctggtttctaagacatcacacacacacacacacacacacacacacactcacacactcagagagagagagagagagaggatcattaagacatgatacactaagaaattctattctgcagacactgagaatccgttaaaaagtttgaagggaagaattgagatcatcaggtgtttatttgaggaaattgtctgtggttgaactatcctttcctttctctccctgagatttggtcttctcaattagaagcgttgcacaattcccccaacctccatacatacggcagctcttctagacacaggttttcccaggtcaaatgcggggaccccagccatatctcccaccctgagaaattttggagtttcagggagctcagaagctctgcagaggccaccctctctgaggggattcttcttagacctccatccagaggcaaatgttgacct

SEQ ID NO: 20643 - DNA, 2300 bp, Homo sapien
tcaccaaaatatctgggaagccaggcatggtggctcgtggctgtagtcccagctacttgggaggctgaagcgtgaggattgcttgaggccaggagtttgagaccagcctgggcaacatggcaagatcctgtctctaaaaaacccccaaaacaaaacaaaaagctcttacatatctggaacgcagctcctattctagcactcatagagtctcctaggactgagattcctctgttggtgtccacagaacagacacagagaggaaccacccgagacctttcctcatagagaaggttcttggccttgcccgagaactactggtgttaaatctctgagaaatgtgtgaggtatgagaatttttaataagcacttggagagatgctgataacctctgaagcctgacactcctaactttaatattaggagaacatgagaaaacatatttagggttagaatatgaagggtctttctttaatcatacttgttacattatcatatacaaagtaatgcataaaatctatctatctgtaggtagtgtagagcacagtggctcacgcctgtaatcccagcactttgggaggcggaggtgggcagatcacaaggtcaggatatggagaccatcctggctaacgcagtgatacccgtctctactaaaaatacaaaaaattagccggccgtggtggcgggcgtctgtagtcccagctactcaggaggctgaggcaggagaatggcgtgaacctgggaggcggagcttgctgtgagccgagatcgtgccactgcactccaacctgggcgacagaacgagacactgtctcaggaaaaaaaaaaaaatctatctgtaattctgagagaatagtaacatgataaaaccgcatatacctatctggcattaaaaataagttaatgtcatcaccatagaacctacctgtaggattttctactcaaatcaccttgttttcttccagcaacaaatacactatcctgaattctgtagttaccattttctttgaaaacaggatgactgttataaaattctctgtaatttacttgcagtcttgtgggggagaggaggtgagcagcttgctaaacttcaccttatcttcactttcctgtggtgttttttttttttttaatggagttttgctccgttgcccaggctggagtataatggcatgatctcagctcactgcaacctccgccccctgggttcaagcgattctcctttcctggttcttgacacagctttgtattatttctgttggctggcgtgaagtctctgggggtccagacagagtcttccagccgttttcctggtatgtactttgttttattttatttattttttgttttttcattaccaaatatttttaataatcagaacagcagagtggtggcacatgcctgtaatcccagctactcaggaggctgaggaaggagaatcgcttgaacctgggaggcggaggttgcagtgaaccaagtttgtgccactgcactccagcctgggcaacaagagcgaaactccatctcaaaaaaaaaaagatgaggctgggcgtggtggctcacgcctgtaaacccagcattttgggaagccaagttgggcagatcacttgaggccaggcatttgagagcagcctggccaacatggcaaaaccccgtctctactaaaaatacaaaaattagccaggtgttgtggcaagcatctttaatcccagctacttgggaggctcaggcaggagaattgcttgaaaccaggaggcagaggttgcagtgagccaggatcaagccactgcactccagcctggccacagagcaagactctgtctcaaaaataaataaataaatttaaaaaataaataaataaaaataaaaaatgatgaccccttaaccatttccagaattaacaattattgatgctgtgctgtattagcttcaagttttgtaaaagcagtaaagtaatatcaatacaaaaggcaacacttatttattttcttcccttagaatctaccccttttcaagatggtgtttgcctctgttgacgttgctcccgcagtctagaaaacacatttgattgtctaattatcccattttttgatcatcaaaaacatgggacccagaaaccaaacagctgtttcagaatttcttctcatgaaagtgacagaggacccagaactgaagttaatccctttcagcctgttcctgtccatgtacctggtcaccatcctggggaacctgctcattctcctggctgtcatctctgactcccacctccacacccccatgtacttccttctctttaatctctc

SEQ ID NO: 20644 - DNA, 2300 bp, Homo sapien
agccgtggcgggcggatcacctgaggtcgggagttcgagaccagcctgaccaacatggagaaagcccgtctctactaaaaagacaaaattagttgggcgtggtggtgcatgcctgtaagcccagctactcgggaggccgaggcaggagaatcgcttgatcccgggaggcggaggttgcggtagctgagatctcaccattgccccccagcctgggaaacaagaacgaaactccattgcaaaaagaaaaaaaaaaaggaaaaaaaagatgagagatgaatgttggcgagggcatcaagcaaagtgaaccctagtacattgttggtgggaatgcagactggtacaacctttgtggaaaacagtattcaggctcttaaagaaatctacaacagaactactatatgacccagcaattcctcttttgaatatatgcctaaaagagatgaaataatcacctcataacgatgtctgcactttcattttcattgtagcattatttacaatatccaagttacggaaacaacctgaatgtccattgatgctcacatgaatacgaaatacaaaatagcagctatgtagtctgaataatattctatctcttttgtatttatatatgatgtcaacattaatatcatataatattgatatatatttcatattatattaaatattaatataatatgttgtatataaatatatacctattacataatagatattcccattatgttatatatcatgtaatatattatatgtaatatatgtatataatatactatatgaaatacatattatatattatatgtattattatatgtatatatgctatatattatggtgtatatattatgtattatgaaatatatattacgttatgtaatatagattatatattatatatgaatatcttatatccatatatattccatacatacattttatatgtgtgtgtatatatatatatacgcaccatggtccatcccctcaataatatattttccaaaacctcaaatttccttctctctgtcttttataatacctgccctggataatactaaccatctgtctctcctgcctatataattctgcccctactggttacatgggaagccttggtttcctaaagtgttgagattacaggtgtgagccactgtacccagcctgattctggaattttgtatatgcagactcctcctgctaaaataatatatattatatataatatatattccataatatatataacatacatacatatattattttagcatatattatataatatacggtaataatacacataatacataattataataaatatgatataatatatattccattgtataaaacatataatatatataacggaatattattcaaccttgaaatagaaggaggtcctgacatttatcacaagatgggtggacctggaggacattacgctaagtgaaataagccagacacaaaaagaaaaatattgcatgacgtcacttacatgaggaactttttttaatcaagagagacagctcaaatacacagaaataaagaatgaggcagttggggaagaaaatgggaagatgtgggtcaaaaaatacaaaatagcagatatgcaggatgaacaccacacaggtgatggtgattttacgcccttcccaaggtgtcattcagaggcacgtggtctccatctgaccctcactggtgatattgatttgatcacctggtccagatgttgtccaatttcttcgctgtacaatttctattactttttctccattccaacatacgagcagtttatagagaggcatttaaggcaattcaaatattctgctcgtcatgcaaatgtcccccagttgtgtcatgtagatgacaattcttgcctgattcaacctttaccactacgatggctacaaaatgctgtgggttgtggttgaaaatttgagtcttgagtagaaattggagaaatatgctggaccgtcagattccaccggggcacggccgccatgccaatccaaacttcaaaactacaattcccagcatcctctccgccccgcttccgtattagacgccgccaatgaagtcccgcgagaattggaaggcggcagtgaagcggaagccattactctctggagtcgattgccccgagacacatgggccaaggaggggtcagcggcgaattctttcggcctgttggggacccctcgtgtccccacgccagactggacctcccgtatgaacttctcttcgcatcggcggcggcttccgtcacctccgctcccccgatcctattcccagtcgtgtaa

SEQ ID NO: 20645 - DNA, 2300 bp, Homo sapien
tcttgaactcctggcctcaagcaatcttttcatctcagcctcccaaagtgctggtattacaggcgtgagccaccatgcctgaccttagaattattaaccattactagcggttagctaacaattggctctattattagctaactattaactaactattcactattattaaaaagacaagagttggccgggcgcggtggctcacgcctgtaatcccagcactttgggaggccgaggcgggcggatcacgaggtcaggagatcgagaccatcctggctaacacggtgaaaccccgtctctactaaaagtacaaaaaattagccgggcgaggtggcgggcgcctgtagtcccagctactcgggaggctgaggcaggagaatggcgtgaaccccagggggcggagcctgcagtgagccgagattgcgccactgcactccagcctgggcgacagcaagactccgtctcaaaaaaaaaaaaaaaaaaaaaaaaaaaaaaaaaaaaaagacaagagttggcaagggtgagaagaaaagggaaccccttgtgccctgtcggtggtaatgtagattggagcagacattatgggaaatagtgtgagggttcctaaaggaattaaatagaggccgggtgtggtggcttacgcctgtaatccccagcactttgggaggccaaggcgggtggatcacttgaggccaggagttcaagaccagcctggtcaacaaggtgaaaccctgtctctactaaaaaaaagaaaaaatacaaaaaatacaaaaattagctaggcgtggtggcacatacctgtaatcccagctactcaagaggctgaggcacaagaatcgcttaaacttgggaggtggaggttgcagtgagctgagatcacgccactgcactccagcctgggcgacagagaatctgtctcaaaaaataaaaaggaaaaagaaattaaaattttgagactctttctcaaaaaataaaaataataaaatcaaaaagaagaaatttaaaataaaagaaatttaaaataaaaagaaattaaatatgatccagcaatccctcccctggatatgtatccaaagaaaatgaaattgccactcgtaaagatatctgcatgctcatgttcattgcagcattacttgcaaaagtcaagatatggaaacaacctaagtgtctgctgatggagaaatggctaaagaaaatgtgatatatatgtatatgtacatttgtgtgtgtgtatatatttgtgtatatatattccattgtgtgtatatatatgtatgtgtgtgtatatatatgtatgtgtatgtgtgtgtatatatatttttacacaatttttacaatcaatattattccactgattgataaaataggaatagatcctgccatttgccacaacatggatgaatctggaggccattatgttaagtagaataagtcagatgcagaaagaaaaatattgcattttttcacttctatgtggaatattttttttaaagtcaaatatagagaataaaacagtggttaccagaggaggggtgcggctgggggagaaaatgaagaagatgtaggataatggatataaagtagcagatatataggataaacgagtctagagatccagtgtacccatgaaaattatagtcaataacagtatgtagtattccggatttatgctacatcagtagactgtagctgttcttgctataaagaaaatgggtaactatgtaagacgatggatatgttcatttgtttcactacagtaaccattttactatctatatgtatctcataacatatatagtatacgttgaatatacagaatataattaatttttaaataattaaatatatgggtggttgagatgagagacttcattttttagaattccatttacgtatgaaagattagacaaaatgagtccataaatcacaagtaaatagtatggacaacatttctattacatgaaggatgcccgttggatgttaactgatgtttctcttaccgcttccttttaaataaataaataaatataattttaaataaatatgtatattttaaaataaatacatatatacatagttttatttttattttattttttatttttattttttgagacagttctccctctattgcccaggctggagtgcagtggtgtaaacatagctccctgcagttgcaaattcctgggctcaagtgatccttccatctcagcctcccgagtagctgggactacaggtgtccaccaccatgcctggctaatgacctcttcttttgtagatacatcagctacatggaagcagga

SEQ ID NO: 20646 - DNA, 2300 bp, Homo sapien
tcaagtggcagcttggatatagtccatgtgccatagtttgctgaccactggcctagaatacaagaaagtatgaccagctgtgggcctggcttcaaaattgtgcttatgcagtctcctgggcctctcagttttgtgagggggaaaaaaatgaaaggctgcttttctctcggtgtatttttattcattaaaatcccatctagatttgaccctgtgtttaatgttgtagtgattgctatggtgggaataaagtaacaggtgaagttatttctgtaataaggaatcgatgatgtcaatgtggaaattatttcatttccagagcatttttctcatttcttcaatatgttctggacttttctaggccatcataagactggcattggtcaccatctatgatattgtgaaatacatatttggggctgggcacggtggctcacgcctgcaatcccagcactttgggaggccaaggtgggcagactgcctgaggtcaggagttcgagaccagtctggccaacatggtgaaacgctgtctctactaaaaatacaaaaaaaagtagctgggcatggtagcacgtgcctgtaatcccagctactcgggaggctgaggcaggggaattgcttgaaccagggaggtggaggttgcaatgagccgagatcgcgccactgcactccagcctgggcgacagagcgagaccccatctcaaaaaaaaaaaaaagaaaacaatttggttttcatcctatttcctaggacagagttcctaaaaacccttgtaatctctagagcaataagagcgtcttttgtgtgctcatgagatggttggtgtctggaagcccctagagagactcagaatgggggctggttcagaaagacccaggcaagatcagaggattgggacttaaatcagccatgcctgtgatggagcctccttaaaaacccaaaggactggcttgaggagctcgtggatagctggacgtgtggtggttcccggagggtggcatgccaggagagggcatggaatctctgcaccccttcccagcataccttggcctgtccatctcttcatctggctattttatctgtgtacttcgtaatgaccttggtgataaaccagtaaacatgtttccctgagttctgtgagttgttccagcaaattaatcaaactcaaggagagggtagtaggagccctgattttagccagtcagaagtataattgacagccttttaacttgggattggcatctgaagtgggaggcagtttagtgggacctcctgtggaatctccaacctgtggaatctccaggtagatagtatcagaagcaagttgtaggatacccagctggtgtccactggggaattgcttggtgtttgtggaaaatatcccccacacatctggtgtcagaagtgttctgtacagtattgagtgactatgtaagagggtaggaaaaacactttgttttttcctagctcattggcatcagattgtggggagataaatttaatgtttttttgtttttgtttttgtttttttttgtccaggctagagtgcagtggcatggtcgtgctcactgcagcctcaaccttgtggctcaagcaatcctcccacccacctcagcctccggagtagctgccaccataggcacatgccaccacgcccagctattttttaaaaaaattttagtagagactgattctcactatgttctgttgcctaggctggtcttgaactcctgggctcaagtagtcctcctgctttggctccccaaagtgctgggattataggcttgacccaatttgcctggcaatttagtgttttagaagtattaaatctataagccaggatttgatcagtgatgaattatgtgtggatagaaagagagagagatttgttgactgagccctagagtagatgctgggatcttctgaacttcctatgaattgactctcatttcctcgatgttgtgagcctcatctgtcctcttgtacacattggaggaattgtacctttctgaacagaatttgtggtatgttttaggactcagtagtctttgaggatgtggctgtggactttacccaggaggaatgggctttgctggatcttgctcagagaaacctctacagagatgtgatgctggaaaacttccagaacctggcctcactaggtaagaatggcaagattctttcatgtagttgtttagaaagttattttatctcactaaattgactttattctaggatttgggctgaggaatgggaagacattggtaagtaagacagatatggtcactgaccccaaggaacttac

SEQ ID NO: 20647 - DNA, 2300 bp, Homo sapien
gagaacctttatgtctagctaaagtattgtaaatacaccaattggcactctgtatctagctcaaggtttgtaaacacaccaatcagcaccctgtgtctagctcagggtttgtgaatgcaccaatcaacactctgtatctagctactctggtggggacttggagaacctttgtgtcgacactctgtagctagctaatctagtggggatgtggagaacctttgtgtctagctcagggattgtaaaggcaccaatcagcgccctgtcaaaacagaccacttgactctaccagtcagcaggatgtgggtggggccacataagagaataaaagcaggctgccccagccagcagtggtaacccgctttgatccccttccacgccgtggaagctttgttgtttcactctttgcaataactcttgctactgctcactctttgggtccacactgcttttatgagctgtaacactcaccgcgaaggtctgcagcttcactcctgaagccagcgagaccacgagcccaccgggagaaatgaacaactccagacgcgccgctttaagagctctaacactcaccgcgaaggtctgcagcttcactcctgagccagcaagaccacgaacccaccagaaggaagaaactccgagcacatccgaacatcagaaggaacaaactccagacgtgccaccttaagatctgtaacactcaccacgagggtccccggcttcattcttggagtcggtgagaccaagaacccaccaattccggacacattagtacaggtctttgaataaattttgcttctaacagaagttactatttattcctaattagatgggcaggaaagtctttgaagaggaacctctactttactttttactgtagagagagtagtctttgatcttggggagatggggtttttccttttggtttagcttcaggaagtttgtgttaattggccttaggtgccctgcccccagccccaggtgtttttcctttgatttaactttaggaaattatcacgaattggccttagattccccgaccccagatcttggtgttttcacttttaggaagtccgcatgaatcttatctatgctcttaactacgtcctaatttttgtgttttttgtcttttttataggaatagggttttgccatattgcccaggctggtctcgaactcctgagctcaagtggtctgcctgcctcagcctcccaaagtgctgggatcactggcgtgagccatcaggcccagcctctatgtgctaatttttgaacaaattccaataggagcattctagtctctgagtgtgagatgaccaaaaatcaagcccttgtgaggctgaatagagtcgggaggcagggaacttaaggctgtttcaggccgacttcctagaactaaattgaaaggaaaaccctcactttcctcgcctaaataacaaaaggaccagaggctactccctttgaccttttctgctggcagataggaaattggctgtctgcaacaaatcagactgatggccggttgagtcttcatttgcatagaagtgtaactttgtaacgtcgtaacttcaccctagcctttgattggttgctttttgcaaccaatcagatgtttgcacaggagtgtgacctttgtaacttcagactctggttggctgctttctgcaaccaatcagactgaacgcgggctaccgcttcatttacaggaggtgagcatgaagtggccaatgggaaaattctaggaggtattgggactcatgaaggttctgtttcggagcccttgagctgccgcttggccagttcccacactgtggagtatgctttcgttttcaacaaatcccagctcttgttcttttgttgcttcattctttctttgctttgctgggcgttttgtctaattctttgttcaaaacgccagtaacctggacagcttgcagtcaagaccccctaccggtgacacttgcgctcttcggggaggtaaacagcatttcctctcagctctgggttggaaaaagccgcagcagctgatgggcccgggaacccgaggccccgccccctaggtggtcctagcctttgcgcgtgcgcggcgtgtctgcgtgggcgcatgcgcataacggccgccatcttaacagcgcgttcccgttggcgtctgaggtaagtttttgtttctgggcggcgttcggtggtgtcccggtgcagccacgcgagagtagaagggtggaaaggggaggtgcccagtgaaatggagcctgtcccgtgcactttcgggcatttcgagcatcttgtgggctctcccaagtcgcg

SEQ ID NO: 20648 - DNA, 2300 bp, Homo sapien
aaacccctaacatgagtgttacagatgcctgtgagggtatcttgggggtttctacactgcctaccccaaacctgactgcagtcagagccaacagggccccacgtaggcaaaggctatgtcattaattctcaaatgagattcgtccaagcgggaaatgcacatctagtgcagtagttttaggccagcctttttcagagcctcaggctctgcctgtcaccttgaagacatccatgtgggtcccctcagggcttctctttgccataaaaataaaatgattgctcccaccaatgtttgcgtccatgggagaggaggtaggagcagcagtacttgtcctgtgtgtgggagacacttgaagggctcagtgggaattgtcagcagcagggaacagaacaggtggtgagaagagtcattccactgagtttctgggcctttgactccctgaaacttccttctcctctatccaacctccctctccagaaaaaaaaaaaaataatttaaaaatggaatcagtgtaatcagtgaagtagctgtattccagtgaacaagcagcctgcccttgcatctgcatgcatgcagccttggcgttttctctagaaaaaagagaggttctacctcgtgcatgaatacaggtggaggccaagaccagcattaacaaaggctgtgtgtttgccatggagctcaggagggctaacagtcattttacttctgcctccgaccatcacactttgtccccagaacaaagccaagagtccttggtcaatgaaagtgtgtaaatatcctcacacttcccctagtagttcctttttaggctgtaatcatgtgctaaagaaaagaacctaacttcttaaaatctttccctttttggatgtagattgaaatttttgttttaaacacaatggccctaatgtctaaatctaatgttagtaattaatccctagtgctttaaggatcttctgtttataggcagttattttatggagctggtctctgtgagaggcacagactgccaggaggggttgagatttcctttaaccaggattcttagttctgaatggctctagtgaataacattaacaatgattctctggccgggcactcacgccggtaatcccagcactttgggaggcctagacgggtggatcacttgaggtcaggagttcaagaccagcctggccaacatggtgaaaccccgtctctactaaaaatacaaaaattagccgggcatggtggcagccgcctgtaatcccagctacttggtaggctgaggcaggagaattgcttgaacctgggaggcggaggttgcactgagcccacagtgcgccactgcactacagtctggatgacaagcaaagctcaatctcaaaacaataatttttaaagtaatgattatcttaaccattcttaaatccttctgtctagtaggaatcttattcatgggagtgtctggaaaagggacaaagagcggctattgagatttttttaaagcctggatttgggatgtctgaacagtgaataactccaaagccatttaaaaatcatctttttttctaccaccggactgagcttttcagttttaattccaaggttccaatcatatagatgtgagtcaaaccctgttgggccaaacaggatctcctttgttggcggataatttcaagtgctcacagagaccctccgtttttttttaaatacctggacttaattgtttaaactggagtccggaccaaaacatctctgacctcgggggtcttcctttggtcaggaagaggggagggagcaattggacccctttccctctgcggctgcagagtccaattttcctctggggacatttgctttttcccttggggaagacagtacggattctagttctgtggactcttttacttagctttgagacccaagcaagttaattggcttgtgcctcttattttactctaatgcaatgaataaagacagtcccagccttcgccctaagggagcaggagcacctgcgatgccccgttcccaagtcctcagggcgaatccgccaaatgtgcgagctgggcagcccacccctttcagctgctggccggaagcggaagtgggcgtccgtcgcctcgccatctcccatagctgtcgcctgcagctgagaaagggttgctgtcccagcaggccaggtccaggtgcgccccactagtgaggccggcggaatcgggagggaaggggtcaagggcacagtgcgcagccccggctgctccagaccttgcctgcagcttcccgccccagcctccggctatcgcggcgtttcttctcagagg

SEQ ID NO: 20649 - DNA, 2300 bp, Homo sapien
gtctctgtcacccaggctggagtgcagtggcatgatcatactcccactactctcagattcaagcaatcctcccaccctagcccaccaagtagctgggactactggcagatgccaccacacccaaataatttttttaaattgttttctgtagagatgcggtcttgctgtgttgcctaggctggtctcaaactcctgctctcaagtgatcctcctgcctcagcctcctgagtacatttatatttaaagtaattattgatgggtaagtacttactgttgcctttttgttcattcttctgtggctgttgtacagatgttttgttgctttcttcctcccttgtcttcctttgtgatttgatgactttctgtagtgatacgctttgatttctttctcttttctccataatataggttcttgctttgtggctactatgaagcttaaaacatcctgtagttttaatagtctgttttaagctgttaacagcttagctttgattgcatacaaacaatttatactcttccatttcccacattttatgtttttgatgtcacaatttacatctttctatattgtatattaacaaattattataactttttaatatttttatcttttaatcttttacactagagataagttatttagataccactgttacagtattagggtaatctggattgagtatataattacctttaccccagtgggttttataatttcatatggtttcatgttactaagtgtcctttcttttaagctgaagaatttactatttcctataaatcagctccattactgatgaagcccctcatcttttgtttgtccaaggaagtttttatctctccttcatttctgaaggccatttttggcaggtaaaacattcttggttggcagtacagtcatgcactgtgtaaagacattttggtcagtgatggtccacatatgtgacagtgctctcataacattttaatagtgctaaaaaattccaatcacctaatgacatagccagtgtaacattgtaaagcacattactcacatgtctgtcatttaaacctgctgcactgccagtcatgtaacagtagtaaatatggttatgtacagtagattatatacagtacataataatgaatagtaataagtgaccacattactggtttatatatttttatactatttattgttattttagaatgtattccttctacttactaaaaaagaaaagttaactcaaaaacaagcctcaagcagatgcttcagaagacattctagaagtcattgtcaccataggagatgtcagctccgtgcatgttattgcccctgaataccttaagtgggacacggtagaaggtgtcagacagtgatactcaagatcctaaccctatttaggcctagattaatgcgtatgtgtcttcgtttacaacaaaaaagtttaaaaagtaaaatcgggcaggcaaaaagggcctggaaggtaggctactgagttaagaagacagagtcctagctctgctataagatttgcagcactagattttgatacatatacagctaagtgtactaaatgttgttctggaatgtcacccttttattatgaaatgcaaatatgctcacctttatggtccttatgagttactccttattgttctaagtaatttcgggatattaactcagcccaaccctatgaaattggtcccattctaacaatgaggaacgtgagggtgtgatataagatattccaaactcatcttgaagatttcttagtctatactagactcagctatttctccagtgagtcctggtttctgtcacgggtaaatgatattcagagacagttttgcactttagaggctcattcctcctgagctgttagcagtcataagcctttttagtggttcaggctagaaaaaagtccaagaaaaaatgaaaaatgcatactatatttctaatttgaggatatactgtgttcttggataaggaggcaaattgtaactacactctatgtgtatgttgttaccctttagtaagaagaagcttcccagcctgctagtgttgaacatctagcaggcctagactctaatggcttctgtgttctcctctagctctgcctgcttaggactctgcccagccaggaaggaaacctacaggaggaagaatggctgcagggtggctgacaacctggtcacaggtacacaagaaatttctctatttccaaaagcacactgccattcctgaaaagaacacatctcttgcccctgacctgaagcttcacagcccaatctgagctggcttcatcttccgcagctcc

SEQ ID NO: 20650 - DNA, 2300 bp, Homo sapien
ggttttcccattcaaagatttcttttagtgtgattaaaatgttccaaaattatgtttgaacaacactgcgaatgtactaaaaaatattgaattatatagctttaagtgggtgaactgtgttggttatatgtgaattgtatctcaatacagctggtctaaaaaccaaaagggaaaaatcacaataatagccacatcattgggagcgtaaaaatttaatgtctattaagcatttagggtagtaagatttaaaaaacagctaccgccaggtgcggtggctcacaccagcactttcagaggctgaggtgggcagatcacctgaggttaggagtttgagaccaccctggccaacatggcgaaaccccatctctactaaaaaaaaaaaaaaaaaaaaatacaaaaattagctgagcgtggtggcgcgtgcctataatcccagctactcaggagactgagaaaggagaatccctagaactcaggaggtggaggttgcagtgagccgagatcgtaccactgtattccagcctgggtgacagagcaagactgtctcaaaaacaaacaaacaaaaaagctaccattattattattattaccacggaatattattagttgatacaaaaccactggaatgaaaagattatgatcttgatattggcataagtaaatgtattactggcatagagtctagaatcagatacaggtatacataggaatttatagtttaataaacatggaatttgaaatcagtaaatcaaggacagtttatcaatatgtggtactacaataattggccgtgtttctggaggaaagagatattgtatccactatcccacaccacatactgaaacacattccatgagtatgaaagatttcaatgtttttaaagtaatatgctgcagaagaaaattaggaaatctatatgtaatctagagtttatgaagacttcttaatgcaagagaggaaacttaaaaaagaaaatctttttgagttgaaaaattaactgcaaaatagttaccagttcagtagattcacaaaatatttgataatgtacatgaacagttcttcatgttagtaaaacagtgttcaaaataactttattaactccataaaggccacccactacaaagcacagcaaaaacgatttctggagaaactagaatcactcctgcagaagtgaatgcctgatatcagtgctattttacaacgcggtattttacaacgaggccctggaactcactgtaagatctcagaaaacaatatattagtcaaagaaaaaaaaatcaacatttacaaaaagtatcagcatattgaatacacaaaggaatcaactattagaatttagcatggcgtccagataaatgaaataaggggaaatattggcctcaagttgaattgggcccggcgccgtggtgcacgcctgtaatcccagccttttgggaggctgaggcgggatgattgttggagcccaggagtttgagatcagcctgggtaacatacctcaactctgggggaaaaaaaattagccgggcatggtggcctgcgcctgtagacccagctactcgggaggctgaggcgggatgatggcgtgagcccatgagtttcgccccacagcacgccagcctggactacacagtgagaccctgtctcaaacaaaaacaaaataaaaaactaaaactagattgaatgaatggaggagataggccatatcatggactggcaggattatcaaaggaagcatcattttgagggtgctaggaacgtgggaggaggtgagaataaaagctttttgtgagcattgtgcacatcctgtgggggagcccccacctctaactttgccaacaccaccgaccccaccctaggttagccccgtccgcagggctggttctaacctcagccttgtgctctgggccccttttggcctccatccctcaaggtgagcagactccaaggcctccaaggcgtctccgtagccactggggagtaaaccagaatctctctgcctgaggttgttcagctcggctgaggttgcagttcccgagcgctcctccaggtttgaggctggaggcggaagtgacgtcacggagcgctgctgtgttttccggcgctttctccgcgccgccaaacccgttttcttcctggtggcgtttgggcttaatacagctttggcgaggtcggatgacgggtgggagccagcggtggaaggggtggcgaaagtaccggtttgccccaggccgccgaggggcctccttagagagaccttgcctgctccgctcgcgtccgccggggccgcgcgggtcctcctg

SEQ ID NO: 20651 - DNA, 2300 bp, Homo sapien
ctacttgggaggctgaggcagagaattgcttgaacccgggaggtggaggttgcagtgagccaagatcatgccactgcactccagcctgggtgacagagcgagattgtctcaaaaaaaaaattaagaaaactagaaacagaagggagtttattcaacgtgacaaaacgcacttacgaaaacacagctaacgtgatattcaatagtgaatgcctgaaaattctccctaagaccaggaaggagagaaagatgtctgatttttctattgttattcaacattctacaggaaattctttttttttttttttttttgagatgaagttttgctcttgtcacccaggctggagtgcaatggagccatctccactcactgcaaactccgtaacctccgcctcccaggttcaagtgattctcctgcctcagcctcccgagtagctgggattacaggtgccaaccaccacgcctggctaattttttgtatctttagtagagacggggtttcaccatgttggtcaggctggtcttgaactcctgacctcaggtgatccacccacctcggcctcccaaaatgttgggattacaggagtgagccaccgtgcccagcctctacaggaaattctagccagagcaattacacaagaaaataaaataaaaggtttctcaattagaatagaacaaataaaaatatatttataggtgatatttgatatatagagaattttgaagaatctacaagaaaactagcagagcttgtaataaattccgtaaagttgcacagtacaacatcaagagatgaaaattagttttgtatctatacaccagcaatgaacaatcagaaaaggaaactgagaatgtgatcccttttacaaataagttacatgggaataactttaccccaagaggtaaaatatttgtaaactgaaaatttcaaaacattactgaaagagtttaaagaagacctaaatagagagatattgtatattcacacataggaagactcagtattataaagataccaatataacccgaagattcaactaaatctctaccacaagtccaacagtcctttctttttctgcacagaataagtgaagaatgcctggtatcagtgttatttcataaagtagtacaggaggctttgaatcatttgataagatttgagaaatagtaacaaatacattgttgaagaagaaaaaaaaatacaataaggccaggcatggtgcatgatggctcacgcctgtaatcccacttcgggagtgcagggcgggcagatcacttgagcccaggagttccagaccagcctgggcaacatggttagatcctgtctctacaaaataataataatgatgataataataataatacaaaaattagccgggtgcggtgcgcccgtggtcccagctactcgggaggctgaggtggaaggatggcttgagcctggagaggtggagactgcagtgagccgtgttcctaccactgcattccagccttggcaaccgagccagaccctacctcgaagaaaaaaagaaaagaaaagaaaaaagaaagaaaagaaaaaaattgcaatatttacagaaagtatcgataactgaaaacgcagaggaatcaatgattagagtttagcaaggtcagataaataaaaagaaataagagaaaataaagttctaaagacgtgatcgaatgcaggaagcaggccattttgtggattggcaggttatcaactggagagaatcctgaaaggggtccaggaacgtggggaaagtttctaatgagcatcctgaggggcgagtccatcgcccgacgtttcgccttcctggtccattctgccaccgaagccaccggctgggtctggtcccacctccagccccgcccccgggcatgggccccgcccacagccctgatttaacccccacctttctctgtgggtccatttctctcttgcccacccaggcactgagccgaccccttgatacctccgcacccacgcggagggaaactagaatcctgaagagttccatcctgtccaactgcccacacaacgagccacgccccttccaatgccccaaacggaagtgacgttgcggcgcgccagttctctcttttggtcgctggcgcctgtttcctcagagccactttttcctttgtgttgtctggtcgttcactactttggtgaggctcgtgtggactagtgggttgggcggtgtttcggggggtggcagaggtcacaatcgacccagggtaatcgaggaacctccttacagaggcctggaccactccacaggagtccgcaggagtcgcggagc

SEQ ID NO: 20652 - DNA, 2300 bp, Homo sapien
gaacgcacagtgcccagaaaccatacacctgtaaggaatgtgggaaggcttttaactattccacccaccttaaaattcacatgcgaatccacactggagaaaaaccctatgagtgtaaacaatgtggaaaggccttcagtcattccagttcatttcaaatacatgaaaggactcacactggagagaaaccctatgaatgcaaggagtgtgggaaagccttcacgtgttccagttcctttagaattcatgaaaaaactcacacagaagagaaaccctataaatgtcagcaatgcgggaaagcttacagtcatccccgttcacttcgaagacatgaacaaattcactagtgagaaactgtccatgtaataaatgtgggaaagctctcatttgttccagttcactttaaagacatgaatgaactcactctggagagaagaagctgcatgaaaattacttaattcctgtaatcccagcattttgagaggctgaggtgggtggatcacttgaggtcaggagtttgagaccaccctggccaacatggtgaaaccttgtctctactgaaaatacaaaaaatttagccaggtgtggtgggcacctgtaatcccagctacttgggaggctgaggcaagtgaatcacttgaacccaggaagcagaggttgcagtgagcagagatcatgccactgcactccagcctgggcgatggagtgagactccatctcaaaaaaaaaaaaaaaagaaaattatttgattaaattgagtctgttagagtacatccctaatccaatatgattggtgtccctataagaagagaaagacacaactgagacaacaaatagaagatgatgtgaagtcatcagatgatggccatctgcaagccaaagacagagcactgggacagatccttctatcaaagccaccaaccctgctggcaccttcatcttgggcttccagaactttgaacaaataaaattctcttgtttgagccacccagtctgtggtattttgttgtggtggctctagcaagtgaatacagtaagcaataagcaaaaacgtttatagattgtccaaaagccttaatattcacatgcaaagccacactggagagaaactatatgaatgtaagacgtgggagagccttcattgagtcttcagtcctttctacatacaggagaaatcacataggagagaaattgtatgaatgtaaggagcatgaaaaagcctgtgaatgttcactatattttaatattcacatgcaagttgtctggtcgtagaccatgtgaaaatagaggagaaaaaaggaaagaaagtttcttttactgtgaacgcaaggaatgtgaccccatacaccatactggaacttggagtggactgaaatcccattaggattgtggaaaagcttacattaatgttttctaccttctagaaggtgtaagaagtcgaactggagagaagccttttacctgtaatgcatgtaggaagccttacattaattccacagaattttttttacacatgtaaaattacctcagaaccctgggaaggtaaggaatatggtataacctttaaatatttcacatgccataataagtacatgaattctgataatactgtaccgtttcttgagtagtgttagtaccttatactatcaaaataatcctaaatcctccctctcagaccttccatcattactatatttcacttttatgcctataaacacacacaaattagcatatgtaatctaatacattgtagctatttttcagaagttatcagatcaattaagtattagaaaaataaacatttttattttaccttcacttcttccttctatgctcaaagttggatgtaattcttatacttgatcctcaatacttaaagcatttccccccctctggcttctatgaaaattttttgttatctttgatattctgttatttttaaatgatatgcctaggtataggtttttggtgctcgtccttcttggtgtttgcttagcctcctggatttgcgttttggtgtctgagttaattttgagaaattctgtcattgtttccctttttttttctttccatctggtatttcctttatatgtaggatacatcttttgtagttatcccacagttcttatatcttgtttttttattcttctctttgcttttcaggtgtggatgtttctgctgatatattctcaagctctttagttggctgtttcttggccaataataagcctaccaaagacattcttcatttctgttacactgtcttcaatttctagcatttctttgtggttcttagaatt

SEQ ID NO: 20653 - DNA, 2300 bp, Homo sapien
aaatgacgtcagcggtgcgccgttccttttgtgacgccggctgtgagcgcctgagagtctttttgcctttcagagttaaggcctcactggcctgggtgagttccgaggagatgaactggttttggggtgaaggacgggtttggcccggacgttagagaggcctggcccgctctgctcgtgtctgctgggcccgctagcgtccgctcggaccgtcgctcctcgggaggagtcgggtttatagttacggtgtccgcagggtgttttcatctgtgcgcccctctccaaaggcctccaaagcagcgtttgtgaatttttttccggcaggaaaataattgctgccttttgcatccgcgttggctccgtccccaggatcttcccggttcagggacctggcgatttctgagtgttccggtgagcactgggtgaaagttggttctagggggccttttctgtcttctcttatgcaaacgaatgtttcatctgtaagtttggtttcgtcttattgtgttgtgttttatttttgaccattactttcatggcgaaagataaagatgctttttaggtttatagggtgtgcgtatttgtgtatgtgaatataaacgtttgtagaccgcaagtctttctgctaaagaatactaagaataataattcattatcttcgaatggagttcctaggcctgtacatcccaagagagcttcttaatcagacctccagagggaaaggatgaaggctttattattctagtatcacaataatcaaatttacaatgaacaggatggttggattaaggagtttgaaaccagcctggctaagatggtgaaaccccgtctctactaaaaatagaaaaaaaattagccgagcgtggtggtggggtcttggaatctcagctatttgggagactaaggcaggagaatcacttgaacccaggaggcggacgttgcagtgagctgagatcgtgccactgcactccagcctgggagacagagtgagcctccgtctcaaaagaaaaaaaagagaaacgaaggatgtgtgcattttaagctacattgattgtatatcaatgaaaaaaaaaaaaagctggctgggtacagtggctcacacctgtgatcccagcactttgagaggctgaggcaggaagatctcttgagcccaggagtttaagaccagcctgggcaacatagcaagactccatctctccaaaaaaaaaaaaaaaaaaagagttaaatattctatacagatgccaccaaactgaatatttgtgggcctagtcagccctaggacccctagtttgagacccctgggagtaggtgtgatctataccaggagtccagaactgtggtttttgtgactttagggttttagtcttattggtagaaggaggcctatagagtttttgtgaatttggttcatggataatgaactgcggaactttcactgtttatcatcatttgactcccattctgtaggtgattgtttgagccactgtttcatgtttgattaattaatgattgtcattattattattattattttttttttgagacagagtcttgctctgtcacctaggctggagtgcagtggtgtgatctcagctccctgcaacttccatttcccaggatcaagcgattctcctgcctcagcctcctgagtagctgggattacagccgcacaccacgcccggctaatttttgtatttttagtagagatggagtttcaccgtgttggttaggccggtcttgaactcctgacctcatgatcttctggcctcaggctcccaaagtgctgggattacaggcgtgagccaccctgcccagccaaataaaaccaaactttggtggaaaaaaattaaccagataaatactatgaaaaggtagttctctttgaagacccataaaacagaccagtgttaggcacagagtggtttggccttgcctctctgacagtgtgagctggggatgcagatttgatttgagtgtttccaatcaaggcccagttgaggctacccaatacttaaaagtgtattgtgagattattttttctatgtgtgtgtgcaaaacttgtacttgcattcaggttctggtttaccacttcatttttttttgtttgtttacttatttttatttttgtttctttagagatagggtcttgctatgttgcccaggctggtctcaaacttctaggctgaagcagtcctcccaccctggcctcccaaaatgctgggattacaggcatgagctactgccccagccggtgtatatgtttgatggctgatgattaagtactgcttgttgattattga

SEQ ID NO: 20654 - DNA, 2300 bp, Homo sapien
aaaataatctcacaatacacttttaagtattgggtagcctcaactgggccttgattggaaacactcaaatcaaatctgcatccccagctcacactgtcagagaggcaaggccaaaccactctgtgcctaacactggtctgttttatgggtcttcaaagagaactaccttttcatagtatttatctggttaatttttttccaccaaagtttggttttatttggctgggcagggtggctcacgcctgtaatcccagcactttgggagcctgaggccagaagatcatgaggtcaggagttcaagaccggcctaaccaacacggtgaaactccatctctactaaaaatacaaaaattagccgggcgtggtgtgcggctgtaatcccagctactcaggaggctgaggcaggagaatcgcttgatcctgggaaatggaagttgcagggagctgagatcacaccactgcactccagcctaggtgacagagcaagactctgtctcaaaaaaaaaataataataataataatgacaatcattaattaatcaaacatgaaacagtggctcaaacaatcacctacagaatgggagtcaaatgatgataaacagtgaaagttccgcagttcattatccatgaaccaaattcacaaaaactctataggcctccttctaccaataagactaaaaccctaaagtcacaaaaaccacagttctggactcctggtatagatcacacctactcccaggggtctcaaactaggggtcctagggctgactaggcccacaaatattcagtttggtggcatctgtatagaatatttaactctttttttttttttttttttggagagatggagtcttgctatgttgcccaggctggtcttaaactcctgggctcaagagatcttcctgcctcagcctctcaaagtgctgggatcacaggtgtgagccactgtacccagccagctttttttttttttcattgatatacaatcaatgtagcttaaaatgcacacatccttcgtttctcttttttttcttttgagacggaggctcactctgtctcccaggctggagtgcagtggcacgatctcagctcactgcaacgtccgcctcctgggttcaagtgattctcctgccttagtctcccaaatagctgagattccaagaccccaccaccacgctcggctaattttttttctatttttagtagagacggggtttcaccatcttagccaggctggtttcaaactccttaatccaaccatcctgttcattgtaaatttgattattgtgatactagaataataaagccttcatcctttccctctggaggtctgattaagaagctctcttgggatgtacaggcctaggaactccattcgaagataatgaattattattcttagtattctttagcagaaagacttgcggtctacaaacgtttatattcacatacacaaatacgcacaccctataaacctaaaaagcatctttatctttcgccatgaaagtaatggtcaaaaataaaacacaacacaataagacgaaaccaaacttacagatgaaacattcgtttgcataagagaagacagaaaaggccccctagaaccaactttcacccagtgctcaccggaacactcagaaatcgccaggtccctgaaccgggaagatcctggggacggagccaacgcggatgcaaaaggcagcaattattttcctgccggaaaaaaattcacaaacgctgctttggaggcctttggagaggggcgcacagatgaaaacaccctgcggacaccgtaactataaacccgactcctcccgaggagcgacggtccgagcggacgctagcgggcccagcagacacgagcagagcgggccaggcctctctaacgtccgggccaaacccgtccttcaccccaaaaccagttcatctcctcggaactcacccaggccagtgaggccttaactctgaaaggcaaaaagactctcaggcgctcacagccggcgtcacaaaaggaacggcgcaccgctgacgtcatttacgctctccgcctcgggccaggcggggtttcgggactagggtttctgccgtgtaatacctcctcgaggcagaaaaattctactttccatctgcttggctgcggaggaccttggggtgggctcagcgtgggggctgcaggcagaaatgggtccagaaggcaaggtcgaggttagagccaagcctgtgggcagggctacgggcagggggcggggaggaatgtgggtccaggcccagaggaaaaggttgaagttatagccaggcct

SEQ ID NO: 20655 - DNA, 2300 bp, Homo sapien
acctggctcagcttggcgaggagcagcctgagggggaggggagaggtcagatgggtccatagaaaaggaggattcaaaggacaagaaagaaacaagaaagatttgggatgagtcacattgggagcaaagactagggacggaccaatgtgtaaagaatgcctggatgtcaggcatctcagaccatttgcccattttatgacaaaaattatctagatcttgtaggatggagaaatcaaaagtgccattttctggccatttagaaccattgtcaagtttgtactggggccaagtggtgttgcagaagaaaataaggtatttaggttttaggtcaggtgtgagttgaataggttttaagttcttgagaacacaggctaagggagaagaacagggaatggagggcagaagattgcccatagtgaaggaggtaagtttaaagagaaaggtagagacatggagaaggcagtggagtggggtgggggtgagcagccctgggctgtaatgtgggtaagcagccaaagcaggcagccctgcaattgacttgccaccaagggaatgtgggtgaatgatcaaggcaggcatccccacagtgatcagacaccaatggaatgtaggtgaataatcaggcaggtatccctacagtgattagccaccaaggaaagactgtcttcctgagtccgtgactggagctggagttttgggtccacagataaaatgtgtctcctttgtctctactggagaggaaaaagaactggaattggaaggacagagagatggaagggtagtgagagaggctggagaagagagtgaagagactgcttacccaatttgaaattggtgagatgttccttgggctagtctgaggacccgaggtagtaggtggagctcctcacggagtgagggtgaggacggggccagtctcccaagggagtccccctgtcccaggtttcggaaccaaatgttacacacatccatgtgaagagaccaccaataggctttgtgttagcaacaaggctgtttattcacttgggtgcaagtgggctgagtccgagaaaggggtcagcaaagggagataggggtggggcagttttataggatttgggtaggtagtggaaagttaaaggtggttatcttttgctggcagggccgggggtcacaaggtgctcggtggggaactcctgagactcgtccagaagaagaatgtcacaaggtcaagagatcagttggggtggggcagcaacaaatcacaatggtggaacgtcatcagttaaggcaggaactggctgtttcacttcttttgtggttcttcagttgctccaggccatctggatgtatacgtgcaggtgacagggtttatgatgatttaacttgggctcagaggcctgacaagtagttcaagaccagcctggccagcatggcaaaaccctgcctctactaaaaatacaaaaattagcagggtgtggcagcatgcacctgtaattccagctacttgggaggatgaggcaggagaatcgcttgaacctgggaggtggaggttgcagtgagctgagatggctccactgaactccagccttggtgacagagtgagattttgtctcaaaaaaaaagaaaagatgttttaaagcaaggcagaaaacctagaaattatttttaaaaacaattcctttagctgcatagaaaatgttttttacatcaaatgttgaaatagtaacagagcaaaagacgtagttacctattttctacatgcataacacattggctccttcccctatggccgccctgctgcggcctcgcccacaggcctggctataacttcaaccttttcctctgggcctggacccacattcctccccgccccctgcccgtagccctgcccacaggcttggctctaacctcgaccttgccttctggacccatttctgcctgcagcccccacgctgagcccaccccaaggtcctccgcagccaagcagatggaaagtagaatttttctgcctcgaggaggtattacacggcagaaaccctagtcccgaaaccccgcctggcccgaggcggagagcgtaaatgacgtcagcggtgcgccgttccttttgtgacgccggctgtgagcgcctgagagtctttttgcctttcagagttaaggcctcactggcctgggtgagttccgaggagatgaactggttttggggtgaaggacgggtttggcccggacgttagagaggcctggcccgctctgctcgtgtctgctgggcccgctagcgtccgctcggaccgtcgctcctcgggaggagtcgggtttatagt

SEQ ID NO: 20656 - DNA, 2300 bp, Homo sapien
gacagcagtgaagattgctgcattgattgactcttcattacatgaaaaacttctctttagcattcgacgctgtttgataacattttacgcatagtggaacttcttttagaattggacttaatcctctcaaacttcgccactgcttgatcaactaagttgatgtaatattctaagtctgttgtcttttcaacaatgttcacagcatcttcaggagtagatttcatttcaggaaaccactttctttgcttatctatacaaagcagcctctcatctgttcaagttttttcacgagattgaaacaattctgtcacatcttcaggctccacttctaattctagttctcttttttccatcacatccacagttactttttccactgaagacttgaacccctcagagtcacctatgaaggttggaatcaacttcttccaaactctggttaatgttggtttttatttttttaattaaaaaaattttttttagagacaaggtctcgctgtgttgttcatgctggagtacaagtgggtattcaccagcacgatgagagcacactgtagccttgaactcctggcctcaagtgatcctccttcctatgcctcctgagtagccaagactccaggcacacaccaccacacctgccttaatgttgatattttgacctccttccatgaatcataaatgttgttaatggcatctagaatggagaatcctttctgcaaggtctgcaacttaatttatccagatccctcagaagaagcattattagtggcagctatagccttatgaaatgtatttcttaaataataagacttgaaagtcagaattattccagaatccatgggctgcggttagcagacatgaaaacgccaatcttgtttatacctccataagagctcttggttagtaggttcattatcagtggtaatattttgaaaggaatctctgaacagtatgttttacagtgggcttaaaatattcagtaaaccatgctgtaaatagatgtaaatagataccacaggaagagtagatgtagcataattcttaactggctcttggatttttggaatggtaattgaatattagcattcatttaaagtcaccaactgcattgacctctaacaagaaagccagcccaggctgggaaaagtggcttacacctgtaattccagtgctttgggaggctgaggttggaggatcacttgaggtcaagagttcaagaccagccagcacaacagagcgtgacgctgtctctacaaagtaaagagtcagcccgtcctttgaatctttgaagtcagatattagcttacctagagctgtgaaagtcctaaatggcatctcctgaagtaaggctgttttgtctctgttaaaactctagtagagctacctctgccatttatctagatattctggaaatgcttgctgcagattccacatcagcaattgctacttcactttgtacttttatgttatggaaatgacttgttaaacctcacgaactgatctttgccagcttccagcatttcttctgcagctaactcacctctcagccttcatagaattagagttagggccttgctctggattaggttttggcttaagggaatgttgtggctggtctgatcttctatccagaccactaaaacttattccgtgttagtggtgaggctgttttcctttcttattatgtgtgtgttcactggagtagcacttttagtttccttcaagaactttacattcacaacttggctaactggcacaagaggcctagattttggcctatcccagttttttttttttttttttttttgagacatggtctcccttttgcccaggctggagtgtagtacagttatagcccattgcagcctcaaacttacgggttccagtgatcttcctgtctcctgagtagctaaagactgcaggtgtgcaccaccatggccagctaatttttttttttttttttttttttttttaaagaggcaggactttactgtttacccggctgatcttgaacttaaaacctcaagtgatgctcccctatctgcctcccaacactctgggattacaggtgtgagccactgcacctggctcttatcttggcttttgacatgactttctcactgaggttaatcatttccagcttttgatctaaagtgagaaatttgcaactccttctttcacttgaacagttagaggccattgtggggtaatgaattggcctaatttcaatattgtccctcagggaattaggaggcctgggaagaggaggagagaggggagagtggccagttggtggagca

SEQ ID NO: 20657 - DNA, 2300 bp, Homo sapien
gcccaggctggagtccagtggcgcgatctcggctcactgcaacctctgccttctgggtttcagcgattctcctgcctcagcctcccgaatagctgggattacagaaagcccaccaccatgcttggctaattttatttttgtatttttattagagacagggtttcaccatgttggacaggctggtttcgaactcctgacttcaggtgatcctcccgcctcagcctcccaaattgctaggattacaggtatgagccaccgcgcctggcaaaataccacatttatgaaccaaattcctacatgttcttgggtctgtttttagatattttattagtctgtttctgcttcatgtgctagtaccacatagttttaattatagaggctttatagtatgtcttatttatttttattttaatataatttaattatttgccttgtgtgaaaactgttaatagtatgttttaacatctgctgctcatcattgcttttgtttttgttttcttggttattatcagatatttattcttccacataaactttagtatcaacgtacctaactccagaaaaaacttttaatatttttactgggattatgttacatttctgaataaacctggggagaatgtctggtgtcagtgctattttacaatgtaggaaatgtggtcctggcccatgtgggaagatcagaaaaataacaatagaaatacatgtttttggccaggcgtggtggctcacatctgtaatcccagcactttggaaaggtgaggcaggcggatcatgaggtcaggagttcgagaccaactgggccaatatggtgaaaccctgtctttactaaaaatacaaaaattagccgggcatggcggcgcctgcctgtaatctctgctactcaggaggctgagagagaagaatcgcttgaacccgggaggcagaggttgcagtgagcaagatcgtgccactgcactccagcctgggcaacagagctagactccatctcaaaacaaaaacaaaaacatatttaaaattttttttaaacagagacggggtcttgctgtattgcccaggctggtctcaaactcctggcctcaaacgatcccttggcctcccaaattgctgggattataggcataagccaccatacccagccagaaatacatacttgatgaagacaaaaaaaaatcaagatttacagaaaatattattatattgaaaacgtggccgggtgcggtggctcatgtctataattccagcactttgggaagctgagggagacagatcattggaggtcaggagttcgagatcagtctggccatcatggtgaaactcttctctactaaaagtacaaaaattagctgggcgtggaggcagacatctgtaatcccagctactcgggaggttgaggcaggagaatcacttgaacccggggggcagaggttacagtgagccgaggtcatgccactgcactccagcctgggcaacagagtgagatctgtctcaaaaaaaaataaaaaatgaaaaagaaaaacgaaaaaagaaaacgcaatggaaccagcaggttctaaaaaataaagaatgaagaaataaaggcctacagaaagcctgactgaatagaagagatagaccatgccattcactggcagctttatccatatggaagaatcatggaaaggctctaggaacatgagatgtatacaaacaagctttatatatatgtatacacacatatatattttaataaaggatgttgctattttgcccacgctggtcttgaactcttggactcaagctatccacctgccttagcctcccaaagtgttggacttacaggccttagccactgtgcccacctgggaaaagctctgcaggagcatcccctggggtgcgtcccatcccccacgcccgcccttccagcaggtccggccacctgaaccgccggctagccgggtcccacctctaaaccgcccccaagtaagggcctgtccgcgcccacccgggaagaaactacaatttctgtgtttgactgggtcctatgtggctgaaactcgaacccaggagccccgcccggcccgaggctcggagcggaagtgacgtcagcgcacaatcgccatcttttccggcgctggctccgcatggtcagtgccatttcgcctttatcgtggtggagtccaccctggctgtggtgagttccgcctgcttggggatcccggagatagcggggggcggcaaaggaacgattgggtgctgtcgcccaggagcctctccgatccgcctcgtttcactctcttctccaggggctgtcggtcctc

SEQ ID NO: 20658 - DNA, 2300 bp, Homo sapien
agcacccattcccagcagactcaagctatttacctaccttagcctcccaaagtgcaggaattacaggcgtgagccactgcgctcgcccgataaaagctttggaggagcatcccccggggatgcgtcccatccctcatccccgcccttccagcccgaccggccacctgaaccaccggctaggccgggtccctcctctaaatcaccccccgagtacgagcccctcccctcgcccacagttccgtctggaggcccggttctaacctcacctttttctctggacctagttctgcatccccctccctgagccaaccccaggccctttctgcacccacccgagaggaaactagaatttctgtgttctacccggtcctacgtggctgaaactggagcccacgagcctcgcccggccagagtgttgaagcggaagtgacgtcagcgcaccaccgccatcttttccggcgctggctcctctccgtcagtgcggtttcgcctttatggtggtggagtctgcccaggctgtggtgagttccacctccttggcggtcccggggatagcagggggcggcaaaggaatgattgcgcgctgtcgcctaggagcctctcagatccgcttcacttcactcgcttctccagggactatcagtcctccctgtgcgtccagttcggagaggctgcgcgctctctcggctcactgcaacctctgcaacctctgcctccagggtcaagcagttctcctgcctcagccttccgagtacctgggattacaggcaagtgccaccacgcccggctactttttctatctttagtagagatggttttgccatgttggccaggctggtcttgaactcctgaccttaggtgatctgtctgcctcggtcccccaaagtgctgggattataggtgtgagccactgcacccggccgacttttgaaaattttagattttgttcttaagtcatcttaggtacgtaatgaagttatcaataacacacgtggctggtgactactgaattgttctgtgcaggtctgcactgtcttctggtcatatggcgggggggtaacaccatatacaggagatcaggctctagggacaagtatcagaccgactactagggttgtttgagtgtaggtttttttcagtattaaatagaagtaatgggccaggcatcgtggcttatgcttattatcccagcactttgggaggccaagtcaggaggattgtttgagcccaggagtttgagactagcctaggcaatctggtgaaaacttgtctctactaaaactacaaaaaattagccggacccagtggtgtgcacctgtagtcccagctagttggggggctgaagtgggagaatcacttaaggccaggagttcaagaccagcctggccaatatggcgaaactgcgtctctactaaaaatgcaaaaattagccaggcatggtagtgcatacctgaaatcccagctactcgggaggctgaggcctgataatcgcttgcacctgggaggcagaggttgcaatgagttgagatcatgccactgcattccagcctgggcaacagagtgagactctgtctcaaaataataataataataatgagtgatgatacgcacctatggtcccagctattcaggaggctgaagtgggaggatcacttgagcccgggaagtctaggctacagagagttgtgttagtgccattggatttcaacctgggcaacagagtgagaccctgtctcgatagatagatagatagatagataggatagatatagatagatagatatagatagatatatagatagatagatatagatagataaatatagatagatatagatagatagaggtaatgatagctactgggaaggatggctatgataattaactgagcatgtatatataaagctactagagctacttctgacatatcagtcctcagtaaatgtcagttactgttattaatacttttgttactgagtgacggtactgagtgggcaatttttggtggccttcacatctgtcacctgcagagacaaagctcaggcataatgtttgatgactgatgtttcatgcttgttgtttgatgattgatatgaacaggaccgcaaataaccctgtacaaagaggaatggagattgcctctatccacctagattcataagctggcctgaggtgatcttggcatcaaggaagggatgcacatcatcacaccatcagcttcagagaatggcagccatttatttgtcccgtggtaagtctttgttgatgctctttttcagagattctgctttaggtcaccc

SEQ ID NO: 20659 - DNA, 2300 bp, Homo sapien
ctgaaaaagagcatcaacaaagacttaccacgggacaaataaatggctgccattctctgaagctgatggtgtgatgatgtgcatcccttccttgatgccaagatcacctcaggccagcttatgaatctaggtggatagaggcaatctccattcctctttgtacagggttatttgcggtcctgttcatatcaatcatcaaacaacaagcatgaaacatcagtcatcaaacattatgcctgagctttgtctctgcaggtgacagatgtgaaggccaccaaaaattgcccactcagtaccgtcactcagtaacaaaagtattaataacagtaactgacatttactgaggactgatatgtcagaagtagctctagtagctttatatatacatgctcagttaattatcatagccatccttcccagtagctatcattacctctatctatctatatctatctatatttatctatctatatctatctatctatatatctatctatatctatctatctatatctatcctatctatctatctatctatctatcgagacagggtctcactctgttgcccaggttgaaatccaatggcactaacacaactctctgtagcctagacttcccgggctcaagtgatcctcccacttcagcctcctgaatagctgggaccataggtgcgtatcatcactcattattattattattattttgagacagagtctcactctgttgcccaggctggaatgcagtggcatgatctcaactcattgcaacctctgcctcccaggtgcaagcgattatcaggcctcagcctcccgagtagctgggatttcaggtatgcactaccatgcctggctaatttttgcatttttagtagagacgcagtttcgccatattggccaggctggtcttgaactcctggccttaagtgattctcccacttcagccccccaactagctgggactacaggtgcacaccactgggtccggctaattttttgtagttttagtagagacaagttttcaccagattgcctaggctagtctcaaactcctgggctcaaacaatcctcctgacttggcctcccaaagtgctgggataataagcataagccacgatgcctggcccattacttctatttaatactgaaaaaaacctacactcaaacaaccctagtagtcggtctgatacttgtccctagagcctgatctcctgtatatggtgttacccccccgccatatgaccagaagacagtgcagacctgcacagaacaattcagtagtcaccagccacgtgtgttattgataacttcattacgtacctaagatgacttaagaacaaaatctaaaattttcaaaagtcggccgggtgcagtggctcacacctataatcccagcactttgggggaccgaggcagacagatcacctaaggtcaggagttcaagaccagcctggccaacatggcaaaaccatctctactaaagatagaaaaagtagccgggcgtggtggcacttgcctgtaatcccaggtactcggaaggctgaggcaggagaactgcttgaccctggaggcagaggttgcagaggttgcagtgagccgagagagcgcgcagcctctccgaactggacgcacagggaggactgatagtccctggagaagcgagtgaagtgaagcggatctgagaggctcctaggcgacagcgcgcaatcattcctttgccgccccctgctatccccgggaccgccaaggaggtggaactcaccacagcctgggcagactccaccaccataaaggcgaaaccgcactgacggagaggagccagcgccggaaaagatggcggtggtgcgctgacgtcacttccgcttcaacactctggccgggcgaggctcgtgggctccagtttcagccacgtaggaccgggtagaacacagaaattctagtttcctctcgggtgggtgcagaaagggcctggggttggctcagggagggggatgcagaactaggtccagagaaaaaggtgaggttagaaccgggcctccagacggaactgtgggcgaggggaggggctcgtactcggggggtgatttagaggagggacccggcctagccggtggttcaggtggccggtcgggctggaagggcggggatgagggatgggacgcatccccgggggatgctcctccaaagcttttatcgggcgagcgcagtggctcacgcctgtaattcctgcactttgggaggctaaggtaggtaaatagcttgagtctgctgggaatgggtgctcgcttggtgtcacaaaatcaa

SEQ ID NO: 20660 - DNA, 2300 bp, Homo sapien
tgggcgtggtggcaggcgcctgtaatcccagctactccagaggctgaggcaggagaattgcttgaacctgggaggtggaggttgcggtgagctgagatcacaccactgcactccagcctggtctgatccagtgagatctgtcgcaagcaagcaagcaagcaagaaagaaaaagaaaacccaatggaatcagcaggttctaaaaaataaagaatgaagaaaaaaaggcctacagaaactctgactgaatggaagggatagaccatgccattcattggcagctttatcaatatggaagaatcatggaaaggctctaggaacatgaggagaggcatacaaacaagctttatatttatatctaaaaagtaaagcagaggttcctcttcaaagacgttccttcacatttaattaggaataaatagtaacttctcttagaagcaaaatttattcaaagacctgtgctaacattctcaagtatctgtgagccgtgataaagaaatcaatgtactttatattcttagctcccacagtttagtctacatatttgccctggcatgcttgtactggtccaggcaagcattagggcatagcctgttctttttccttatttgaagatgttttgacccttctcagcattccacaagttacttcctccttcctttgttctcctctacccttgcctcttttaaaaagttataagttgctagccagaacgtgaggtcccattccagccagtggaaactggacacagcagtaggttggaagcatcaggttataaatgaccctatctcctttgtttggtgtactctcgtggcaaaactgctggtgagtataccgtttctgcaggaagtaaaaatggccttgctgagtaaattaaatttatgttcaagtgctaatttctttatggcaccagggaacaagcattttgaacatgtatatttatatattttttatatatttatatatttatatgtatttatacatatatgtttatatatatatatatagagagagagagagagagagagacagggtcttgctactttgcccaggctggtctcaaactcttggacttgtagaaaatgaaataaatacaggttcctcttcaaagggactttcctcccagtctgattgaaataaatagtaatccctcttagaagccaaattttctcaaagacctgtggtaatattgttaaattctgccagccgtaataaagaaatcaatagactctgtttttagctcccacattttagcctagatatttgccctggcatgcctgaactggtccaagcaactattaggtcatggcctattcctttccctatttagaagtgtttttgcctctctcaacagtccacaagttacttcctctcttcctttgttctcctctgccattgcctcttttgggaagttctaagttgctagccaatccagtgaagtacaggaaggtgaggtcccgttccagccaatggaagctggacacagcagaaggatggacacttcaagtttaaaaaaaccctgtctcctttgttaatgtgtgctctggtggcaagactgccagccagtggcacccattctgcagaaagtaaaactagccttgctgagatcctttgtctcagtgttgattttgtgacaccaagcgagcacccattcccagcagactcaagctatttacctaccttagcctcccaaagtgcaggaattacaggcgtgagccactgcgctcgcccgataaaagctttggaggagcatcccccggggatgcgtcccatccctcatccccgcccttccagcccgaccggccacctgaaccaccggctaggccgggtccctcctctaaatcaccccccgagtacgagcccctcccctcgcccacagttccgtctggaggcccggttctaacctcacctttttctctggacctagttctgcatccccctccctgagccaaccccaggccctttctgcacccacccgagaggaaactagaatttctgtgttctacccggtcctacgtggctgaaactggagcccacgagcctcgcccggccagagtgttgaagcggaagtgacgtcagcgcaccaccgccatcttttccggcgctggctcctctccgtcagtgcggtttcgcctttatggtggtggagtctgcccaggctgtggtgagttccacctccttggcggtcccggggatagcagggggcggcaaaggaatgattgcgcgctgtcgcctaggagcctctcagatccgcttcacttcactcgcttctccagggactatcagtcctccctgtgcgtcc

SEQ ID NO: 20661 - DNA, 2300 bp, Homo sapien
ctgagatgtttgggtggagagaagcataaatctggcctacgtgcacatccaggcatagtaccttcccttgaacttatctgtgacacagattctttgctcatatgttttcttgctgaccttctccccactatcaccctgttctcctgctgcattccccttgctgagatagtgaaaatagtaatcaataaatactgaaggaactcagagactggtgccagtgtgggtcctctggacgctgagcgccggtcccctgggcccactgttctttctctatactttgtctctgtgtcttatttcttttctcagtctctcatcccacctgatgagaaatacccacaggtgtggaggggctggcccccttcacctataatcccagcattctgcaaggctgagatgggcaaatcacgaggtcaggagtttgagaccagcctggccaacatggtgaaatgccctctgtactgaaaatagaaaaaatagctgggcatagtggcagccacctgtaatcccagctactcaggaggctgaagcaggagaatcacttgcacccaggagacggaggttgcagtgagctgagattgcaccactgcactccagcccgggcaacagagtgagactccagtctcaaaaaaaaaaaaaaaaaaaaaaaaaagtaaaaagaaaacgcaatggaaacagcaggttctataaaataaagaatgaaaaaataggctgggcgcggtggctcacgcctgtaatcccagcactttgggaggccgaggcgggtggatcatgaggtcaggagatggggatcatcttggctaacaccgtgaaaccccgtctctactaagaatacaaaaaaattagctggttgtggtcgcgggcgcctgtagtcccagctacttaggaggctaggcaggagaatggtgtgaacccaggaggcggagcttgcagtgagccgagattgcaccactgcactccagcctgggggacagagagagactccgtctcaaaaaaaaaaaaaaaagaaaaagaaaaagaaaaaataaaggcctacagaaagaatgactgaatggaagagacagaccatgccatctatcactggcaggtttaatatggaagaatcatggaaaggctccaggaacatgaggagcggcatacaaaaaagcttgacacacacacacacacacacacacacacacacacacacacatatatatatattttttctttttgagatgaagtcacgctcttgtcccccagattggagtgcagtggcgcaacctcggctcaccgcaacctccgcctcccgggttcaagcgattctcctgcctcagcctcctgagtagctgggattacaagcgcctgccaccacacccagctatttttttgtatttttagtagagacggggtttcagcatgttggccaggctggtgtcaaactcccgacctcaggtgatccgcccgccttggcttcccaaagtgcagggattacaggcgtgaaccactggcgcttggccttatatatatattttaatagagacagggtcgagccgggcacaggcctgggcaacaagagtgaaactctgtctcaaaaaaaaaaaaaaaaaaaaaaagaaaagaaaaaaaaagacacacggtcttgctatttcactcaggctggtctggaactcttggactcaagctatccacctgccttagcctcccaaagtgctggaattacaggcgtgagccactgagcccgcccaggataagctttggaggagcatcctctggggtgcgtcccatcccccatccccgcctttccaacccgtctgggcacctgaaacgcgggctaggccgggtcccacctctaaaccgcccccaaatatgggccccacccctcgcccacggttccgtccagaggtccggttctaaactcatctttttctctgaacccgtttctgcatcccgctccctgagccaaccccaggcactgtccggcacccacccaggaggaaactagaatttctttgtcctacgtgcctgaaactcaagccctggagccccacccggccggaggctcggagcggaagtgacgtcagtgtgccaccgccatctttaccggctgtggctcagcatggtcagtgccgtttaacctttattgtggtggagtccaccccgctgtggtgagttctacctgcttgggggtccgggacataccagcggggcggcaaaggaaggattgggcgtggtcgcccaggagcctctcagatccgcctagtttcactcgcttttctaggggctgtcagtcctcctggtgcggcctctggccagttccgaga

SEQ ID NO: 20662 - DNA, 2300 bp, Homo sapien
tgccgtggcgccatctcagctcactgcaacctccgcctcccaggttcaagtgattctcctgcctcagcctcccgagaagctgggattacaggtgcgcaccaccacgccctgctggtttttgtattttttagtagagaccgtgtttcaccatgttggccaggctggtcttaaactcctgtcctcaggtgatccgcctgcctcggcctcccaaaatgctgggattacaggtgtgagccactgcacccagctattcttatttttattgacaaaagtgtttaggaatatgaatgttcctttgaccactgcttaaaatgcgtcttgtattatccaaaaaagccaaaaaaaaaaaaaaaagagaaaacccaatatccaacaactgatgttatgatacagccatacaatggaatcttatttagtaaaaaaaaattaagtactgatacatgctaattggatgaaccttgaaaacattgaatgaaacaagccaaacaccacgtgttttatattctaattctacaggcaatatctacagtaggcaatctatacagacagaaagattagctgttgctttggactctgggggtgggggtggggctggatgagcagattgggtgatcatggctagggtactgggtttatttttgtggtcatgaaaatgttctaaaattgattgtgatgatcgatgcacaaatatatgaatatacaaaaagccacgaaactgtacactttaaacaggttaattgtatgctatgataattgtatcacaacaaaactaaaggcctaaagaaggaactgaatgtatcagaggcacagagcattttatggattaacaggttaatctttttttttttttttttgagacggagtctcactctgtcgcccaggctggagtactgtggcatcgtatcagctcactgcaacctcagtctcctaggttcaagcaattctcctgcctcagcctctcgagtagctgggattacaggcgcccaccaccacacccggctattttttaaaaaatatttttagtagagatggggtttcggcatgttggccaggctggtctcgaactcctgaactcacgtgttccacccgcctcggcttcccaaagtgctgggattacaggcgtgagccactgcccccagccccatcaggttaatctttcaaacagggtgtcgctggtctcgaactcctgggctcaagcgattctcccgcagtagctaggactacagcgggattatctttgtaaatatgtttatatccctgcagagggttgaagaaacaaggagaaaatcctgcagaaaagaatttccctagggtggtggctcacgcctataatcccagcactttgggaggccaaggtggaaggatcactggagcccaggagttccagatcagcctgggtaacaaagagagaccctgtctctacaaaaaaataaaaataaaataaaaataaattagccaggcgtggtggcacacacctgtggtccaagctgcttgggaggccgaggggggaggatcctttaggctcaggagttcgagaccagcctagggaacacagtgagacccaagtgtctagaaaaagataacttagctgggcgtgatgggcccaactgtggtccaagctactccggaggccgaggcgggaggatagcttcagcgcaggaattccaggctgcaatgatctatgaccgagccactgcactccagcctaggcgacagaccggagccttatctcaaaaaactaaaaagagaaattaaaaaagaaaagaaaagcactcgatgagcatcccgctgtctgcaatcgaagccttaggtgacgcctccacgcgtgccccgcccgctgcgccagtccccgcctccaacccggcccttggcgctgggtttcctggtccggcgtcgttcccaatatcgacagattgatctggatcctggtccacctgggatgcgagaaaacgggacttttctgtacgcgtgtcgaagaggtggccccagctcttctctcagcttcacatcatcctcattccaaagctcttggggctcggcccctacacttaatgccgtgcgcaaccggaagcggaagtgccagccggcgcgcagctatacgtattccccgctctccagcagcttcctagctgggttttcacctcagccagcgctcatgctcaacctaggcagggcggggcaggagggcctagcgggaggcggagcgagggtcggagggtgacgctccggacttctgctaggtctgagacgcgccggcctcccgctgctgctccggagaagcggcgcctcctccccgccag

SEQ ID NO: 20663 - DNA, 2300 bp, Homo sapien
tagccggacatggtggcgggcgcctgtagtcccagctactcgggaggctgaggcaggagaatcacttgaacctgggaggcggaggttgcagtgagccgagattgtgccactgcactccagcctgggtgatgcagcaagacttcatctcaaaaaacaaaacaaaaattagccgggcgtgttggcatgtgcctacagtcccagctactcgggagactgaggtggaaggatcggatcacttgagccccagaggttaaggctgcagtgagctataatttcgccactgcactccagactgggtgacagagagagaccctgtcccaaatttaaaaaaaaaaaaagataatgaaatcatgtcctttgcagtaacatgatttttttttttttttgagatggagtctcgcacccgtcgcacaggctggagtgcagtggcgcgatctgggctcactgcaacctccacaatctctttcatattctttttttttttttttgagacggagtttcgctctgtcactcaggctggagtgtggtggcgcgatctcaggtcactgcaatctccgcctcctggcttcaggaggcgtgcgtgtgtgtgtgtgtgtgtatatatatatatatatatatatacacacacacacacacacacacacacacacatttttttttttggacaggaagtagaatttattggtgagtattaatagggggggcagcacattggaagccctcatgagtgcagggccagccacttgtccagagggccacgattggggatgtacttgaccccacagccatctgggatgagccgcttctcagccaccatgtcttcaaattcatcagcattgaacttggtgaagccccacttctttgagatgtagatcttctggcggccaggaaacttgaacttggccctgcgcaaggcctcaatcgcatgctccttgttctgcagcttggtgcggatggacatgataacttggccaatgtcaaccctggccacagtgccctggggctttccaaaggcacctcacatgcctgtttggagcctacattgtggtagtgcaaggttagaaacatgaacatccatcggaaaggcctgtctccaaggtcccttagagcaacccatacaaccaacaggctgcgtacactaccaaggaagctgctgtgtgcagccattgcacacacacatttttatagtttcttggtggacttgccaattcagaaaatatctgtagtatcaatgaaagtgaaaaattcaacaggtcctttggccacgatattccagtaatacaaatttatccttgtgcatagacatcaagaagcatcattaagtaaaaaaatagagttctctgactctctaccaagccattcgctcggggccagacccacaggcctcgccccgcctcaaccacgccttcatggcgtagtcttctccctgtctccgtcccccgctccccaccttccgagcgtctccatcgctccccagccacgcccttggcgcctggtcctgctgcagcctggtttccgtccagaccacgacctctcggctaggtcctcgtcgtcaaccccgcccccaaggtctcgccccgccccagccccgccttccagcggttgtccgagcctctacccgccctagccacgcctccaaggcgtggttctcgtctgcagccccacctaggcctcgccccgctccagccgcgccttccgggcttgatcctcgccccaccccagccacgccttctggacttggtcctcgtctctagccccgccccctagccgcgccccagccccgccttctggacttggttccgttctctggctccgcccctgagcctcgcccaactccagcgacgccttccgggcttgggcctcgcctctagccccgtccccgggtctcgcccctccccagccacgccttccggacttggtccccgtctctagccccgcctccgatcctcgccccaccccagccacgccttccggacttggtcctggtctctagccccgcctccgatcctcaccccaccccggccacgccttccggacttggtcctcgtctctagccccgcctccgagcttcgcctcactccagccccgccttctggacttggtcttagttcccagtcgcggccaaatcacgcctcagccacctcccgcaagcctctcactgcctcagccacgctttccaggctggtttctggtccccatccgcggctggtccggccctgggaccgaatcacttcccagcgagaggaaggtcaaatttctcgaccggctacgggaaggtcgcggccgccgccctgtcagcc

SEQ ID NO: 20664 - DNA, 2300 bp, Homo sapien
atgtagattaaataatgtgaccatactctccctctttcccctccagcccacttttccctttaaataatgaagccctcaaaatcatatttggaaaaaagcacggatcacagattgttcctggggttttgtgttccttttctcccaggcttgtccttaaccttgtctacataaacctgtcaatttattgagacctgtctcagatactttttggtttacaaattgtttgactgaattgaggaaggacggtccttgtcccaccagccctcacaaacctggaatctggtacaaagtgctccccaaagatacagctgcaggagattgtgcaaatgtgcaatgtttccagttacctcgcaggcatttaaggttggtgactggcagtgagaaaggagaatagggaaaatgaggcagaagaatagcaaagggaattaaaagttggataaagggtaaaatacgtaaaagcagagagcagaagcaaggtgaaagggcacccgccccttcttgctcacccagcaagaagcaagataaatggcagaagctgaggagacaaaacaaaaggaagattaaaaactgagtaaaggccgggcacagtggctcacacccaacactttgggaggctgaggcaggcggatcacgaggtcaggagatcgagaccatcctggctaacacagtgaaaccccgtctctactaaaaatacaaaaaaattagccgagggtggtggggggcgcctgtagtccctgttactcgggaggcggctgaggcaggacaacggcgtgaacccgggaggcggagcttgccgtgagcccagatcacgccactgcactccagcctgggcgacagagcgagactccataaataaataaataaataaataaataaaattaaaaaaaaaacagtaaaaatcccacggccggggaaatcaggaccaaaccagtaaggagcagctctttaggcataagcacgcgcattaaagacaaaaagtatccttaacatgataaggataaccagctcattagcgctcatgcatatggacggcatatcatgaatggaggcggctctcaagcacacaggggccaaagtaagcaacacacctatcattcaaaaaggtagacactggctagatattaggcagccttgggaagagaaaaaaagcctggccaataaggtgaaaccccatctctactaaaagtacaaaaattagccgggcgtggtggcgggcgcctgtaatcccagctacttactcgggaggctgaggcaggagaatcgcttgaacccggaaggcggaggttgcggtgagccggcaccgcgccattgcactccagcctgtgcaacagagcgagactacgtctcagaaaaaaaaaaaaaaaaagacccaaactataccaagctggggctgatcttatctcgcagaggtcagtccgctctccccactccgagagtggaatactgtgcttaataaacttgcagctttgccatctctgtgtgtctggtccaaatctttcttcaggacaccaagagcctggaactgtccggcaccatgcggtaacagcagctgttgggcagcgtagagtctactctaggatcaagcttcgcctactgactggagtccgtatcccgggggaacgcgatggccagagggaagaggtgagccaaatgctcaccaagcccagccctgaatgaacccagggggtcagaagggatgactgcagaactcgtcccccacccccaccctccgcccttgctcctagttgccgctgcaagaggcttcgggctcaggatcaggagcttacccctactcccgggaccctctggcgtccccaccatgtgaccgagtctccctgcaacaaacaatgacttcaaacgagctgggcgccggcgcctgacctctgactctcgctccacgccccttccctggccacaaacccgccgaggcccccctctctacccggcgcgcctaccacaggcgcgacacctgtcaagccttgggacaccgaaaccgtacctgggaacagcaaacacaccacagactgcagacccggaagaacttgtcccagtgttgaccacaccccctggctaggggcagggcttccggcctcgaactttaacttccgcttccggttcctagcgttaactgcgaccggggttcagcgctcgggtgaggagctggtggcgtcggcaggttcgaggcgattcgaggtgagggggtcaagcggagaggctcggagtcggagaaagctgtcgcgacccagccacccagggtctggggtcggtgggaggtgaggccagggagttttgtggcaggg

SEQ ID NO: 20665 - DNA, 2300 bp, Homo sapien
cctctcatccattcacagccgggtcaggtggcctgaggtctcagcccagggctaaggaagcccattttggaccaggccatttttatttggagagaaccaaaactttacaaaagaatttctggctgggtgcagtggctcacacctgtaatcccagcactttgagaggacgaagcaggtggctcacttgacgtcaggagtttgagaccagcctggccaacacgatgaaaccctgtctctactaaaaatacaaaaagttagctgggtgtggtggtgggcacctgtaatcccagctacttggaaggctgagacaggaaaatcgcttaaacctgggaggtagaggctgcagtgagccaagattgtaccactgcactccagcctgggcaacaagagcaaaactccatctcaaaaaaaaaaaaaaaagtttctgttccttctaggccaggcacagtggctcacggctataatcccagcactttgggaggccgaggcgggaggatcacttgaggccaggagtttgagactagcctggcatacatggtggaacctcatctctactaaaaatacaaaaactagcagggagtggtggcacacacctgtaatcccagctacttgggaagctgaggcagaattgcttgaacccgggaggtggaggttgcagtgggtcaagatcgtgccactgcactccagcctgggcgacagagccagactgtctcaaaaaaataaataaataaaataaaaattgtaaaaagtttctgctccttttgcacaatagatatgcctgagtctcaccccaccctgacctactgtccagcactcaggtggaggtcagtaataaatattttgaacttgaagtcaaactatttcaccaaccactctcctccccaaccaaataattacctagctcccattttctaagtgctcaccatgtgccacgtattaagttaaacacttaatatgcataagctcatgcagactttagttttgaacagataaccgaggctgggtatgtagatgcttcctcaaaaagtcacacaaaggatacagtcccccagagacacgtggtccttaaaaatcgtgtacctaagaaaaagagacatttcagagataaggctaaggaggctcttcagtctgtaggccaaatgaggtagccaagcctaagcaaagggctgcctgcagcgctcccccaaccaaaaccttccggcctagtccagtccacccagtggctctaccgctgcactcaccacttcttcaggacaatcttgttccaacgggtaccagtttgggctgcaatcagcttcttaaggtccccgatggtatcatccgtgctgggcgcagagcagttaaggcaaatggaagcggtagaacgaggaagaggacattctagggcagaataccatctgccaggaccccatccgccccctctcccgggtttaactaaaaccatccgacaacacagattgagttgcctgcctcacgccaagcacccctgcgggtaccactgcctctcggctgccagtggatacttgcatttaacgcggaccttcttccccagacggtcgttgcaaacaacctcgatcatcctagctggagctacacaaagcggggggtgggtgggaggcagcaaagtcagagcttcaggcgtctcccaggcccagaagccccagcctacaagtctcccagtcccaggccctaaaattccaggttactgagccttccgttctgcccccaaccccccggactcgaatactcccaggccccaagtcccctgtcccagggccgcgaaccccggggagccgcgcctccgccccttctcgccgcctgaaagccctgccacaaaactccctggcctcacctcccaccgaccccagaccctgggtggctgggtcgcgacagctttctccgactccgagcctctccgcttgaccccctcacctcgaatcgcctcgaacctgccgacgccaccagctcctcacccgagcgctgaaccccggtcgcagttaacgctaggaaccggaagcggaagttaaagttcgaggccggaagccctgcccctagccagggggtgtggtcaacactgggacaagttcttccgggtctgcagtctgtggtgtgtttgctgttcccaggtacggtttcggtgtcccaaggcttgacaggtgtcgcgcctgtggtaggcgcgccgggtagagaggggggcctcggcgggtttgtggccagggaaggggcgtggagcgagagtcagaggtcaggcgccggcgcccagctcgtttgaagtcattgtttgttgcagggagactcgg

SEQ ID NO: 20666 - DNA, 2300 bp, Homo sapien
tagactcaagagatcctcccacctcagcctcccaagtagctgggattacaggcacgtgccaccacacccagtgaattatttttgtagagatagggtcttgccatgttgcccaggctggtccccaactctgggctcaagcgatcctcctgccttgggctcccaaagccctggattacaggtgtgagccaccacactcagcccttggattggataattcttttggtgggggctgtgccttgaaggatgttagcagcatccttggcatctaatactaaatgccagtagccagtagtatctcctgttccaaaatgtctgaaggtgttgtaacaaccaaaaatgtatcaagatgttgccaaatgtcccttgggaaacaaaatcgctactggttgagaattctgttctattgtttatttaagacgctaatattagggaagtttgggtgaagggtacatgaaaaccctactgtttttgtaactgcccatgtctaaaattatctttataaaaagtatctttttaatattatgctaatacttgtaaaaaatgttctattaaaacttaaactttttttgttttttgagatggagtctcgctctgtcacctacgctggagtgcagtggtgcgatctcggctcactgcaacctccgccttccaggttcaagtaattctcctgtctcaaccacccgagtagctggaattaaaggtgcccactatcacgcctggctaatttttgtatttttagtaaagacagggtttcaccatgttggccaggctggtctcgaactcctgacttcaggttatccacccacctcggccttccaaagtgctgggattacaggtgtgagccaccgagcctggcttgagtgctttatgtggattaatttatttaatgttcacatcaaacagaaggatgtaattgcttatccccgctttgcagattgggaaaccgaagtacagagtaacgttaagtaatcagttcaaggtcgcatagcaagtgtcagtcccaggctttaaacccaagtctggctccagacttctcttagccttctactgcatcctgcgtctaatttgttgtgggcaggtttccctatgagttcacttcactgagcctcattctttttaacggtcacatagggttctatgctaggtgaactgtagttgcaccctttgctgtcagtgtcttcaactcccatatctacccacagttccccaactctgggtccccaaatacctcccctgtgtcccacgggctctgcagactctattttaagttggctaaaactgagcccatctcctcccacctgcacctcctccgtgttcttatatgaatgtcaatgtcggcacccactggtcacccaggatggaggaaggagccagactgcgagggaataaaggaagtaagcaggttccaaaggacgtggaaggcctttgggtccagagcctagggaaaagttgagccctgcaaaaaataaaagaggctgggttagctttggacatctgtgggaaacaggtgggaagagggaggatggaggagccaaatttaagcatcgggtacttaggtgctcatctccaaggcaactgcattgctatggcaacagcagaggcagcaccgccccgcccaagtacctcctggaccgccgttacctctgcaccagccagactcttccgcatgggagggctgggggcttgcggacctccgggaacagctcaggcaggcgggagttgctgcggcattagccaatccataagctctatcccgcctgggtgggctctgcggcgacgcgcgccaagaaggggtcgggagttttttggcgctcgctaaagggcgttgagaagggcgggcccgcgtcgcttcggaccactcaggagccgaggagagcgagtgggcggggccaggctgaggctggccgggggcggggcgcagggataacgtgggagggtccgcccagcctttcttctacccaatagaaggccagaaagccaatccggaccgttagggagcccaatgggcgtcgccgccaggccccgttgcagagcgcgtctagccaataggcagcggcggcgggcgggcgcgggcgacaggcggcgcagctgaggcggagcaggcgctgcggcaggagggaagatggcggacgaggagaagctgccgcccggctgggagaagcgcatgagccgcagctcaggtgccgcgggggtcggggctggggcgggactgcgcgggcccgcgtaagcagggctcgagctcgccccttgggcgcggcggcagcgctgcctccctcccatggggtcctggctcttccgcg

SEQ ID NO: 20667 - DNA, 2300 bp, Homo sapien
ggatgtaattgcttatccccgctttgcagattgggaaaccgaagtacagagtaacgttaagtaatcagttcaaggtcgcatagcaagtgtcagtcccaggctttaaacccaagtctggctccagacttctcttagccttctactgcatcctgcgtctaatttgttgtgggcaggtttccctatgagttcacttcactgagcctcattctttttaacggtcacatagggttctatgctaggtgaactgtagttgcaccctttgctgtcagtgtcttcaactcccatatctacccacagttccccaactctgggtccccaaatacctcccctgtgtcccacgggctctgcagactctattttaagttggctaaaactgagcccatctcctcccacctgcacctcctccgtgttcttatatgaatgtcaatgtcggcacccactggtcacccaggatggaggaaggagccagactgcgagggaataaaggaagtaagcaggttccaaaggacgtggaaggcctttgggtccagagcctagggaaaagttgagccctgcaaaaaataaaagaggctgggttagctttggacatctgtgggaaacaggtgggaagagggaggatggaggagccaaatttaagcatcgggtacttaggtgctcatctccaaggcaactgcattgctatggcaacagcagaggcagcaccgccccgcccaagtacctcctggaccgccgttacctctgcaccagccagactcttccgcatgggagggctgggggcttgcggacctccgggaacagctcaggcaggcgggagttgctgcggcattagccaatccataagctctatcccgcctgggtgggctctgcggcgacgcgcgccaagaaggggtcgggagttttttggcgctcgctaaagggcgttgagaagggcgggcccgcgtcgcttcggaccactcaggagccgaggagagcgagtgggcggggccaggctgaggctggccgggggcggggcgcagggataacgtgggagggtccgcccagcctttcttctacccaatagaaggccagaaagccaatccggaccgttagggagcccaatgggcgtcgccgccaggccccgttgcagagcgcgtctagccaataggcagcggcggcgggcgggcgcgggcgacaggcggcgcagctgaggcggagcaggcgctgcggcaggagggaagatggcggacgaggagaagctgccgcccggctgggagaagcgcatgagccgcagctcaggtgccgcgggggtcggggctggggcgggactgcgcgggcccgcgtaagcagggctcgagctcgccccttgggcgcggcggcagcgctgcctccctcccatggggtcctggctcttccgcgtcgtccccggggtaacggccccggcccgccctgttgtggggactgcgagcctcaggagccgccgggaagcctgaggaagctgaggcagggggctgggcgggtgagggtccggggagtccggggcgatggccctggccctgccggcccggctgatacctctcggcctaatgcacctgacaccccgggggacgtctctgcaccttgctgggcccgggggcacccctgggagggagacaccccagtaccctgcaaagggcgtagggtgttgcccggcctcgggtccacaacctacccctgctaacacccctactgtgtacacctaatgctgagtctgcgacatcgcccgtgacattctgccagacgatggcccctgtgcttaggcccgatttaagggttagccacaatgataatattgccagtaacagggcatgtttttctctgtgtcaagcgctttaagttctctctgaattgccgcaactctgggagccaggtagttattacttccaccttaccagcaaggaaactgaggtcagaaaactgaaggaactcgtccaagatcattcatttcaggggccgggggttggattaggacctaggcagtttgcctacaaatccccctccccgtgtcactgcaaactcctgaggagcaggcccagcatctgtgggcaggtcccgagtcactctgctgcctctagagcccatagcaatcgcatttgcaataataattctccttggttgagtgccaggttctggtgaactgtttggatacatggactctcctcattaaccccatgaggtttgatctccttattctctattccccatttttcagatgagaaaactgaggtgcagggagattagagcccattgccaaggttttagagtgagtcagtagctcagctgca

SEQ ID NO: 20668 - DNA, 2300 bp, Homo sapien
tgggctcaagtgatcctcctgcctcagcctcccaaagtgttgggattacaggtgtgagccaccatgcccagatggatactttatccaatatctgttcaatgtattttttttttttttctccttgagacagtctcactctgtcgcccaggctggagtgcaggtgcagtggcgcgatctcagctcaccgcaacctccacctcccaggttcaagcaattctcctgcctcagcctcccgagtagctgggattacaggcgtgtgccaccacgcccagctaatttttttatttttagcagagatggggtttcaccatattagtcatgctggtcttgaactcctgactgcaggtgatttgcctgtcttggcctcccaaagtgcggggattacaggcgtgagccactgcgccctgcctgttcaatgcttttttgggagagaagccaagcacttactgggattggggtggggggaaggaaggaagactggaggggcagcatctgagtctcctgtgtgtgagctctggtccaccaggcatgtcccacccagctttgcagttcaccagactcacctactaagaaggagttctgtgccccttggggagggtctaaccctccacctcaagaggctcctataaaagtttccttctacctctgatcatggtcaagagaaaatagtcccctgggccgggcgtggtagctcacgcctgtaatcccagcactttgggaggctgaggcatgtgtatcacttgaggtcaggagtttgagatcagcctctaccaaaaatacaaaaattagccgggcgtggtggtgtgtgcctgtagtcccacctactcgggaggctgaggcaggagaactgcttgaacccgggaggtggaggttgcagtgagctgagatggcaccactgcactccagcctgggcaagacagagcaagactccatctcaaataaataaataaataaataaataaaacttacaaattgttgatttctggaatttcccacttaatatttttggactgtggttggcctcaggtagctgaaacgtgaaactgtggagaagggaagagtatgtaaaaatgttttgtggcgttcagggtgggtattaggctgctgagtttctgggagtttccaagtgtcatgtgaataattgtacaggaaagtctgtatttcaacaagcatccagtggtaactctgactgagtttaccttagccaggcagagtccactttagtcaggtgaagctggtgggaatctaccttagccaggtgagagtctaccttagccaggtaaaggtctaccttagccaggtgagggtctaccttagccaggtgagggtctaccttagccaggtgttcatcttagccaagtgagagtctaccttaacaaggtgggagtctaccttagccaggtgttcaccttagccagctggagtctaccttagccaggtgagagtctacttaagccagagatggagttcaccttaacaaggtggctaccttagccagatgttcaccttagtcagatgggagtctaccttagccagggggagttcaacttatctaggtggagttcaccgtagccaggtggaggtgggagctgggtgctctcaggttgggtcaggagaggccagggcaagggaagtttattttactcattcagccaaaaaatacttattgggcctctactccaggccagtgctgggcactggaggttaagctgtggacaagctagacgcagcctctgcctctgagggtcccacctgaaggaggcagatggataagaatgttctacatagtcacagctgggaaggaaatgaccaggcaagaggagagtgagtgagcggctaccggacagggtggtcagggaaggatgctttgagtgggggacgctggagctgaaccctgaaggatgagaaggagccagccatgggaacttgggggaacagcactccaggtagagagaccagcaagtgcaaagaccctgcagaaggaaggagcttagagtctgtgagaacaaagagagaggaagtgggttgggcggggggggtgggcaggaccagccagcacaggatctgtggaggaggaaggtgatctaatctctgttttgaaagttccttctgtctgctgtgtagagaattgactacaggggatgaaggtggaactgggagactagggaggaggtgagaggtggtggtaggtggaccagatgggagccagtgggtagtagggagggagcgatggatggatggattgggcacgcaattgggaggctgctggtaagctcaggggaggagaaggtggcctcgtc

SEQ ID NO: 20669 - DNA, 2300 bp, Homo sapien
acaggaatgatccagggtggtcacaggcagccgtttcacatgactagaggctatgggctgataagatcctgaaaaccagggtgtggaccaagctggctaagacctactggacccaacatggcgttacattctacctaggtttcacctaggatctcattatgtactcattaaaatactaaaattacccacccaccagcgcccttgacaattccagggacacccaaatttggtgtaaaagtgggtggcaccacagtccacctttttccagttttcatgaatattccatcccttggttaaagagatacacagtggcctgttgtggtggctcacgcctgtaatctcagcactttgggaggccaaggcgggtggatcacgaggtcaggagtttgagaccaggctggccaatatggtgaaaccctgtctctactaaaaacacaaaaaattagccggctgtgatggcgcacacctgtaatcccagctactcaggaggctgaggcaggagaattgcttgaacctgggaggcagaggttgcagtgagccgagatcacaccactgcactccagcctgggtgacagagcgagactttgtctcaaaaaaaaaaaaaaaaaaaaaaaaaaagagacacataaaggtagcagtcccaaaccaccttgcccatctctctctcttaagtacgcccactcccttttctcaagtgtggacttttcccttaacaaaaaaatctccgaacttttcatgattttctgattcctccttgaattcattcttgcgatggtgttaagagcctggacaccagctggggtcgaggccccaccagcgtctggggagacccctcctagcccaacagtatcagggtcacaaaaatgccaggcttcctggcctcgcatattttatgcccgatttctttccaatctgacttatttgcccgcccccctcctccacctctgcctacatatatccgaatccctagaggggctgtggggaggaaagacgactagggacactttttttttttttttttttttgagacaaggtttgctcctgttgcccaggctggagtgcaatggcacgatctctgctcactgcaacctctgcctcccgggttcaagcgattctcctgtctcagcctcccgagtagctgggattccaggcatgcaccaccacgcccggctaatttttgtatgttttagtagaggtggggttttgccatgttggccaggctggtcttgaactcctgacctcagatgatccaccctcctcagcctcccaaattgctggaattacaggcgtgagccaccgcgcccggcctagggagacttttggaggagtgagaggcagagaaaggctggaaagcctcccgaaagtgaggctagacaaggacgcccttcatatgcaaatggcttcgcgtggaggcggtgttaatattttgattctctcgggggatgtggtctttcatcttgggctattgaaacagggagcgaagagaaactcttccaggtgtggcggaggcggggaggcttccagcgggaggactggtggggaaatggggcgcccggggagagtgaaaacgagacgcccctttttgaggccaagcccacccacgtggccatttccattggcctcttgcctgattctcggtctcctgtccccccaacctcaattttttcctcttattccccgtctccatctatgcctcacccctcttgtcctggcattgacccctcctccaacttccaatttcagattctgcctcagtttccctgttgactcttgagtttttagggagggggcgttcatcatttcccctctctgctaccaggccttcctcctattcctctcccccaaccattcgtccccgtcccacctgcaacgtgggaaatgcccccggagggtgaaatttacaaacacgtgacgggcacccctcccccacctccgcgacccgctcccggaatggcctgggggttggggggcgctgccaagtcctgtcctcaggtcccctcgccggcgctggctcccccacttccccgcccccacccccccacccgaccctgctcgagctgctcccgaagaggagctgggggcggggcggggggcggagcccgcaacaaagactcggagcgagcgagggggcgggggtggggcggaatcccggccgccggcgaggcgggggaggcggcggcgcagggtcgccccggccgggcgggcggggtcgcgcctggtggcggtccccgcgccgaggcgccgctagggcgggcgggggtcgggacgccgggctaggggcgcgtcatgtggccgctcac

SEQ ID NO: 20670 - DNA, 2300 bp, Homo sapien
gaatctctgattgaagggagagagtgagagaaggagacagagaatgtggatccagaagtgtttcatagagggaaggggtgtagaactgtcagaagatgtagttagactataggaagaacttccagcaaggcagggcagggcaggaattttgtgagagtcttttagttggagaagtctcagcctcagatgtccctggggtgggaggaggcacagcttacagagataccctctcctcctcccaccctggggggcccccatctccccctcaggcttgatggggccccaacccctcctcttcagggacacagagactctttgtctggggagtcagaggctgggagggaggcactgcttgcgtctccctcttcccctggggcggaggtgggggaagcagggttcggggagcagttcagggctcagaatacgcctcttggttcctcccctccctggggaaacaccctcacatcctgcgtgtctgcgcttgtccaattgcataaaagctctatttgacctcatgggggcctcttcatgctggaggtgggggtcccagcacggtgaggggggcctctgcctcatcccaagaatggcaagaatccaccccttcctccccagtggctgtgcgttgctttgcgacagggacagattcccaccacctcccaccaacgcgccggcctttttttttgagacagacagagtcttgctctgttgtccaggctggatcgcagtggcacaacctcagctcactgcaacctccacctcccgtgttcaagtgatcctcccacctcagcctcccaagtagctgggactacaggcgccagtcacaatgcctggctaatttttgtatttttagtagagatggggtttcgccatgttggccagctgatctctaactcctggactcaagcgatctgcccgccccagcctctcaaaatgctgggattacaggcatgagccaccgcacccagctcagactccctcatttggtggggatttgggattgaggccggggcatccactggagacctgagttggggcggggggagatgagggttagggatggagatgagaccctttatttgaggaatcaagaatttggggaaagtgaaaactgtgttttgggatctgtggtgagaatttgggaccaggacacgtgacttagggatttgagtggacagatgaaggtttggagtaaggctggggaccccattttgggatctggggtgagatttgaggtgggatgaggacccgttagggacttgaaggaaaggctttggggctgaggctggtacctcctattgtgcagctgagggactgaggataaagcaggtaggtgagtgagagttcggggtgaggttgggaccccagttgggggcctgagtgaggcagaaaggacttggtgccaggggcggtggctcatgcctgtaactccagcgctttgggagggcaaggccggaggatcgcttgagaccagaagttcaagaccggcctgggcagcatagcaagatcccggtctctacaaaatatacatattttaaaattagctgggtgtggcagtgtgtgcctgtggtacctgcttctcaggaggctgaggcaggtggatggcttgaacgcaggagttggaggctgcagtgagctatgattgcaccactgcactccagcttgggtgacagatcaagaccctgtctccaaaataaaatgtaaaaataatagaaaataaaaaagatttggtataaagctgcacctcctcctaattctagggcctggatggaggctgaagtcttgaatgaggttaaggtctcctttgaggggatctgctaggcggaaaaggtttggggtaagactggaaccctcgaactctagggctgggtgggagtgacccttctcctccacagtggggtggggcaggaacaacccagctcctggcgctgggctccaccccagccagccaatcagccctcagcacaaagtttcccaacttcccagtccagctgtcagcgctccccctccaaaaagccccgcctggccaggcgctggagcgcagggcgaggccagggcggggtctcgggcagtttcccgcggaccctgagaggagcggccgccgcgagtgactgcaccgagcccgagaagtcgccgcgccccgcagccgccccgactggttccccgccttgcccgtgggccccgccgggatggggaaccgccgggacctgggccagccgcgggccggtctctgcctgctcctggccgcgctgcagcttctgccggggacgcaggccggtgagccgggagggaagagatgggac

SEQ ID NO: 20671 - DNA, 2300 bp, Homo sapien
acaggcatgagccaccgcccctggcaccaagtcctttctgcctcactcaggcccccaactggggtcccaacctcaccccgaactctcactcacctacctgctttatcctcagtccctcagctgcacaataggaggtaccagcctcagccccaaagcctttccttcaagtccctaacgggtcctcatcccacctcaaatctcaccccagatcccaaaatggggtccccagccttactccaaaccttcatctgtccactcaaatccctaagtcacgtgtcctggtcccaaattctcaccacagatcccaaaacacagttttcactttccccaaattcttgattcctcaaataaagggtctcatctccatccctaaccctcatctccccccgccccaactcaggtctccagtggatgccccggcctcaatcccaaatccccaccaaatgagggagtctgagctgggtgcggtggctcatgcctgtaatcccagcattttgagaggctggggcgggcagatcgcttgagtccaggagttagagatcagctggccaacatggcgaaaccccatctctactaaaaatacaaaaattagccaggcattgtgactggcgcctgtagtcccagctacttgggaggctgaggtgggaggatcacttgaacacgggaggtggaggttgcagtgagctgaggttgtgccactgcgatccagcctggacaacagagcaagactctgtctgtctcaaaaaaaaaggccggcgcgttggtgggaggtggtgggaatctgtccctgtcgcaaagcaacgcacagccactggggaggaaggggtggattcttgccattcttgggatgaggcagaggcccccctcaccgtgctgggacccccacctccagcatgaagaggcccccatgaggtcaaatagagcttttatgcaattggacaagcgcagacacgcaggatgtgagggtgtttccccagggaggggaggaaccaagaggcgtattctgagccctgaactgctccccgaaccctgcttcccccacctccgccccaggggaagagggagacgcaagcagtgcctccctcccagcctctgactccccagacaaagagtctctgtgtccctgaagaggaggggttggggccccatcaagcctgagggggagatgggggccccccagggtgggaggaggagagggtatctctgtaagctgtgcctcctcccaccccagggacatctgaggctgagacttctccaactaaaagactctcacaaaattcctgccctgccctgccttgctggaagttcttcctatagtctaactacatcttctgacagttctacaccccttccctctatgaaacacttctggatccacattctctgtctccttctctcactctctcccttcaatcagagattcttcacccagaatacagacactaattccccccaactttcacagaaactctccccagccctaaataatttatactcggccaggctcagtggctcatgcttgtaatcccaacactttgggaggctgaggcggctggaccacttgaggtcaggagttcaagaccagcctggccaacatggcgaaacctcatctctactaaaaatacaaaaattagctgggtgtggtggcacacgcctgtaatcccagctactcaggaggctgaggcaggagaatcattttaccctggaaagctgaggttgtagtgagccgaaattgcaccactgcactccagcctgggtgacaagagcaagactctgtctcaaaataataataataatttacagtcataataaaaattataaattaagaaaacagttacaaatggccaaggcaggaggatcacttgaggccaagagttcgagaccaatctgggcaacatagcaagatcccatgtctaaaagaaaaagaaatttaaaaattagctgggcatggtagtgtgcgccggtagccccagctactctggaggctgagataggaggatcgcttgaggctgtggtgagctatgatggtgccactgcactccagcctgagtgacagagcaagatgctgtctcttaaaaacaaacaaacaaaaaccagtgatgtctatagtaggtgcggagaagaaatgtttggcagatgaagaaaatgaggtgcagagaggatttaagagattctctcttactgcctgttcagggtcagtccagaattgagggtctccgggggagggcagaggctttgccctgcaggggatctgtgggagggggttaggagggagcagatgagcccaggatgaatggtca

SEQ ID NO: 20672 - DNA, 2300 bp, Homo sapien
aagagaaagagagaagcaagccacttctgtagcatttagggtggtagacatactcttctcccacccatgagatattctgggctacctatgttgtcctgtgaggttgtacagaccatgtctgccacctgtgaggttgtataaaccatttcttcaagtctatgaagttgtacaggccaccttgtctacccagtggtgttgtactgcatctcatctcatctgccacttcacagtttagaccatctctgaaagtctatgaggtagtacaggttatgtttgccatcatgagattgtccagaccatctctgcagctctatgtgatggtaaatgacacatttgctgccttgtgttttacagaccatctgcattgctatgaggttgtgcaggcaatgctgtccacctgagattgtatgggctatgtctgccacttctggacattatatgaatcattcctgcagctctaacatgctacacaggccacctagtttccctggtgaggctgcacaggccacttcataggttgcccagacttctttgtggctttatatagtttgaagtccacctccaccatcttgagagattgcctagaccacatctgcaacccatcaaggctttatgggatatattcgtcacctcccagagttgtgtgggtcatcaatgaaaccatctaagtttccaagggccacctctgcccctcccaattttgcacagccatctctgaagcagcatgaggtatgtgggtgcttcagagacagtggaattgtcctccatcccccacgtatatatttaacaagccagtggacggacatgctttggtcatctttggggtgaaattggactcctgccggatccctatccaaagctccctgcagagggtggaggtgactgaatcccagctcctccccaacctccaatccactccactctctaacgctccccaaaaaaccatatcctctcctctatcttaccctaagaacagatctctgaaggcctgggccacgtctccctccagaaggacacgctcatggccgcattccaaggcccaggagaggacttcattggaggctcaatctttgtcaatgtcaccatgttctcctcaggtgccaccctcaccccggcccctgactgaggtcaggacatggtgttcttgcccaatgcagacactccacccatgtgaccttgggccacctcccagcctcagtttcctcattagagaaatgggtggaaggagctgaaatagtgttattgtcgttctctgccttcaccaagatggggctctcatactagtcctgccactcacttaagaaattgaactccctcacaaactctgtgttctcactgtctctacagggggtgagatggtgcaagctgagacctcaggggtgaagatcatccagagcccatacaacatcaagttcaccaggacaccccagtatttcaagccaggaatgcccttccactttcgggtcagagtctggactcactacacccagggactcagggccccctccccaaagcagacttcccacaaagagacaaaaacccacactggactcacctgcatccaactcatctgaaggttgagtctatcatgttccccagactaatcccagagtccccccaaaccttaaccctaaagcacagtgatggctccagaatttctctgtggggacttagaggccacaatcaggctggaagttggtgtttgaaagtttatctagaggctgcatttgcacatcaaagcatggccttttcacatatattaatttggatgggcattaggaaagtcagggatatcctttggcaccaatcctactccaagtctcctataggctctcatgtgtcctccttccctctccactctcagtcttcccactcaccatcagctctgcaacacccaggataaccacatgtggttgtacactgcaaagctctaggaggtgccattcataaaaactccaatatgaatggtgcccccggtgttgtttagtgcaccatgtataaagttgtacaaagcagtcctattcagatcatattccagtctcacctctcacaccaggccactgcaggcttttccttcaccttaccccagattccacctcaggtcttcatctcaaatcctgatgggtccccagcttccagagtccttgtccactcccaagaccaaaaagtgtacacctcagctgaggggttggccactctgaccatcaacacagatgcaaatctggacaagctccccatcgaggtaccaacttgacaaggcaaggagggtgggattagagctgtgtgagttggaagggttg

SEQ ID NO: 20673 - DNA, 2300 bp, Homo sapien
cctgggtgacagagtgagaccccgtctcttaaaacaaatttaaaaaaatgctagctctacgagggcagggatctttgttttgtttgctgtcatgtccacagtgcctggaacagcattgggaacagagtacacgctctatgtggttgccacggtgattataacctaacagacctttggtctgcatattctgcgctaaaaaaaaaaatcaaaaaacaaaaaacctaccagatctgatttatgtcagggctagctcagactcttacctgtttcctgcccactcagtgcccatctcggccagtgaatgggacatagctatgacctccctctgcactgggcaaatagattagtaactggcaactatgacaggcgatccactccaaacctcgccacttccctcaggataaaatcccaggtcttctgtgcagtttccagcccccatcctgcctaggattccaccattcagccacaaggaatcatgaactgcttgtagtttgcaaatacagtagtctccagagtggagtacatacaccctataaacaaagctttggggttcaactggaaaaactttagaatatctagatttggggggttttattgtttgttttttagtcttttaaaaataactttttccttttcttttttctttttttaaagacaaggtcttgctatgttgcccaggctggttttgaactcctgacctccagtgattctcccaccttgacctcccaaagtgctagcattacaggtgtgaaccatcatgcccagctccatttatctatcaatattttatataacagttaacagaatatattgatataattgtatttgtatataatttataaataatatccatctttgaggccaggagtttgagaccagcctgggcaacatagtgagaccccgtctctacaaaaaaaatagaaaattaaccaggcatagtggcatatgccagtagtcccagctacttagcaggctgaggcaggaggatcgtttgagcccaggagttagaggctgcagtgagccaccatcaaaccactgcactccagcctgggcaacagagcaagatcttgtctcaaaaaataaataaatgaataaatatccatctgggggtgtaactttaacacttttacctataggggtgtgcaatggagaaaaaaatttggagtcgttgaacacaatgctattttgctcctcagagagtatccggcagtctctggagacgtttttggtagtcacaacagggagagtagggaaccactggcatctagtgggtggaggccagggatggtgttaaatgtcccccaatacacaggacagtcccccacacaaagaactaggccgcccaaagtgtcaagagtgctgggcttgagaagccattgcccaaaaaccccagacttagtcttgctttgggggctctgcacggctgcctcatctccccactctattcctcccctagctaagacctccaatttcagtgactctacaaagcatcccctcctccaatgaagttgccatctctgtgtccccaggctgggccagagccccaccacctaagggctccctgatgtgccctgtactgggttagaattgtccgtcccacggggttcttaaccattgcagattccctggatccctgagacagccggattctaccgggctactagagaccaagaatctgtatttttctcaagcaccgctccccccaaccacacacacactgcctgcccctatcaagggcacacagcaggtggcccagtgactagttgaacgcctactgcaagccaggcgctattacgcgatccactcgggaatcttggcacatactccactccatggtgtagacaccaggattctccccatttcacagaggggtaaactgaggttgagagaggtgaccgtagctaggacagagactcagggcaggaaaagggcccaggtcctcatgagcgccagattcccggggaaggagggagaacagagaggagggtgatgaactgggggagcgcgcgctgggtgggggggcgcggggcctcgccgcggccttctgatgcggccccgcccccacgagggacgtgaagacgcggaccccgcgcagcgtggggacatgtgaccgactgcagaggccgcgccgcctcccccgtccgaggtctgcgcgctccgccgcagggtgcagacccggggcgcccgcctgggtttggggcgcaagagcagaggcggagccagggcggagccagcgcgccgggtcccccctgaatcgaaagcgaaacaggggccggggaggaagggcggagccggccccg

SEQ ID NO: 20674 - DNA, 2300 bp, Homo sapien
tagcattacaggtgtgaaccatcatgcccagctccatttatctatcaatattttatataacagttaacagaatatattgatataattgtatttgtatataatttataaataatatccatctttgaggccaggagtttgagaccagcctgggcaacatagtgagaccccgtctctacaaaaaaaatagaaaattaaccaggcatagtggcatatgccagtagtcccagctacttagcaggctgaggcaggaggatcgtttgagcccaggagttagaggctgcagtgagccaccatcaaaccactgcactccagcctgggcaacagagcaagatcttgtctcaaaaaataaataaatgaataaatatccatctgggggtgtaactttaacacttttacctataggggtgtgcaatggagaaaaaaatttggagtcgttgaacacaatgctattttgctcctcagagagtatccggcagtctctggagacgtttttggtagtcacaacagggagagtagggaaccactggcatctagtgggtggaggccagggatggtgttaaatgtcccccaatacacaggacagtcccccacacaaagaactaggccgcccaaagtgtcaagagtgctgggcttgagaagccattgcccaaaaaccccagacttagtcttgctttgggggctctgcacggctgcctcatctccccactctattcctcccctagctaagacctccaatttcagtgactctacaaagcatcccctcctccaatgaagttgccatctctgtgtccccaggctgggccagagccccaccacctaagggctccctgatgtgccctgtactgggttagaattgtccgtcccacggggttcttaaccattgcagattccctggatccctgagacagccggattctaccgggctactagagaccaagaatctgtatttttctcaagcaccgctccccccaaccacacacacactgcctgcccctatcaagggcacacagcaggtggcccagtgactagttgaacgcctactgcaagccaggcgctattacgcgatccactcgggaatcttggcacatactccactccatggtgtagacaccaggattctccccatttcacagaggggtaaactgaggttgagagaggtgaccgtagctaggacagagactcagggcaggaaaagggcccaggtcctcatgagcgccagattcccggggaaggagggagaacagagaggagggtgatgaactgggggagcgcgcgctgggtgggggggcgcggggcctcgccgcggccttctgatgcggccccgcccccacgagggacgtgaagacgcggaccccgcgcagcgtggggacatgtgaccgactgcagaggccgcgccgcctcccccgtccgaggtctgcgcgctccgccgcagggtgcagacccggggcgcccgcctgggtttggggcgcaagagcagaggcggagccagggcggagccagcgcgccgggtcccccctgaatcgaaagcgaaacaggggccggggaggaagggcggagccggccccgaggcaccgccccctgccctgcgcggctgctggaccgacgggcgcacccaggtaggggggcggctgagccgcgcagtgcggaccctcgcggggaactgcgccgccgccaccatgtctcaggaaggtgtggaggtaagcgatggctacggctgggccggggtcagccgcgacagaccccgaggagcggccgggaggcgcggagggggcttcgcagttcctggggacccccatcctagaaccccagatccttacccctgcctggcgctcgccccccttgaaaaggaaagtgactcccacgtttccccagagcgaaatgaggcctccccgaggaaaagcgggggctgcagggtcaaaggtcagaggccagagataacctggccgcccccccacaccttaggctgggacgctcgccccagtccgcgccttcccccaacgccctgtggggactttggctttttccaggaaatgccgtaaagggatgaaaggcggggggggggcggcggaggccaaaaccaagggtcaagttcgggccgggagaacggtgcctagagatgggggagggatgatcccgtttccccttcccccaccggaacccccctgtctccatcccagctggagaagagcgtccggcgcctccgggagaagtttcatgggaaggtatcctccaagaaggcgggggctctgatgaggaaattcggcagcgaccacacgggagtggggcgctccatcgtgtac

SEQ ID NO: 20675 - DNA, 2300 bp, Homo sapien
agcaagaggggggacccgacccgttcatggtgactgacccccctctgaaacaggagggaccaggcattgtcggtccataactcatcacccaatctcactttttcacctctccatcatttgtccggccagggagcctgcaaacagtaggcgctcattatgtgctgattgtattcaatgggggagagagccatgaaactaagcaatgaaaggagccaggattattgccatcatagcgggggcgcagaggtcagagaaggcttactggaggaggaggtaccaagtcttaaaggatggggaggagtgagccctgggaggggaaagggaaagaaaggcaggggtcttggggtgggggagggaatggcataagcaaaggctgggaggtggggaagggttgttagtggcagtctctagaaaggctaggatgagcagaggattggggaggagagagaggcaggggaatggaacccttgtgttgaatgaatgaatgaatgaatgaatgaatgaatgaatgaatggctttgaagcacaggtgcatcatggctactttgcttctttgacagctttggtgatgggaacgctgtggatttagcctgcctgaaaggcttagtgtagggctgttaaagagtataataggccaggcgcggtggctcacgcctgcaatcccaacattttgggaggccgaggcgggcggatcacctgaggtcgggagtttgagaccagcctgaccaacatggagaaacccgtctctactaaaaaatacaaaattagctgggcatggtggcgcatgcctgtaatcccagctactcgggaggctgaggcaggagaatcacttgaacccaggaggcggaggttgcagtgagctgagatcacaccattgcactccagcctgggcaacaagagcgaaactctgtctcaaaaaaaaaaaaaaaaaaaaaatgccgggcgcggtggctcacgcctgtaatcccagcactttgggaggccaaggcgggcggatcatgaggtcaggagatcgagaccatcctggctaacatggtgaaaccccatctatactaaaaatacgaaaaaaaaaattagccagttgtgctggcaggcccctgtagtcccagctactcaggaggctgaggcaggagaatggcgtgaacccgggaggcggagcttgcagtgagccgagatcgcaccactgcactccagcctgggcaacagagcgattctccgtctcaaacaaacaaaaacaaacaaaaccagagtataacaaaacatgtatcatagtctacatttatacatataaaagtatgataaaaatgatagcagaggggccaggtgtggtggctcacgcctgtaattccagcactttgggaggttgaggcgggcagatcacttgaggtcaggagttcgagattagcctggccaacacggtgaaaccccttctctattaaaaatacaaaaaattagctgggcgtggcagtgcatgcttgtaatcccagctacttggcaggctaaggcagaagaatcacttgaacctgggaggcagaggttgcagtcagccaagattgtgccattgcactctagcctgggagacaagagcgaaactccgtctcaaaaatataataataataataataataataataataataataatattagcagagagtagcattcattgagtacttcccacatggcaagattccaggaatttatttatttcatcactgcagtgaccccaggagacaggtcctattatttatccccatttcacagacaaagaaactgaggccgaagtcacttgccagcaagcaggggcagctgcgatttgaaccctggccacctggagtcagagcctgggctctaacatgcctgtcagtgggaacccagggggcagggagtggcttgcccaagtccccacagctggaagtgatacagctgggatttgaacccacatctctctcccacttagccgagcacaacgtggcctcaaaggggcgatatgtcacaacatcaacaagcatgtggcatttgcaggcaggaagtgagtatgggggtcaggctagcctcactcaggcaagccctcccctaagcctcagtttccccatctgagcaataaggtaacaggtgtgcccacctctcagggctgctatgaggacaactgaggccacacacctggctctcaataagtgagtggtgctctgtgagcttctggcgagttaggggcaccctactcattgcggccgggggcctcccccagcaaacgggtggaaagaggcctgagccccatccccagtttctgcccctgctat

SEQ ID NO: 20676 - DNA, 2300 bp, Homo sapien
tgcggtggataggtttccgggtgtcaactgtgtgtacctgttttgtatctgtgcactactgtgtgatcacaagaaccaggatgtggacaagcctgacacacagataaagacccactcagcccaccccatttccctttaagttgtgatgtgtgtgtgaccatatttggaacatacagttgttgcctgaaactgttatgtttccagctgtgtctttttaaaaattttttttaatcaatgagatatcctttatttatgaaagcatagttccaatgcagaagtcaagctttatggttatatattaggataggttcagatccaatatgacaatgtttagcactaactttaacatgttaaagctctgattcctgaatgtttttctcacttaatatattctctccaatgacaagctggtgtgcttggcttcttatgctgaaaaatatatgcctgaattctataacaagctattaacaaaatcatgaatagttaattaaataagtgccaacactacatggaacttactggccaccaactcagaaccataaaactacacacacacacacacacacacacacacaccacacacacaaacaaaacaaaaaaaacaccaaagaaagatagctatcactgtacatatgaatactgtccaggatatcagatcaattatcaaatccaaggtctctggtgttttgtctcacagtgttgaatatatgaatgcttctctattatactgacttgtattattttcaacaaataattatgtggactcaaaatcttacatttttatttcttttcttttttttttttttttttttgagacagagtcttactctgtcgcccaggctggagtgcagtggctcactgcaacctccgccccccgggttcaagcgattctcctgcctcagcctcctgagtagctgggattacaggcatgggccaccacacccggcaaatttttgtatttttagtagagacggggtttcaccatcttggccaggctggtctcgaattgctgacctcgtgatctgcccaccttggcctcccaaagtgctgggattacaggcgtgagccaccgcgcccagccttacatttttatttctaattataaaatccagattaatccaaaaaacataaatcacatgtaactgaggtagggttttcactttaagaatatattgtttctatcacaatttaaaaatttacagctgtgtcttttatatttattttttattttaattaattaattcctcactttattattatttatttattatttatttatttatttatttatttatttttgagatggaatttcagtcttgtcgcccaggctggagtgcatgcggttgctcgatctcggcttactgcaacctccacctcctggcttcaagcaattctcctgcctcagcctcccgcgtagctgggattactggcgcatgccaccatgcccagctaatttttgtattgttagtagagacggggttttagcatgttggcaaggatggtttcgaactcctgacctcaggtaatccacctgccccggcctcccaaagtgctggctttcaggcatgagccactgcacccagactttcgctgggtgttaatgtgtgcgtgcgtgcaaatgtgtgtgtgtgtgtttgtgtccactctgttatgtgcccatatgtgtgtgacagctgtggtgtacatgtgtgagtttctgagtcaagctaccttggctggctcccatcctggtctctttttggctgtgtgaccgcaggcaagttgcttaccctctctgagcctcagttttccctgctgtaaaatgagggtacatacagaatccagctcaggttgtaaggatcaaatacgtaaaaggtgtggagagtttagagccaagccctacacacggtaagtccccagtgatgttcctctttctatgtgtggtgtgtgcgtgtctggggctgggatcacgcctggctgccccagggcctgcagcctcccacgctctgggctctgcagtggagggtgtgggggaaagggagggatgtccaggacactgacctgtgttatcaggctctggtggcctgggcaggggggtctggcaattctgtctcatttctcattcgggaaatgctaaatatttatagtttgggctcctgggcccagcatcccagctccactcccaggctctgggggctggggagtggttaccaagcctcctctctccttctgtcccactgccctctccccgtctctagctcagaggccccactggaccctcggctcttccttggacttcttgtgtgttctgtgagcttcgc

SEQ ID NO: 20677 - DNA, 2300 bp, Homo sapien
attcaacactgtgagacaaaacaccagagaccttggatttgataattgatctgatatcctggacagtattcatatgtacagtgatagctatctttctttggtgttttttttgttttgtttgtgtgtgtggtgtgtgtgtgtgtgtgtgtgtgtgtgtgtagttttatggttctgagttggtggccagtaagttccatgtagtgttggcacttatttaattaactattcatgattttgttaatagcttgttatagaattcaggcatatatttttcagcataagaagccaagcacaccagcttgtcattggagagaatatattaagtgagaaaaacattcaggaatcagagctttaacatgttaaagttagtgctaaacattgtcatattggatctgaacctatcctaatatataaccataaagcttgacttctgcattggaactatgctttcataaataaaggatatctcattgattaaaaaaaatttttaaaaagacacagctggaaacataacagtttcaggcaacaactgtatgttccaaatatggtcacacacacatcacaacttaaagggaaatggggtgggctgagtgggtctttatctgtgtgtcaggcttgtccacatcctggttcttgtgatcacacagtagtgcacagatacaaaacaggtacacacagttgacacccggaaacctatccaccgcaccacagaggtcaccgtctgtctcccacacactcggtcacattttcacacaagtcaaatcacacgaggacggaactgggggaagtaaccatgcagtcatttcccaggggtacaaagaaactcacatagagccccacagagcccaggcccagggtctgagacctgtccaaaggccccaccgacgaccagccacacgccgggagagtcacctccttcccctggtctgcaccatcctgagctcccgagtaactcgagtggactccagggttgaaaaaggaaatggtcgtcccagatctgagagaggctgccaggctgggctctgggcctgggttggggcccccacactgggcccctcggccccccaccctcagccccctctggcttccccattggcagtagagagggagggaacttcataagtcacagagaggggctgaagaatacagagagtcagacagatggagatgggagaggcatagggagatgggagagacatagggagatggcagagaaagggagagacggggagatggggagagacagagagagatgggaagatggggagagaccacagggaggcagatgagaagaaagaaacagggatggggccagacacagagaaaggaaacttctttagtttccatcttcagttataaatgatgaaagagacaactgatgacagagacaaagttacaagagggagaaagagacagggggaagacgagggggaggggagacacatctgggggagaggaggaagaattggggtgccagagagagcaaggagggagaggaggccgatgggggaggagagagtaatgttcagcccagtgagggggtgtccctttcccccactgcaaggttttggggaagaagccagaggcctgaggccaagactgaggctttgagcggaaagaaggagggggcgagttattcacgaaacgcccgccttgccctgagtttccagaaggtgatgtggagtttccatccctcagcctgtctgcagacaggggtacccggggaggacagctggcccagaggagttgcgagactaaagtgaatgattgccacagtcattccctccggtggcttctccccaagtacttggcgccagagcgcccaacattgtgcatacatggtcgctcctaattcgtgggcccgggggacattatcagccttactttgggatattttaggagcctcggaatgcagaaagtggttttagcccagctggaggaaatgggccgaagcgggattcgaaccggcggattcgtttctctgcagcccggagccgcgtagccccgccccggtctccctagaaacaggcacccgtgtctccatagcaaccgctccatctgattgcccctccccgctcccagaggccacctagtgcgcaggcccgcctgatgtcgtcccacgccgtgccggctctcaggcgccggaagtgagctgcgcagcgccggaagcggcggacgcaggaggcctcgtggaggacacagcagcatgggacagtcagggagggtaaggcccggcagcttgggaggcaggtggcgcaggtggggtcccggccgaggtcgcggcgctgaccctttgtctc

SEQ ID NO: 20678 - DNA, 2300 bp, Homo sapien
gccccaccttgaccttccaggtcaagaaggtgagaggggtggaggtggtacaaagccatgtggggtgggagctggacttggggttgtccgcagccatgtgtggttggtggtcaccccctcctctctcctgtcctacagtactcgctggtgcgtgatgtggtctcctcactgcgccggcaccgcatgcacgagcagcagtttgcccacccacccctcctggtactcaacagctttggcccccatggtatgcatgtgaagctcatggccaccatgttccagaacctgttcccctccatcaacgtgcacaaggtgggtctggcctggcgaggtggcaggtatgggggggtgcagcggatagaggtgccacaggccctcagatggattgctcactcctcccagcgctgagactgggagctcctgggtctgctgagtcctgaggtcaaatcccactcctgtgtctgatgatgctgggcaaaagtgtccagagattcccccagcggtccacaccccgtgagctgcaccttttccagccggtggaaagaaatactgatggagctctgtttcccacgtgtgttgagtgctgggctgagcaggatcgtagcatctcttcttagggccctgttttacagagggaagctgcgggcccagtgctatggcttcggcctgtaatcccagtactttgggagggcgaggtgggaggatcgcttgaagccaagactttgagatcagcctgtgcaacatagcgagaccccatgtctacaaaaagtagatttttaaaaagcccggtgtggcggtgcatgcctgtagtaccagctactggggaggctgaggtgggaggatcacctgagcccaggaggtcaaggctgcagtgagttgtgttcacgccactctactccatcctgggtgacaaagcgagacactgtctcaaaaaaaaaaaaaaaagcaaatctgaggctggcagagatgctaagtttagattccagggggcaggactggatttttaatttcatctggctcctgagtcctagctcctaatccttgtcactagtgactctcagatgggacttataaattatatataagatatcagtcatcagggaggctaatacggctctgggaccagaatttcttgtttaccttttttttttttttttgagacggagtcttgctctgtctcccaggctggagtgcggtggcacaatctcatctcattgcaagctccgcctcccaggttcacgccattctcctgcctcagcctcccgagtagctgggactacaggtgcccgccaccacaccccggctaattttttgtatttttagtagagacaggatttcaccgtgttagccagggtggtcttgatctgacctcgtgagctgcccgcctcggcctcccaaagtgctgggattacaggcgtgagccaccgtgcccggccttctttactttttttttaagagacggggtctccgtacgttggtcttgaactcctgggcacaagcaatcctgcagcctccgcttcccgagtagctgagactacaggcgtgcaccaccacatccaactcatttttccatctactttttgtagacatggagactcgccgtgttgcccaggctggttttgaactcctgggctcaggcagtcccaccacttcagcctctggagtagctaaaactgcaggtgcgagctggaagcagcatttctagccagtgccacagtccacgaacagtgtgtgtatcccccaaagcccccacttccccaaactttgccatgagtctactggactatgctctcttcctccccttccaggtgaacctgaacaccatcaagcgctgcctcctcatcgactacaaccccgactcccaggagctggacttccgccactagtgagtgtcccagcaggatgggagacgagggggtgccgggtgggggcctccacatgcggctgatgacagcacttctgctgagacgctgtgattgctctgtccaaagtaaacgccctgacgcactgtgggaagggtgagatgggcaccgccagccccatcacgtgccccctgaccacccccttgccgtccactcatgttcctgcagtagcatcaaagttgttcctgtgggcgcgagtcgcgggatgaagaagctgctccaggagaagttccccaacatgagccgcctgcaggacatcagcgagctgctggccacgtgaggagggcatagggcgggaggccactgcggcccggggaccccagaacaggaccgggagcctgagctcccccactgagccctgttatgtcctacacacagggg

SEQ ID NO: 20679 - DNA, 2300 bp, Homo sapien
gccgtgttgcccaggctggttttgaactcctgggctcaggcagtcccaccacttcagcctctggagtagctaaaactgcaggtgcgagctggaagcagcatttctagccagtgccacagtccacgaacagtgtgtgtatcccccaaagcccccacttccccaaactttgccatgagtctactggactatgctctcttcctccccttccaggtgaacctgaacaccatcaagcgctgcctcctcatcgactacaaccccgactcccaggagctggacttccgccactagtgagtgtcccagcaggatgggagacgagggggtgccgggtgggggcctccacatgcggctgatgacagcacttctgctgagacgctgtgattgctctgtccaaagtaaacgccctgacgcactgtgggaagggtgagatgggcaccgccagccccatcacgtgccccctgaccacccccttgccgtccactcatgttcctgcagtagcatcaaagttgttcctgtgggcgcgagtcgcgggatgaagaagctgctccaggagaagttccccaacatgagccgcctgcaggacatcagcgagctgctggccacgtgaggagggcatagggcgggaggccactgcggcccggggaccccagaacaggaccgggagcctgagctcccccactgagccctgttatgtcctacacacaggggcgcggggctgtcggagagcgaggcagagcctgacggcgaccacaacatcacagagctgcctcaggctgtcgctggccgtggcaacatgcgggcccagcagagtgcagtgcggctcaccgaggtgaggcccagggcagggggacccccgggctccaccagtcccaacggtgggctgacgcttcttcctcgtcccctcagatcggcccgcggatgacactgcagctcatcaaggtccaggagggcgtcggggagggcaaagtgatgttccacagttttggtgaggccggggccgccgggggtggggggtcatgggtgtggagctgcacccggatcttggtgacccgcgtctcttggctcagtgagcaagacggaggaggagctgcaggccatcctggaagccaaggagaagaagctgcggctgaaggcgcagaggcaggcccagcaggcccagaatgtgcagcgcaagcaggagcagcgggaggcccacaggtccaggcagagctgggaagggcagggccaagggggggtccctgggatgggcggctatgttgacccccacgccctcctccagaaagaagagcctggagggcatgaagaaggcacgggtcgggggtagtgatgaagaggcctctgggatcccttcaaggacggcgagcctggagttgggtgaggacgatgatgaacaggaagatgatgacatcgagtatttctgccaggcggtgggcgaggcgcccagtgagggtatggagtggggtctgcagcagggcacccagagcctgtccttgtctctgggggccctgacactgtctctccccacagacctgttccccgaggccaagcagaaacggcttgccaagtctccagggcggaagcggaagcggtgggaaatggatcgaggcaggggtcgcctttgtgaccagaagtttcccaagaccaaggacaagtcccagggagcccaggccaggcgggggcccagaggggcttcccgggatggtgggcgaggccggggccggggccgcccagggaagagagtggcctgagcccaagccgcaccggagcagcggctggattgaacgccccagattggggcccgagatgtggccctcggtttcctttcataaaggagttgtgtccccagcccttccactccagtaaagaactgaattggccaggggtccacgtcagcgtttgggatgggggattctggagccatacaaagcaacccagagagtcctgggccggccacacccgagagtccctcccacctggtttcttcctggaagctgggtctctcccctaccctgcacggggttggtttcattggtggcagcagcagccatgagtggcccctccccccagtcccaccaaagagccgtgcaagcagacaggtcacactttcagcagatgagcttgaacctcaggagggttgtggcacaatgaggaaggaaacgtgggtggaaaggcacgctggcctgctctgctggctgggccagtaactggggatggggctggggcagggcccactaagccactggtgactgggggaggggctggggaactgggtagcagacacaggctgaggatcggcacgggag

SEQ ID NO: 20680 - DNA, 2300 bp, Homo sapien
ctggtaacacagacagcggccaccctactcccccaccacacctggccccactagaggcctcctccccaaagtccagccccagcaaggcctgccggctccacttcagatctgtgccgtccaaagccccgtgggggtccagcccccactctgccctgaccttggcacccgccgccgcccaaagcctcttctccccgtggccaccagagagcacccgcgagcgctggagtcctgccccatccttttgcttccaggtgctcacacttggccagggagttgccgccaaaaagccagactcaccccacaaggtcccccaagagcgctcccgcccgccataccccccagtgccaccctctgtgctccgcgactcactccctcgcaccagcccacccaggcttcctggctgctcttgcagacttgtgccttggtaccttcgcacccagacttttttttttgagacagagtctcactctcatcacccaggctggagtgcaatgatgtgacttcagctcactgcaacctctgcctcccgggttcaagtgattctcctgcctcagcttcctgagtatttgggactacaggcacccaccaccacgcctggtttaattttaaattttgcatttttagtagagatggggtttccccatgttggccaagaggtctcgaattcctgacctcagatctgcccgcctcagcctcccaaagtgctgagattacaagtgtgagccaccgtgcccagccacacccagacattcttgaggctcctcttcccacgtccgtggtcctgcctgcgagaggccccaaggccaccctaaccactgttgacagcagccctcgtgcctccactctcccttccctgcgttattttcccccataccctgcgccacctgatgacggtgagaaaaatctccctccttcgggaggatgggggggcctgcttacccattactggtgccagtgctcaccacagtgcccagggcacagcagcacaggggcactcactccttgtgcaccccacccctgcctctgcaggctggggacaggcttctccggaggcgcctccctgctcccaacgccagcctgcttaaggaggaagtgtcgtctagacgtggcttttttttggagacaggatttcactgtcaccgaggctgaggtgcagtggtgcaatcacagctcagtgcagtctcgacctcctggggtcaagtgatccccctgcctcagcctcccgagtagctggaatcacaggctcgcatcaccacacccagccttgacctaggctttttttttttgagatggagtttcgctcattgcccaagctggagtgcaatggtgcaatctcggctcatggcaacctccgcctcccgggtttaagtgattctcttgtctcagcctcccgagtagctgggattacaggcatgtgccaccaggcccagctaatttttttatttttagtagagacggggtttctccttgttggtcagggtggtctcgaacccctgacctcgtgttccacccccctcgacctcccaaagtgctgggattacaggcgtgagccaccgtgcccagccccagacctaggtgttttaccaatacccactacccccacctcctgacaatctgcagacccccagagacagccaacatgccttctccttacccgagacgttggctgccatgctcccgtgccgatcctcagcctgtgtctgctacccagttccccagcccctcccccagtcaccagtggcttagtgggccctgccccagccccatccccagttactggcccagccagcagagcaggccagcgtgcctttccacccacgtttccttcctcattgtgccacaaccctcctgaggttcaagctcatctgctgaaagtgtgacctgtctgcttgcacggctctttggtgggactggggggaggggccactcatggctgctgctgccaccaatgaaaccaaccccgtgcagggtaggggagagacccagcttccaggaagaaaccaggtgggagggactctcgggtgtggccggcccaggactctctgggttgctttgtatggctccagaatcccccatcccaaacgctgacgtggacccctggccaattcagttctttactggagtggaagggctggggacacaactcctttatgaaaggaaaccgagggccacatctcgggccccaatctggggcgttcaatccagccgctgctccggtgcggcttgggctcaggccactctcttccctgggcggccccggccccggcctcgcccaccatcccgggaagcccctctgggcc

SEQ ID NO: 20681 - DNA, 2300 bp, Homo sapien
ttttgttttgttgcgtgtgtgtgtgtgcgtgtgtgtgtttttgagacagggtctctctctgttacccaggctgaagtacagtcgcatgatcatggctcaacctcctgggctgaagctgttctcccacctcagcctcctgagtatctgggactacaggcacacagaactatgcccagctgattaaaaaaaaaaaatttttttaagggccgggcgcagtggctcacacctgtaatcccagcaccttgggaggccgaggtgggcccccgtctctactaaaccgtctactaaaaacacaaaaattagcacggcgtggtggtggtcatctgtaatcccagctactcgggaggctgaggcaggagaatcactagaacccggaaggcagaggttgcagtgagccgcgattgcgccgctgcactccagcctgggcgacagagtgagactccatctcaaaaaaaaaaaaaaaagttgttttttagagatggggggtctcactatgtgttgcccaggctggtcgaattccagggctgaagtgatccttctgcctcagtctcccaaagttctgggattacaggcgcgggccaccacacccagctaatttttgtatttttagtaaagacggggtttcgccatattgcccaggctggtctcgaactcctgacttcaagagatctgcccatcttggcctctcaaagtgctgggattacaggcgtgagccactgcgtccgacattgtcaaacgttttttgttcattatcacccttcttaggagaaaacccgaattatcctaaaattgaatttacatcaactaaattaatttcaatttaattacatttaatatctccctaaaggcagaaactaaatacttagggataaatgctgtctgatagagctggctttggaagaccacaatatctaagatttttttcctccctgaggaccagttttttcccctggggagtcatcatgaatcacttcgactgaggacggttgtgcttagagcaaggagctgagcaataaacaagtaaatgcacaaaattataccggaaagccaagaatgctacaaagaaaagaagagggagtggctgaggggaggccacttggcatctgaatcattgggatcgggaaagaagacaaggaacagtttaagcaaaaggattgttttccccgaactttggtttcttttttctttctttttctttttttcttttttagagacaggggtctcactatgttgcccaggcttgtctcaaactcctggcctcaagccatccccacgccttggtctcccaaagtgcgggattacaggcaggcgccactgcacccagtctgagcctcagtttcttcagctgtaaaatggaagtaatatcctcctcaccatgcttcatatacaataagcactcaataagtgagctttatgattattattatttattttaattttacttatttttctgagacggagtctcactctgcagccccaggctggagtgcagtggtgcgatctcggctcactgcagcctccgcctcctgggttcaagcgattctcccgcctcagcctcccgagtagctgggattacaggtgcccaccaccacgcctggctaattttttttttttttttttttttgagacggtgtctcgctctgtcgccaggctggagtgcagtggcgcgatctcggctcactgcaacctccgcctcccgggttcaagcgattctcctgcctcagcctcccgagtagctggaactgcaggcacgcactaccacgcccagttaatttttgtgtttttagtagtgacggggtttcgccacgttggccaagctggtctcgaactccttacctcaggtgatccgcccgcctcgacctcccaaagtgcgaggattacaggcttgagccacctcgcctggcctattttaattttaaaggttaataggaccagccctgaaatcagcctctgcccccgctggccctactctggtaccagcagcgcccagtagcatacacagccgcgtgcgcctccacctccgtccgcaggtgtcgctgtgggtgccgcggctgggcccctctaggcggcgacggcggcaccggaagtctcgttttcgcccgcttccgctctctggccgggcttgggctgcgtggagaatactttttgcgatgcctactggagactttgagtgagtcggcgatcgcggaaaggggcacgggaagcggttggggtgctctgggaagtattatggggcctgggtacgccgaggctgcgggagccgggcctggctgacttaatcttcgttccccacacatttg

SEQ ID NO: 20682 - DNA, 2300 bp, Homo sapien
gattgagttcctcactgagccactcgggactgttgctcgtggtgtgttcttaaccatattctagaccctgttcattgatatcttagggtttttgtctcaatgactcaaaagttgcctgattttcttgctatgttctctctgggctttggtctcaaataagtgccttcaaaatgtcaacacaaagcacaagaaagccacctcttccttctagcatctgcaaatgttttttcctcttggttaccagagtctctggattaagctggcagtagctgctgcggccactgccggccacctcagggccttatgtttctgtccctttgtttccttcagattctgtgtgagctgtgcccgtctggctgagatgaggcaaaaagaaatccccagggtcctggagcagctcgaggacctggatagccgggtcctctactactcagccaccaagaacggcatcctgtaccgagttggtgatggtgtgtacctgccccctgaggccttcacgttcaagtaagtgccccctcggagcagccggggccagggcgctccaggctgagccaggctggctttgtggtgtccccctccttacagacattgccaatccctccgcaccagctgttgtcctagccgtcacgttggcataggtggcaaacagacaacataaatcgtgtagactgaccatgatgctattgcagagcaaagctgagcgtaaaagtcaactcgctggtttggctgggtgtggtttctcacgcctgtaatcccagcgctttgggaggccgaggcagtggggaatcatctgaggtcaggagtctgagaccagcctggccaacatggtgaaacctcgtctctactaaaaatacaaaaattagccgggtgtggtggtgcgcgcctgtagtcccagctactcgagaggcagagacaggagaatcacttgaacctgggaggcagaggttgcagtgagccaagatcatgccactgcactccatcctgggcaacagagtgtgactccgtctcaaaataaaaaaagaaaaaaaaagaacttactggataaagcgcgagggacagctgggggcccacccccaagttctgcctctgcccaaggacacctcctctccgtcccctactgtgaagtgggagagtgggatcttgcctgctggggctcgaagggttgagtgagttgaaagtgctccatacagtacctggcttaaagtaaaggtttaacggacatgagttacttcttggttagagggaatcacatcagatgacttctctgtgtcagaggatcgaggctcttccaggaaaaacctaaagccacagatcgtttccacactgatccattctgtgttttttctaagaatcagcgtgtggttggaattacagccaacgttttccagatgccttcccggctcacaattccatttccttagagccccagctcccttgccttagttcagttactgtgaattatgagaactggagaagcaggttccctccagccttggcacagttggggcgcgttaccccctctggttgtccttggtgggaaggggacacctccccgtagtgttttctgccagttgctcctggcaaagtgggagagtcagcacagagacgcctttggggcccgtcagactcctggggggcctagtggggagaacgtgacagctgacttccctaacggcaggccttcttcaaagaacagcttttccacactagtcagaccacactcccattgtcccaggccctgtggcgccttacattggcctccagtgtcgcttctagatcagagccttagtcagggtagcgtaggttgtatcatagcaacaaccccaaatcacagtgacttaaaaccacagaagctggactgggtgcggtggctcatgcctgtcaggagttcaagaccaagaccagcctggccgacatacctgtctctactaaaaataaattagccagggttagctgggtgtggtggtgggcacctgtaatcccagctacttgggaggccgaggcacgagaatcgcttgaacctgggaggaggagttgcagtgagccgagattgtgccactgcactctaacctgggtgacagagtgaaactctctcaacaaaaaccacggtagccgctgtctcgctcatacgaggtgcccatcacaggtcagcagaggactccacctgttgtgtcccttggatatctgggccgctggagtcagaagttgccagtgtttgagcccaagggaaagcacacaggacattccccaggcagtgacatcctctttggtcacttctgcccacgtcacatgccaggaaa

SEQ ID NO: 20683 - DNA, 2300 bp, Homo sapien
gcaatctcggctcactgcaacctccgcatcccaggttcaagtgattctcctgcctcagccttccgagtagctgggattacaggcacaccaccatgcccagcaaatttttatattttgaggagagacagggtttcaccatgttggccaggctggtctcaaactcttgacctcaggtgatccacccgccttggcctctcaaagtgctgggattacaggcgtgagccaccaagcctgacgggtagtaatttattttttatataatttttttcttctttttttggtagagacgaggttttgccatgttgctcaggctggtctaaaactaccgggctcaagtgatctgcctacccgggcctcccaaagtgcagggatcacaagcatgaaccaccatgcctggctgtaatttttcatatattccggatattaaccctttaccagataatacagtttgcaaactttttttttccccattctgtaggttgccttttcactgttggtcatttcttttgctgtatagctatccttaagtttgttgcaaacccatttgtctatcttttgtcttgttgcctgtgttttgctgtcatatccaagaaatcattgccaaatccattgtcatgaagcttttccccatgttttcttctaggagcactatagtttcaggtcttatgtttaatctttaataagttttgtgtttttgtatatggtgtaaggtaagggtccaacttcattcttttgtatgtggttatacagttttctcagcaccatttgttaaagacacaatctttcccccatgttctggtgctttaaaaaaaaaaaaaattctggctggttacggtggcttaggcctataatcccagcactttgggaggctgaggcaagtggactgcttgaggctaggagtcccagactagcctggccaacatggtgaaaccctgtctctaccaccgaagatacaaaaattagccaggcgtggtggagtacgcctgtaatcccagcctactagggaggctgaggcatgagaatcgcttgaacctgggaggcagaggttgcagtgagccaagatctcaccactgcacgccagccggggtgacagagtgaggcagggtcttaccctgtcgcccaggcaggagtccagtggcccaatcatggctcattgcagcctacactgccagggttcaagccatcctcccacctcagcctcccaagtagctaggattacaggtgtgtgtcaccatgcccagcaaatctttgtattttttgtagagatggggtatccctatgttgctcaggctggtcttgaactcctaacctcaagcgatcctcccacctgggcctctcaaagcactgggattacaggcgtgagccactgcgcctgacatggtgcttcttaatttattcttactttttatttttatttttttgagacaaggtcttgctctgtctcccaggctggaatgtagtggtacaatcatggctcactgcaacctctgcctctccggttcaagtgatcttcctgcctcaacctctggagtagtttggactatgggcacatgccacaacgactagctaatttttgtttttctttttttctttctttctttctttctttttttttttttttgagatgcagtttctctatgttacctaggctggtctaaaactcctgggctcaagcgatcctcccaccctggcctcccaaagtgctgggatgacaggcgtgagccacgtggtgcttaaaaaaggcaacaaaaaaccccccacacactgggtatagaagtggcatgggcctctatacactgtgagattcttggtactagctacaaattctgtgtatactcaagattttctagagtaggtgcaattaccccgttttacagatgaggacacagaggctgagccgtagtgacccacctaaggtcgtatagccagcaaatagatggaggttggattggaactgaggactttactcaagggctctcacaaacccttgggggcttctcgctgctttatccccatcacacctgaaagaatgaatgaatgaatgcctcgggcaccgtgcccacctcccagcaaaccgtggagcttggacgagcccactgctccgcgtggggggggtgtgtgcccgccttgcgcatgcgtgttccctgggcatggccggctccgttccatccttctgcacagggtatcgcctctctccgtttggtacatcccctcctcccccacgcccggactggggtggtagacgccgcctccgctcatcgcccctccccatcggtttccgcgcgaaaagccggggcgcc

SEQ ID NO: 20684 - DNA, 2300 bp, Homo sapien
ccaatttttatattttttgtagagatggagttacaccatgttgcccaggctaatctagaactcctagggtcaagcaatccacccaccttggcttcccaaactgttgggattacagtcgtgagccaccgtgcctggccagattatgtttataacatataatgtctacattttcacaaatggtaccctcataaaaagccatatttcccacctgaacataagatccactgggttggccaggcacggttgttcatgcctgtaatcccagcactttgggaggccaaggcgggcagatcatgaggtcaggagatcgaaaccatcctggccaacatggtgaaacctccatctctactaaaactacaaaaattagctgggcatggtggcgcatgcctgtaatcccagctactcaggaggctgaggcagaagaatcgcttgaacccgggaggcagaggttgcagtgagccgagatagtgccactacattccagcctggcgacagagctagactctgtctcaaaaaaaaaaaaaaatccatctggtcaaggagtttttcctttttgttgctgttgttgttgttcactgctgtgcccagtaggtgcataaaaaatatttgttgccaggtgctgtggtttacatttgtaatcccagcacttggggaggccgaggcaggcggatcacttgaggtcacgagttcgagaccagcctggccaacatggtgaaaccctgtctttactaaaaatacaaaaaaatcagccaggcgtggtggcacgcgcctgtatttccagctacttgtgaagctgaggcacaggaatagcttgaacctgggaggcagaggttgcagtgagctgagatggcaccactgcaccccagcctgggagataaaggaagactctgtctcaaacaaaaaaattttgttgctggaatgaggggctttcctatcctgttgtcgaactgctggttacacacacacacacacacacacacacacacacacacacacacatcattcgatgaaggtgtagtgtccatcatttccgcaggcaggcacacagaaatgcccaggaattagtgaaaattggaaatctggatagaagactgggcccgacgctggaaggcaggcacaaactgggccccgccagaggggacagtgatctacagaggcaggaaagagtgtggagtgtccccagtcccccaagggaaacagggcagcacctgaattctggaggtcctatcaagggagagactggtcaggcacagtggctcacgcctgtcattccagcactttgggaggctgaggcagtaggattgcttgaatgcagcagttcaagaccagcctgggcaacacagcgagaccccatctctacaaaaaactgcaaaaaattagccaggcatgatggcgcacctgtagtcccagctactctggaggctgaggcaggaggctgaggctcccgtgagctatgattgagccaccacactctggcctggatgacagagcaagaccatgtctcaaaaaaagaaaaaaaaaaagagatcaattttgtctttgggacaggacatcgcacttagtaggaatttatttgttgggtggacacacagtaggcacttaatgcctatttgctgcgttgacacctagtaggtacttccaaggctctttgttgagtcaataaatgtgacctcgtgttttcttccaagtccagggtcccaggggtaagcccagaggtaacctggggttgaagacagttgtttcaggttgaggccacctggccaggagtactgtgacgtcaccaggctgcgtgacgtttcgcgccggccggttctcacgggtgggggctgggaggggcagagtgagagatcgggtggggggggcggacaaagggccctccgtgcagctcctgtcggcccccgcgtgcgccccggccagccggccggtcacatctggaattcattgcagccgccgccggaaaggggaggagaggagggcggggcgagcggggggcagaggcggcggctctccgcccccccctctgtccctcgtcccagccccgggacttagccgagcccggctggcaaccccagccccagccgcggccgccctggggacgcagacgccaaggcccctccggccagggccgggagccgggccggcctagccaggtgagcgcgcgtggcgacaaggaggcagaaaaggcgggcctggtcccctgaggtctcgggatccgagctgaggggccccaatcggggggctggggcgcgcacgcgccgcctgggttcctgctgcacggagcgggtggtcacagtgcgccc

SEQ ID NO: 20685 - DNA, 2300 bp, Homo sapien
aaaatggtgaaaccctgtctctactaaaaataaaaaataaaaataaaaattagctgggcgtagtggcgggcgcctgtaatcccagctactcgggaggctgaggcaggagaatcgcttgaacccaggaggcagaggttgcagtgagccaagatcgcgctactgcactccagcctgggcaacagagtgagattctgtctcaaaaaaaaaataataataatgctatttattgactttacaccttgtaccaggcatgggaagctttgcctccattacgtcactgaatctcataacctccttttccagcagaggaaaatgaggttggttcacagaccacgttgtcagctgtgctctgtccagaacgcactggcctccaagtagacagccctggactggtagggaagccggctatgatccggtggcgccccctggaggtctatcgggaacatggtaaagaacctaaaaatgggtgggccacagtagctcatgcctgtaatcccagcactttgggggaccaatgcgggagaattgcttgagcccaggagttcaagaccagcctgggcaacattgggagacccaccccccgccatctctacaaaaaaaaaattaggccgggcgcggtggctcaggcctgtaatcccagcactttgggaggccgaggcgggtggatcacctgaggtcaggagttcaagaccagcctggccaacgtggtgccacactgtctctaataaaaacacgaaaattagggccgggctcggtggctcacgcctgtaatcccagcactttgggaagccgaggcgggcggatcacgaggtcaggagattgagaccatcctggctaacacggtgaaaccccctctctactaaaaatacaaaaagttagccaggtgtggtggcgggcgcctgtagtcccagctactcggtaagctgaggcagggaatcgcttgaacccgggaggccgagatgtgcgatctcacaccactgcactccggcctgggcgacagagcgatactccatctcaaaatacaaatacaaaataaaaaaatacaatacaaaaatgagccgggcttgcgtacctgtagaccagctactcaggagacagaggcaggagaatcccttgagctctggaggtcgaggctgcagtaagccatgatcttgcccattgcactccagcctgggcgacagaggaagaccttgtctctaaaaaccaaaacaaagaaactaaaaataagcattcggatttgttagggggcgacaagggaggcactccaggatctgtggactccccactttgttctgtccttggagagccctggaaggtctgagaggggacgggacctggtttaagggggtaggggagaggaccctggtctagggggtaagggacacaaatacctaatctgaggggtttcggggggacatggccctgccctggggaatctaaactgggaggcatggtctggcaggcccaatcctgaaggctttctgagggcaataaggccctgcctttaaacaaatgaaaaaacgccaggcacggtggctcacgcctgtaatcccagcactttggaaggctgaggcgggaggatcacgaggtcaggagatcgagaccatcctggctaacgcggtgatacccgtctctactaaaaatacaaaaaattagccaggcgtggtggcgggcgcctgcagtcccagctactcgggaggctgaggcaggagaatggcgtgaacccaggaggcggagcttgcagtgagccgagatcgcgccactgcactccagcctgggcaacagagcaagactccgtctcaaaaaaaacaaaaacaaaaacaaaaacaaaaacaaaaaaacaaataaaaaaacaaaaccacataactggataaagaaaaaaccatctccgacagccttggaggcgggatgaaggcgtggcccggtgggcgtgaccaacagcaaaagtttaagcgttattggctgtattccttagttgctcactccagaactgcccacttatgggcgggggtcactccttcaggcttaacagtcattggctgaattgggccagagaggtctcattggctgaattcctgcaccggctcgtcggaggcgggacccaaagtaggctaggcctacggaagctgggtcttcttgctgtgaggtcgcgttccccagtgttacggagggtccttgaggcaggagtgaaaattgggtctgggggttagtcctggggtggaggtctgggcacgccgggtcggaccccctccatcttcggttttgcacaccccgctttccagcgcggagtcgcggcgggt

SEQ ID NO: 20686 - DNA, 2300 bp, Homo sapien
accactgtgctccagcctgggtgacagaacgagactggggttcagaaacaaacaaacaaaacaacaaagtcctcctcaggtgacaggaacttgcacctatctgccctgtcatctccctgcccgctcctctcctcgaatctctcctttgctaagcctgctccagccacactgttctcctggctgttcctttttttttttttttttttttttttttgagtctcactctcacccaggctggagtgcagtgcctctatcttggctcactgcaacctccgcctgccgggttcaagagattctcctgcatcagcctcccaagtaggtggaattacaggtgtgcaccaccacacccggctaatttttgtattttgcatagagatgggggtctccctatgttgcccaggctggtcttgaactcctgggctcaagtgatcctcccatctcggcctcccaaaatgctgggattacaggtgggagccgcgcccaggtggatttttgtctgactctgttcattcctgtgtccccagtacctggaaggacgccaagcacacagtaggcgcttaaaaaacattgagccacatgttgagaaaagaacggcaccattgtggctgcaagtgggacttgggccgcgcgggggagctcgcgcacctcgggccggggcaagagctcagtggaacccgcccgaggaagaacccgtggcgcaggattttcccaggccttctgaggaccaggggcgtcccccgtcccaccctgtgactttgctcaggccgttccggggcgggaattcagaactcctcagccccccaagaaaaaaatatccccgtggaaattccttgggaatgaccgaggcgggggaaatatgcgtctctggatggccagtgactcgcagcccccttccccgataggaagggcctgcgcgtccggggacccttcgcttccccttctgctgcgcgacctccctggcccctcggagatctccatggcgacgccgcgcgcgccccacaacaggaaagccttaggcggcgcggcttggtgctcggagacttaagagtacccagcctcgacgtggtggatgtcgagtcttggggtcacacgcacaggcggtggccaagcaaacacccgctcatatttagtgcatgagcctgggttcgagttgccggagcctcgcgcgtagggcaggggttcgagcgccccttctccctgcctcgcctctgcgcctgggggctgctgcctcagtttcccagcgacaggcagggatttcgagcgtccccctcccctccctcgtcaagatccaagctagctgcctcagtttccccgcggagcctgggacgccagcggaggggctcggcgcgtagggatcacgcagcttccttcctttttctgggagctgtaaagacgcctccgcggccaaggccgaaaggggaagcgaggaggccgccggggtgagtgccctcgggtgtagagagaggacgccgatttccccggacgtggtgagaccgcgcttcgtcactcccacggttagcggtcgccgggaggtgcctggctctgctctggccgcttctcgagaaatgcccgtgtcagctaggtgtggacgtgacctagggggaggggcatccctcagtggagggagcccggggaggattcctgggcccccacccaggcagggggctcatccactcgattaaagaggcctgcgtaagctggagagggaggacttgagttcggaccccctcgcagcctggagtctcagtttaccgctttgtgaaatggacacaataacagtctccactctccggggaagttggcagtatttaaaagtacttaataaaccgcttagcgcggtgtagaccgtgattcaagcttagcctggccgggaaacgggaggcgtggaggccgggagcagcccccggggtcatcgccctgccaccgccgcccgattgctttagcttggaaattccggagctgaagcggccagcgagggaggatgaccctctcggcccgggcaccctgtcagtccggaaataactgcagcatttgttccggaggggaaggcgcgaggtttccgggaaagcagcaccgccccttggcccccaggtggctagcgctataaaggatcacgcgccccagtcgacgctgagctcctctgctactcagagttgcaacctcagcctcgctatggctcccagcagcccccggcccgcgctgcccgcactcctggtcctgctcggggctctgttcccaggtgagtcggggtggggattgccgtcgggccagttctccgaagccccgggaggaccggctcc

SEQ ID NO: 20687 - DNA, 2300 bp, Homo sapien
gggggaacccattgcccgagctcaagtgtctaaaggatggcactttcccactgcccatcggggaatcagtgactgtcactcgagatcttgagggcacctacctctgtcgggccaggagcactcaaggggaggtcacccgcaaggtgaccgtgaatgtgctctgtgagtgagccggcgggcagagctgggtgggggcaggggccatggacctaatgcaatcctcaccgcctgttgtatcctccccacagccccccggtatgagattgtcatcatcactgtggtagcagccgcagtcataatgggcactgcaggcctcagcacgtacctctataaccgccagcggaagatcaagaaatacagactacaacaggcccaaaaagggacccccatgaaaccgaacacacaagccacgcctccctgaacctatcccgggacagggcctcttcctcggccttcccatattggtggcagtggtgccacactgaacagagtggaagacatatgccatgcagctacacctaccggccctgggacgccggaggacagggcattgtcctcagtcagatacaacagcatttggggccatggtacctgcacacctaaaacactaggccacgcatctgatctgtagtcacatgactaagccaagaggaaggagcaagactcaagacatgattgatggatgttaaagtctagcctgatgagaggggaagtggtgggggagacatagccccaccatgaggacatacaactgggaaatactgaaacttgctgcctattgggtatgctgaggccccacagacttacagaagaagtggccctccatagacatgtgtagcatcaaaacacaaaggcccacacttcctgacggatgccagcttgggcactgctgtctactgaccccaacccttgatgatatgtatttattcatttgttattttaccagctatttattgagtgtcttttatgtaggctaaatgaacataggtctctggcctcacggagctcccagtcctaatcacattcaaggtcaccaggtacagttgtacaggttgtacactgcaggagagtgcctggcaaaaagatcaaatggggctgggacttctcattggccaacctgcctttccccagaaggagtgatttttctatcggcacaaaagcactatatggactggtaatggttacaggttcagagattacccagtgaggccttattcctcccttccccccaaaactgacacctttgttagccacctccccacccacatacatttctgccagtgttcacaatgacactcagcggtcatgtctggacatgagtgcccagggaatatgcccaagctatgccttgtcctcttgtcctgtttgcatttcactgggagcttgcactatgcagctccagtttcctgcagtgatcagggtcctgcaagcagtggggaagggggccaaggtattggaggactccctcccagctttggaagcctcatccgcgtgtgtgtgtgtgtgtatgtgtagacaagctctcgctctgtcacccaggctggagtgcagtggtgcaatcatggttcactgcagtcttgaccttttgggctcaagtgatcctcccacctcagcctcctgagtagctgggaccataggctcacaacaccacacctggcaaatttgattttttttttttttccagagacggggtctcgcaacattgcccagacttcctttgtgttagttaataaagctttctcaactgcctcagccttgtgtgagttgaggggaggtgtcacatccagctggagtcctttctaagcagccacagcctgatcctcccacttcctcccccaagaaaacattgtgggttgatggccataccctgaggttctggtccaaatcggactttctatgaccttctgggtctctagtgaaaactaaagactcctctccagaaaaaaacatttggtttctaatgaggcctggaatcttattcttgacctggggagcggaatccctttttgcagtactcccgggccctctgttggggcctccccttcctctccagggtggagtcgaggaggcggggctgcgggcctccttatctctagagccggccctggctctctggcgcggggccccttagtccgggctttttgccatggggtctctgttccctctgtcgctgctgttttttttggcggccgcctacccgggagttgggagcgcgctgggacgccggactaagcgggcgcaaagccccaagggtagccctctcgcgccctccgggacctcagtgcccttctgggtgcgca

SEQ ID NO: 20688 - DNA, 2300 bp, Homo sapien
gcagagagagttatgaccccgagagggcgcacagaccaagcgtgagctccacgcgggtcgacagacctccctgtgttccgttcctaattctcgccttctgctcccagcttggagccccgcgcccacagctttggcctccggttccatcgctgcccttgtagggatcctcctcactgtgggcgctgcgtacctatgcaagtgcctagctatgaagtcccaggcgtaaagggggatgttctatgccggctgagcgagaaaaagaggaatatgaaacaatctggggaaatggccatacatggtggctgacgcctgtaatcccagcactttgggaggccgaggcaggagaatcgcttgagcccaggagttcgagaccagcctggacaacatagtgagaccccgtctatgcaaaaaatacacaaattagcctggtgtggtggcccgcacctgtggtcccagctacccgggaggctgagttgggaggatcctttgagccctgaaagtcgaggttgcagtgagccttgatcgtgccactgcactccagcctgggggacagagcacgaccctgtctccaaaaataaaataaaaataaaaataaatattggcgggggaaccctctggaatcaataaaggcttccttaaccagcctctgtcctgtgacctaagggtccgcattactgcccttcttcggaggaactggtttgtttttgttgttgttgttgtttttgcgatcactttctccaagttccttgtctccctgagggcacctgaggtttcctcactcagggcccacctggggtcccgaagccccagactctgtgtatccccagcgggtgtcacagaaacctctccttctgctggccttatcgagtgggatcagcgcgggccggggagagccacgggcaggggcggggtggggttcatggtatggctttcctgattggcgccgccgccaccacgcggcagctctgattggatgttaagtttcctatcccagccccaccttcagaccctgtgctttcctggaggccaaacaactgtggagcgagaactcatctccaaaataacttaccacgctggagtgagaccacgaatggtggggaggggagggtcccacggacatattgagggacgtggatacgcagaagaggtatccatgtggtggcagccgggaaggggtgatcagatggtccacagggaatatcacaaactcgaattctgacgatgttctggtagtcacccagccagatgagcgcatggagttgggggtggggggtgtcaaagcttggggcccggaagcggagtcaaaagcatcaccctcggtcccttgttctcgcgtggatgtcagggcccccacccaccgagcagaaggcggactcaggggcgctccagggtggctcgagctcacacacgctgagtagacacgtgcccgctgcaccctgggtaaatacagacccggagccgagcggattctaatttagacgcccgcgaacgctgcgcgcacgcacacgtgtcctcggctcgctggcactttcgtcccgccccctccgtcgcgtgcgggagctgacccggaggggtgcttagaggtatggctccgcggggtcaaaaggagaaggatcagtgagagaggcatccccacaccctcccctagaactgtcctttccccatccagtgcctcccaaatctctcttagtccccaaatgtatccccgccctaaggggcgctggtgggaggagctaaatgtgggggcggggctcggagtccagcttattatcatggcatctcagccagggctggggtaggggtttgggaagggcaacccagcatcccccgatcccagagtcgcggccggggatgacgcgagagagcgtggtcgcccccagaaggccctgggccatcatgccggcctccacgtagaccccaggggtcgctcactcctgccagctcgccttcaccaaggccaggagcttagcgcacgctcgcctcccgcccccccgccgcctctgccgccgccccctccttggaaaccaagttaccaacgttaaaccaatccccaagcgcaactctgcctcccccacaccccacccgccgcgccgcgcggagccgtcctctagcccagctcctcggctcgcgctctcctcgcctcctgtgctttccccgccgcggcgatgccagggccttcgccagggctgcgccgggcgctactcggcctctgggctgctctgggcctggggctcttcggcctctcaggtaagagccccgctctggttcggggtggacagggcgggggcggagtccctgga

SEQ ID NO: 20689 - DNA, 2300 bp, Homo sapien
cgcgcacgcacacgtgtcctcggctcgctggcactttcgtcccgccccctccgtcgcgtgcgggagctgacccggaggggtgcttagaggtatggctccgcggggtcaaaaggagaaggatcagtgagagaggcatccccacaccctcccctagaactgtcctttccccatccagtgcctcccaaatctctcttagtccccaaatgtatccccgccctaaggggcgctggtgggaggagctaaatgtgggggcggggctcggagtccagcttattatcatggcatctcagccagggctggggtaggggtttgggaagggcaacccagcatcccccgatcccagagtcgcggccggggatgacgcgagagagcgtggtcgcccccagaaggccctgggccatcatgccggcctccacgtagaccccaggggtcgctcactcctgccagctcgccttcaccaaggccaggagcttagcgcacgctcgcctcccgcccccccgccgcctctgccgccgccccctccttggaaaccaagttaccaacgttaaaccaatccccaagcgcaactctgcctcccccacaccccacccgccgcgccgcgcggagccgtcctctagcccagctcctcggctcgcgctctcctcgcctcctgtgctttccccgccgcggcgatgccagggccttcgccagggctgcgccgggcgctactcggcctctgggctgctctgggcctggggctcttcggcctctcaggtaagagccccgctctggttcggggtggacagggcgggggcggagtccctggacctgagaaacggcctcctgtccctcccagctctgccctcgcctcgctcccacgcctctgcccccacctcgagcctgagtcttctccccttccccctcctccccaacacacacccgagccccagcttcctgactcctcgatagcccctacccgcttcgagatcctaggtgttcttccgcacccaacccttcgccctggagacccagtgtctctcctgtccgctccccgggtacctccttacgctgtgctgtgcaccatggtccacggactggcatcttccccactcgcggtccgcgaagactccatctctccaactaccctgactcagaggcgctgttcccgctccacccagagccctggcaaccgggtccctcagctgttcccgcggttccttccatgagcccagccttgcgtcccggctccgtgttcttcaccgggtgtagggtccttcctgatccttgacccagcctcgtctctcctttgcccttgccgcaaacgcactctcctcgtatcccggcattctgccaggaccctgagaactggttcatcccccatcccccatcccgggtccccttctctcagccttgctgtgttcatccaagaacccacctttcctctcctctacgccctccccccatgctttcccgccgctccatcggcgctttggagaccatggctctctgctaccacgtcccagagacaccctcgaggtttagactctgggagtgcgcctttaaaccggaggcctgggcaggacgcgggacgcctgggttctttccctggctgcagcctctcctcctcctccccgccctctgagaacccttgactcgacataggggcgctaagatgtcagggagttggctccccaggctcagcccgcgtttccctgggcagcggtctcgcaggagcccttctgggcggacctgcagcctcgcgtggcgttcgtggagcgcgggggctcgctgtggctgaattgcagcaccaactgccctcggccggagcgcggtggcctggagacctcgctgcgccgaaacgggacccagaggggtttgcgttggttggcgcggcagctggtggacattcgcgagccggagactcagcccgtctgcttcttccgctgcgcgcggcgcacactacaggcgcgtgggctcattcgcactttccgtgagttctgggtggccacgcgcgtactccactactctccctccctcccaggccccgccccctgggtcccagggtcctccccttcaggccccaccttctgttccaagtcccggtgttcaaagagctgcggactcttcccccttgcagagcgaccagatcgcgtagagctgatgccgctgcctccctggcagccggtgggcgagaacttcaccctgagctgtagggtccccggcgccgggccccgtgcgagcctcacgctgaccctgctgcggggcgcccaggagctgatccgccgcagcttcgccggtgaaccaccccgagcgcggggcgc

SEQ ID NO: 20690 - DNA, 2300 bp, Homo sapien
gagaatcacttgaacctgggaggcagaggttgcattgagccgagatcataccattgcactccagcctgggcaaagagagcgaaactccacctcaaaaaaaaaaaaaaaaaaaaattagccaggtgtggtggtgcgcacatgtagtcccagctactcgggaggctggggtgggaggatcgcttgagccgggaggttgaggcagtaagctatgactgagccatggcactccaggctgggcaacagagtgagaccctgtctcaaaaaaaaaaaaaaaaaatcctggccgggtgcagtggcttacgcctgtaatcccagcactttgggaagctgaggcgggcagatcatgaggtcaggagatcaagaccatcctggctaacatggtgaaaccccagctctactaaaaaaatataaaaaaattagccaggcgtggtggcaggcacctgtagtcccagctacttgggaggctgaggcaggagaatggcgtgaacccgggaggcagagcttgcagtgagccgagatcgtgccactgcactccagcctgggcaacagaacaagactccatctcaaaaaaaaaaaaaacaaaatcctaatgcctgattccttcccccaccacactgactgctgagtcagccggtccatcctccaagagcagtggagaggtggggacacattagcccagcacagtgatagggtcacagcaagggctcacagactgcggggagcctgcctggcctttcccctctcagctacctggcagccaagtccctgctccttaatggttctgcatctcagcctgctagggagtccctgggaaatggggcctcccagatgtccgtttgtaaaccctacacactggggaacagctagctgaggacattgaggacatgacacagtgcctggtacacacagtggagctgcaggcccaggagggagacgtgaggcacgtggtggaagagaggtctactcctctacgccattcgcatagcagccccttcctgactctgccactcacctgcgcccccttcacttcccacccctaggggcctgtgaagcctccctggcctgctccacctgccatgtgtatgtgagtgaagaccacctggatctcctgcctcctcccgaggagaggtgagtgggtcagccctgtctagctggcagcttcaccctggagcattcagcagcccccaccatcctccccacttccagttcctggaatgggagctgcctcccccaccactaccccctgcgctcagtcagcttcctccctcccccacctctggccccccacccacccagctagcttgccctcggctaacactgcccgtgtcaccaccctagggaagacgacatgctagacatggcccccctcctccaggagaactcgcggctgggctgccagattgtgctgacaccggagctggaaggagcggaattcaccctgcccaagatcaccaggaacttctacgtggatggccatgtccccaagccccactgacatgaacacctggaccattccacattgccatggccccagggcccagattgagggaatagccaggtgccagccctgcccagagtgcggacaggcccgggagagacgtggaagcccctgtgaaggacaacacccctgcttgggagagagtcccatgtccaggctctggtggggacagggcccctagtggggtggccttccccaggcccctgagaatcagggtttgagtaggagtggactcatattggagctgcaataaatcgataacacaggccccagcatgttgagtgtccttgggggacagatctggggtctacaggtggctcacacctgtaatcctagcactttgggaagccaagatgggaggatcacttgaggccaggagcttaagaccatcctgggcaacatggcgagacctcgtctctataaaaacagtaaaaattagcgtggagtggtggtaagtgcctgtagtcccagctactcgggagactgaggtgggaggatcacttgagcccaggggatttaggctgcagtggagcggtgatcaggccattccactccagcctgggtgacagagtgaggccctgtctcaaaaaaaaaaaaaacaaaaacaaaaacaaaccacacctgcatctgctgtgctgggcccccggttctcttttccctctgggatctaagatgccgctggggatccaaggcagaggcctgggagcccccatttccgagggggagggctagcgtggaaggccccgccccggcagctgcggagggatttggtggggtccaggccgcccttgccacgcagggg

SEQ ID NO: 20691 - DNA, 2300 bp, Homo sapien
ggtcttgctcagggtggagtagcaacagcctattgtcctccatccactctgcatcaagcacctagcactgccagcattccgggctttctgtcacttcctctctctacagcccaggctgtgggtgctactggccccatctgacagatgagaaaaccgaggctcaaataaaatggagcaattggccctaggtcttatagctagaaagtagcagaagcaagatttgaacctgaaactgttcgctttccctcagggctggggggcagtggcaggggggcggggtgggtgcttcctctggcccccagggagtgacctgttccacctctccatttctcccaggcaatcggctcttccccgctggggtccggagaagggctcctgggcctcagccccgggcctaatggtcacagccacctgctgaaggtacgggcagggggtggggacatgcagggctgggaagccccggccccccagcggcccctgacccgccccgccctgccctctgtctccagaccccactgggcggccagaaacgcagctttgcccacctgctgccctcgcccgagcccagcccagaaggcagctatgtgggccagcactcccagggcctcggcggccactacgcggactcctacctgaagcggaagaggattttctaagtggctggcaccagagataactcaagggcctgcaccaaatcgcttttgggttttctgatgttttgttttgtgttttttttaaaccattttctctctttcggtaatagaaaaatctctgaaagactttactgaccaatcagccggagccccaggagcccaaggggtgtgggggagtctggaggcctcattatgtctctggcttgctccccacgctgaaaccctgcagccttaagagagaggggccccggcctgctctccctccctccccccatctcctcctccgctgtgcccgtctctccggagccctcctgcctcattgctcctgtaattttggcctttcgagtgccttggaggtttccctgacctcccgtgaagatacagagactgtctcctttttttttaactttgacaactgacttctgtttccttttctaagttttatttttcaaaccaccccggacagcccccagctctgattccttcaaggcccggcctgtccgggccaccattccacaccttgcggtttgaaacagctgtttttcccacatttgctgcaggcatggctgtctcctgcccctgcctgcccatctggcctataccccagccgtggggcccggggtccctgccgcagccccctccccttctgatgccttaaaagctgggccccaggccctgctggccagagccacagatgccaagctctgggagcttgactatggaccaaacagctctggcctagggattgggccaccctacccaggatctccaccctggggacagtagaaggggaaagccttcatcttggcgaaccggccccaccaccccctcctacccgggcctccgtgcagagatgggctttctctgccagtcccctgctgtctgtctgtgggagtcggacattgtgcccatctcccggagcctctgctgtcactcgcttgttgaagatgaattcttgaattctgcctgcccacccccggccagatccctggagctggcctccttccagcccagtgccagaaaccagcactccatgaagataaactctgggcccgcccaccagcaggacctgtcgacctgaggtgaccctgggccttgcccccagccaactgggccaccagcttccctcccttgactctgggggtccacatccactccaaggggactattcccccgaccccaccccagtctccccacacggacctttgctgaattaaagtttgtaagtaaatggttttaaagaaatcagagttggctggttcttgggacaaacagtgggcttgagtgggaggtctgggatggccccgcgggtttacctgagatggattccgccctgctcttcccacctggtcaccgcaggccctaagcaaacatctgcgcttatgttccattgattatgggctttccctcgcctccctggcgcggcgcatgctcagtcggtgagtcacgtgatgcatgtcatggccgcctccatggcccggggaggcgtgagtgccagggttctactgcaggctgccaggggcacctggtggaacagacctgggggcacttccgggtcgggggagggggtggcgctggggacaaccagaaagtttcaagcgacaggtacctggggcgcccggggcgggcagcgttaatccgtcagat

SEQ ID NO: 20692 - DNA, 2300 bp, Homo sapien
agtagctaggattacaggtgtgcgccaccactcctggctaatttttgtatttttagtagagacaaggtttcaccatgttggccaggctggtctcgaactcctgacctcaggtgattcacccgcctcggcctcccaaaatgctgggattataagcgtgagccaccccgcccagccagctaaaggtataccctctaagagcatgttgcctgggtaatagcacagtctgcagctaggttctgaatcccatctctgccaggtatgagcagaatgaccttgacaaaattactgcatcgagcctcagtttcctcattggtaaaatggggggtggtaattgacctgccttcatagctggtggcagctatgaagcggcactgggttgcccccttccatctccagtaactccctgtcttttgtcttgtatctccacaggaagtacatgacctgctcagtgactatgagctcaaatactgttttgtggacaaatacaaagggacaggtttgtggggccatggggcgggccagggcagggagtgaccatccctgaagatgggagggcctggctcactgtctgctgctctgagcttcaggcccagtattgccccccaggccaacatggcaggttgccccaatctgcctgtcatcctgtcatcttgggacagccttcatgttctccttggagaacactgggcatcgggctgattctcttcctactccactcgcttggcattgagctaattcttgacaacgtttggccgtgggttcattctcttcttacccctcttgcctcactcagccagtcacccctgcttgtgtggtctttttttttttttttttgagatggagtcttgctctgtcgccaggctggagtgcagtggcgcgagctcggctcgctgcaacctccgcctcctgggttcagcccattcccctgcttcagcctcccgagtagctgggattacaggcatgtgccaccatgcccggctaatttttgtatttttagtagagacagggtttctacctgggtgggtccaggttaaccaggtgaggaggtggggctcagtgttccatgctcaagaaacagcagctgcaaaggcccctctggagtgtgcctggcgtggtccgggtggcagcggtgagatgggaggggaggtcagcgagcccgcacaggctgcactgcaccctgcagctagaagccacaagatggatgtggcgtgatcgttttgaacaaagcttcctgcggccgctgggtggatcgcaaatctggggcagcacgtggcagcagggttcaggggcactggtggcctggaaaggtggcaggggtgggcagtgtgtagagtgggcctctggagtccggctgcctgggttcaagtccaggctcccctactcggggcacaggggtgctgctctgggcccgtttcctctctggcaaaatggtgattgtgatgattaagttatatccatttgagagatgaggaaactgatacccccaaagccacctggggcttggggcttaaatctgggccccagtgagcatgggcttaaccactgcccttggtatcacccgagtgacccacagcgttcttaggacagagccaggcccacagttggtgagcgctgctgtgggtgcaggtggacgcagggctgggagagggagtgggcttcgtggagcctagagtcaatggcaggcgctctcgcctgtgtgagtcgccaaggctggcaactgctcagatcagcaggcacctgagatgcccagcatttggaggtcccacctggtttgcagggtggcggggtggaggggcaggccctcagggcccggctgacctcgcactgccctcctcccaccgcagccttcgtgaccctgctgaatggggagcaggccgaggccgcaatcaatgctttccaccagagccgcctgcgggagcgtgaactgtcggtgcagctgcagcccacggatgccctgctgtgtgtggccaacctgccccccagcctcacacagcagcagttcgaggagctggtgcggcccttcggcagcctggagcgctgcttcctggtctacagtgagcgcactggccaatccaagggctatggctttgctgagtacatgaagaaggactcggctgcccgtgccaagtcggacctgctgggcaagccgctgggaccacgcaccctctacgtgcactggacggatgccgggcaactgacgcctgcccttctccactcccgctgcctctgtgtggaccgcctgccacctggcttcaacgatgtggacgctctgtgccgggcgctgtcagctgtccacagcc

SEQ ID NO: 20693 - DNA, 2300 bp, Homo sapien
gtgccctgaccttggggttcctgagagtggggtaccccggacctcacaggcttctgggaaggaaagcccccggccactgggcaaggtggccccggaagggaggcccgagccgtgggatctttgaagaaggccgttttcatggccctgtgtgtgtgtcctgtgaagaagggtgacccagtcagcaagatatcctgactgggggggatgagggtgtcctggggaaggcacagtcctgggggttgtactatgcccacctttctccccagtcctgcccgtgacccccccgcgcctcgtggccccccggttcttggaggtggaaacgtcgtggccggtggactgcaccctagacgggctttttccagcctcagaggcccaggtctacctggcgctgggggaccagatgctgaatgcgacagtcatgaaccacggggacacgctaacggccacagccacagccacggcgcgcgcggatcaggagggtgcccgggagatcgtctgcaacgtgaccctagggggcgagagacgggaggcccgggagaacttgacggtctttagtaagaggaggcgtgggaagggggcgcggcctcagcagtctgggggcgtggcagagggggcggagactagccgaaaaggtggggcctggcttgccccaatagcagttgcaacgtgggttgggcctgagtgcccgaagctggacacagcgcggaaagagggcgaggcttgaacggccgaaagcgtggcccggatatcccgagaggaaaggggagggcggagggagcggcttgacccacaggaaggtcctgttcattaagctcctgggcaatgccccgcctttaggcttcctaggacccattgtgaacctcagcgagcccaccgcccatgaggggtccacagtgaccgtgagttgcatggctggggctcgagtccaggtcacgctggacggagttccggccgcggccccggggcagccagctcaacttcagctaaatgctaccgagagtgacgacggacgcagcttcttctgcagtgccactctcgaggtggacggcgagttcttgcacaggaacagtagcgtccagctgcgagtcctgtgtgagtcggtcaccctgacctttaatccctccacccctgccctggaaagattagacgctcctctgcaccactgtgcctcgggtgtgttgggtgtctgatcacacatggtggttccacagatggtcccaaaattgaccgagccacatgcccccagcacttgaaatggaaagataaaacgagacacgtcctgcagtgccaagccaggggcaacccgtaccccgagctgcggtgtttgaaggaaggctccagccgggaggtgccggtggggatcccgttcttcgtcaacgtaacacataatggtacttatcagtgccaagcgtccagctcacgaggcaaatacaccctggtcgtggtgatggacattgagggtgagctaacacggggctgcgggtctggaccggtaagccggggggcgggggggttggagacagaagggacgcatattgacttagcgctttctctgcacagctgggagctcccactttgtccccgtcttcgtggcggtgttactgaccctgggcgtggtgactatcgtactggccttaatgtacgtcttcagggagcaccaacggagcggcagttaccatgttagggaggagagcacctatctgcccctcacgtctatgcagccgacagaagcaatgggggaagaaccgtccagagctgagtgacgctgggatccgggatcaaagttggcgggggcttggctgtgccctcagattccgcaccaataaagccttcaaactccctaatctgtggtttgattccacccgcgctgcaagtctctcccacccaggtgcacatccactgagtagcgtcgctgcgacggaagggggcggggcctgtggcgcgcagacgcagcttgaactcttgagaggtgggctggggcttagccaacggggcaaggggggcgggaaggaggtggggtttctcccagccaatcgacgggcgcgccctcgttgccgctctatgccgctccgccccggctcgctggtcccagaaggcgccgggtttcccaagatggcggcggacgtgtccgttactcaccggcccccgctgagccctaagtctggggccgaagtcgaagccggcgatgccgcggagcgccgggcgccggaagaagagctgccgcctctagatccagaagagatccggaaacgcctggaacacaccgagcgccagttccgtaaccgccgcaagatactgat

SEQ ID NO: 20694 - DNA, 2300 bp, Homo sapien
ctgtggtctcagctcctagggaggctgaggtgggaggatcacttgaacccaggaggctgagattgcagttagctgagattgtgcccctgcactccagcctaggcgacacggtgagactctgtttcaaaaaacaaaaaagaaatatgacttatttacaaatatttctttcttttttatttttagagacagggtctcactattacgtaagtattataaattatatatatatgtttgtttgtttgtttgtttttctgagacagagtcttgctctgtcacccaggctggagtgcagcggcacaatctccactcactgcaacctccgcctcttgggttcaagtgattctcctgcctcagcctcctgagtaactgggactacaggtgcccgccacaatgcccagctaattttttatatttttggtggagatggggtttcactgtgttagccaggatggtctcgatttcctgacctcgtcatccacctacctcagcctcccaaagtgctgctaggattacagacgtgagccagtaagtccgacatcttttttttttttttttttttttgtggaaacagggtctcactgtgtctcccaggctggagtgcaggggcacaatctcgactcactgcagctttgacctcccaggctcaagcgatcctctcacctcagccttccaaggagctgggactacaggcaccaggcccatgctactggtccctgctgtttacaaatacactagacttgggttttagctgctctctcaacaccaggtgggaaatggattgttcggaaggtagaggaatagaggagggacctgcttaggaaggtgggggtgctctagatgagagaggaggtgctgtgacctcaaggtctggggaaagtgggtgagtgcagggccccatcaaggctctcaacaaggcctctctctctggagctcagatgtgaagcccagaaggcaggtcagaggcctgaggtcagaggcaggtcaaaggtgggggtcccacctggtccccttggcgccttcccttggaatgcagtgaccagctgcctggaagggtgggcaaggggacaacaggatggggtaaaggccagttacaagtagaatcctggaaggccgggcgcagtggctcacgcctgtaatcccaacactttgggaggccaaggcgggcagctcacttgaggtcagaagtttgagaccagcttggccaacatggtgaaaccccgtctctaccaaaaagtacaaaaattagccgggcgtggtggcacatgcctgtaatcccagctactcgggaggctgaggcaggaaaatcgtttgaacccgggaggcagaggctgcagtgagccgagatcccgccactgcactccaacctgggtgacagagtgagactctgtctcaaaacaaacaaacaaaaaccaagtagaatcctggatagacagtggctcagggactcagctgtccccaaatcacctaccttagctctttgtgcaggggatgggggatccccaagatcttcaaagatagggaggtatcctcaagatcttcaaaggtggccaggcgtggtggctcacgcctgtaatcgcaacactttgggaggtcaagatgagaggaggccatcttaaggccaggagttcaagaccagtcggggcaacatagcaagactctgcttctgtttctgtttttgtttttgttttttaatgtttcctcgaaatcccaccttaacatctacacaatggtgcctacagttttccccattaacttcctctctggggacagaatattcccctacccacctaagttcagccagaaggagatgcctcatcccccccacccaggcttcccagtgctgagaacaaaagaaaccagtttagttagcatttcctgtgaattcaaatgggggccagcagtgcaactgggaccagcccattccctgggggagactcagcagtgctggccactttgcagagccccgtctgggtcccccaccctggcccccaagggccacagcatccccttccacccacaggcctgggcaaggtgcagtccccagacttctgcaatcttaaccgctgtgcttccgtcgcagtgggaggccccgccttttcccctgcctgcccttcgggcacctcaggaaggcaccttcctctgtcagaatggccaccatggtaccatccgtgttgtggcccagggcctgctggactctgctggtctgctgtctgctgaccccaggtgagaccagtcaagccggggagggctggagagggctgcgttttggggatcagtagagggtagaggaatagaacgca

SEQ ID NO: 20695 - DNA, 2300 bp, Homo sapien
gtgcagtggcgcaatctcggctcactgcaagctccgcctccccggttcacgccattctcctgcctcaggctgccactacgcccagctaattgtttgtatttttagtagagacggggtttcaccgccttagccaggatggtctcgatttcctgacctcatgatccgcccacctcggcctcccaaagtgctgggattacaggcgtgagccactgtgcccggcctctatcagcattttctttctttttctttttctttttttttttttgagacagagtttagctcttgttgcccaggctgaagggcaatggtgtgatctcggctcactgcaacttctgcctcccaagttcaagcgattctcctgcctcagcctcctgaatagctgggattacaggtgcccaccaccatgcccagctaatttttgcatttttagtagagacagggtttcaccatgttggccagtctggtcttgaactcctgacctcaggtgatccgcccgcctccacctcccaaagtgctgggattacaggtgtgaaagagaccattcccgatctctttcagcattttcatactgaatgtccacagctgccctgtgaggaggctttttacccatattttctgactcagagagaagcagccacatgtcccttggccatggcagttaagaccaactccatggagctgggtgtcttagctcacatctgtaatcccagcactttggaaagccaaggcaggatgattgcttgaggccagaagttcaagaccagcctgggcaacatagccagaccccatctctacaaaaatttaaaaattagccacaaaatttaaaaattaacaacaaaagggccgggtgcggtggctcacgcctgtaatcccagcgctttgggagggtggatcacgaggtcaggagttcgagaccagcctggccaagatggtgaaatcccatctctactaaaaatacaaaaattagccgggcgtggtggcgggcgcctgttgtcccagctacccaggaggctgaggcaggagaatcgcttgaatccgggagtctgaggttgcagtgagccgagatcgcagcattgcactccagcctgggcgacaagagcgaaactccatcttaaaaaaaaaaaaaaaaaaaagtggaagatgaggaagttgatcagacatcaaggatgagcggatgacttaataggcttctttgctaagacttggctgggcaggtgaaagacaaagtcgaggagtggttatggtgtggcacagaagaagggtcagaggacggtctttgttacctcttcatgcctgagtttcttcctctgtgaaatggggataataagagccgccatacagggaattgctgctaggatcaaatgagataatgtatgtgaaacgctctggctgtaggcttctcagcaaatgggcacgacttgcggagtggggatttgaattcacgtctggcgggatgtccaagctgctaccctgaccgctagggagcttcagaggacagggctgcaggtgatcaggaagaggactggggcaggtgggcgaggaatgcctcccaggagtgaaggagggggaattctagtcagcaggatggagtcggccaggtagaaacgagggaaaggagacaggaccggatggaacggggaagccaaagggcagggcgtcggagggttgaatggtggccggtgcagctttgaacaccgaggtgaggacatgcagctgtgtcctagggtcaggaccgtacacgcctgacccaattccacagcacggaggggaactccaggatccggccgcgttgcccacacacttcgctctccctcccgcctctcgcaagcccctcccccgtctccgtccaccgagtgccagccaatagcagaagcgacagcgcatctgggtgccgactcagccaatcgcggctgagtgacgaatgagccccaggaccaatgagagtgccgccaccatggcaaaaaaaaaaaaatccaatggtgacgagcagggagaacagagcagctgccaatgggcgtgtgcgtttcaggcggccaatgggaggaggcgtctcggcgggggacaagcagtagctacccgcgggagcggggaggggtccgggttcgagcttgtgttcccccggaagggtgagtctggacgcgggcgcggaaggagcgcggccggaggtcctcaggaagaagccgcggggactggctgcgcttgacaggctgcacttggatgggagcacctggtgcctcgggactgctccgatgcccggtgggtgcacatcccagttcccgccgttgccggccgggtttaga

SEQ ID NO: 20696 - DNA, 2300 bp, Homo sapien
ggaatcctaggtgtgtgtcattacccactttgcagaggaggaaattgagactcaggaaggcaaagccgcctgccgggccccaccgcagctcagtggtatgtggctatgggatgtagcagaagaagcaaaggtagccccaaaaagcgttcccaattcccgcaaacctcccccccacacacacacacaggcaggagagacatagcagggtttgcaccgatgggggtgggatggggaccggggacagagggacagtgcaaagcaacttaggggtctctctcctcagtccccagggctggaggtgctgtgctggcagattaggaaatgcttggggttgatggggaagcttccggcgctctatccccagttctggaagctgaggctccgggaaccctgttttgctgaagctgggcagctccagtctccagagccaggaagagacccccgcgcctatccgggaatccccgacatctgggattctctccaaacacccccaggctgatgacggggccgaatccctaaagggcatacggtgggggtgggggtacgactttcctggggagccggggaaccccctaccttcctggccccctcccactgtggcaccgtgtccccctccccaccgcagctcgcagccccaagcttaccttgcggggggcctggggaggggatgccccgccctccctggcctggggggcgggaggggacgggggtgtccagaccctttgtttgctggtgtgtgtgtgtatgtgtgtgtgcgattgtgagagccgccggggtgtgggtccgtgcgcgcgcgtgcccgggccgtgacggccactgatgtgctggactgccagggtggaggggaagagggaggggtaggagatggggactcccccgcccctgcccgcccactcgcgggtttgaatgaagcgcgagggggaagggcggcagcgggaggacgtttttgtccgatggcccttcccgctccatgcaccggggaatcctcccccttctggagaacttcgctcgctctctccaggcactgcctccaacgtcggctccaggggagactaggaagaggcgcccctcaccggagtggctggagctcctcctatccagcctgacccccgagggagcaccctttaatctgagataatcctggcccaaggctgcaacacggcctattatcctggtatcaaagcgtggattgggatgcatggaagtgtgaggtggtcgaggccctgcatgcttagagtaatggagtccttagagccccggcggaggaagcgtaccccaagacgaacggggaggggctatgcgtggccccagactgtgacgacaaggaaagcccccttccacccctccacgattccccccaccaagcgcggggccaggaatacgcgccgtgggctagactctagcgacacccagcggccagcggggtggggagccgagacccgttttgagggggtccgggtgattccaaagtgtgtgtgtgtgtgtgtgtgcgtgtgtgtgtgtgtgtgtgtgtgtgtgcgcgcgcgcgctcgcgcgagtcctcgctgcgaatggcaggaggtggaagacaaggagaaggctgttgccgaggcggggaaaccccagctcccaaggcagggccacagtctcccctccacgtttaaccctgcaaggggagggccataccacccccgatttagacacccccagggcaggtccagtcctcctcgggctgagaaagtccgaggagtcatcaggcgcccctctccagcgcaggcttaggtccccgtttacgaagggcagggggagggccttcccgccgtgtccctaccccttgcagacgtcactgcggcgtggctgaggggacagtcctctcagtctcatcaaccgtcccctccctgccaccccaaacgcccaccgtggagcggcgggagatgaggggggctcggagttgaagcgcgcactcatatgcccccaggagacctagcggagccccagcgcccgatgacgcggagtctctgcgggaactccagggggccggaacacttacgcagggccctttaaggctggctgggtagctagtgccgctgccgcggttactagggatgtgacgtcacacagggcggggtttcccgcgctcggcggaagcggaaggggcggggctccgcgctcctagtctccactgctgccgccgtcgccgccacccgagccggagcgggctgggccgccaaggcaagatggtggactacagcgtgtgggaccacattgaggtgtctgatgatgaagacgagacgcaccccaacatcgacacggccagtctc

SEQ ID NO: 20697 - DNA, 2300 bp, Homo sapien
tccaggagtttgagaccagcctgggcaacatggcaagaccccatctctacaaaacaacaaaaacaaaaattagccaggcatgatggcgcgtgcctgtagtaccagctgctactctggaggctgaggtgggaggatagcctgagcctgggaggtcgaggctgcagtgagctgtgcaatggtgccactgcactccagcctgggcaacagagtgagaccctgtctcaaataaataaataaataaataaatattaaaaaaaataaagaaatgagaactaggctgggtgtgatggctcacacctgtaattccagcactttgagtttgagctttagtttgagctcaggagtttgagaccagcctgggtaacatagtgagaccccagtctctatttaaaaagtagaaacaaaagaaccaaagtaggggataaaccagctagtacacagtagaactgttaggaacattacactatcaggctctcaataataacctgacattgaacaggttattaaaagcctattatgttccggattctgttcaggacgctcaggagatagtaaagaataatactacattattgttaacataataattaaacaaagttttcgtgccctcctgcagctaatattccagtgtgaggagacacagacaataaatgtaataaacaaattacatagtgtggtatgaggggggaagagcgggaaaagggggaccagaagtcctaggaggttgtattataattttaagtgggggtggggtaagaaagaaagaaatgcctgaaaggatgagatataagcaaagacctaaaagaggtaagggacctgcggattttttttttttttttttttgagatggagtctcgatctgttgcccaggctggagtgcagtggcccgatctcggctcactgcaacctccacctcccaggctcaagccagtctcctgcctcaccctcccaagtaggtggaactacaggcgcctgccaccacgcacggctgatttttgtatttttagtagaaatggggtttcaccatgttggccaggctggtctcgaactcctgacctcaagtgatccacctgctttggccttccatagtgctgggattacaggcctgagccaccgcatctggccaacctgcggatatttgggggaagagttccaggtggacagaactgaaagtgcaaagggcctgaggcaccagcatgcttgctgtgtccagaaacagctagaccagtgtggctggagctgagggcaggaaggtgactgggcgttatctagcaggactgtgtgggccacgcgaggactttgacgtttcctctgagtgaggtaagagctattagggctctgagtagaggaagatcatgatctgaatcgagttctaacaggctcccacagggtcagatgttaccatttattaaatatttactgagtgccagacactattctgttcaatatggtttgatctcatttcattctcacatggaccctgtagggaatatcattccatttcacagaaaagaaactgaggctcacagagtttaagacactgacccatggccgcacagcaataatcttcagcgcctgggtgccaaggtaaagtaagccagcctctccctcccccaagcatttcagacaaggatcggtggctgcagagcgcacccgtcttcgggaacggcgtctgtgtccctgtctgtctgtttctatttccacacgtccctgtctgtctccacgcgcctctgcctgtgcgtcccccatctgtgcccaagccgccgtctctctgcgcccggcccccgcacatcggagctatttcgggtttaaggcttaaaagcccaacagctcggaggagacgcttcctccggcccccggctcggaccacgcgccgcacgcggccagctctgggagctcccagttttttctgcgggatccccgagccggggaagcccccgcgggaggaagggtgggggctggggcgacccgggcccggaggctctcggccccccagtggccaaccccggcattgacgccgtcaggagcccagccgtgcgtcagctgtcgccctggcaacgggggcgacgtcaccacattggtggtgcgtcagtccgctgacgtcacgccccaggagaggcaataggcaagtggcgggggcgggttctaggcccgaccggcagggggagccctggggcactgatggcagatgcgtttggcttggtcttgtaggaggccctggccctgccgacatggccaccgcagtcccaacggcgcgctaggttggcgagatgaagaggagtcgcagtgccctgtccgtg

SEQ ID NO: 20698 - DNA, 2300 bp, Homo sapien
tccaatggttcatttccagatagggagagcaagtgactgtctctcgcccctggagctgcttaattatacctctccacgcccatcccactagcctcaggtccagatcagtttatcccccagctcaggccaccgctcctcgtttcctccttcttctgcaaccccagctgtgtcctgacacccccacccacctcacattacgcactcccacccgcttccagatctctaaccaacgttacagcataccccgccaagaatttggcccagcccaggactctcaaatatgatctggggagaactcacagcccctgcaaattccctagaagccgttttgagtgtgtaatggggggggtgttcctgagagaagtggggaacacagttttggcccttggaatacccggcggctgctgatgggggggccggtttttgctcggcgttcgcccacgccgggagccccctctggcggggagaaaagtggctgtgggggttgaagaccggcagtcttttttttttttttttttttttttcaaataaggagaagggcgcggggggagggcggtggcaaacggcatcgcgtgccctggggagcccgtgacagggggcgcacgggggcaggggtctggtccccgggtcccgcagcagagcagtttcgcgttcgagctcttatcggcgtggggggggggggcggtgggacacgcgggcgcgtgcactccccccgcccagcagccatccttgggggggttgagggggatgggggcgcactcggatcccgctcgctctctgcttgctcgctcggcgcggcgctgggggaggcgggagcgtgagtcacggcgactcccgatttaggtgccggaaggggggctctgctggcgggggccgcagggaggaggctcgcctgtttactcgcctgaaaagggcacgggggtgcgctccgcggctacctgggaccttcctcagtttacctctggcagaagcgctttagaagaggcagcgatgtatagagcggtgggccggcagctgcggtatccgccacagggtgtcttcctggagccacaagggaaccaatgggacacaccccagaaacaccccagaggccccaggccgaccacacacatacactcacgcacacgcacacactaacatacatagacgtcctccgacactacagtcagacgacagaggccgaatcgcgtgcacaactccgcaagcacacaccgaccacaaacgcatccaagcgcttgagaacacattcacagtccccaggccacctgaaaaaagaccacgtagggatgcacatcctccaaataggtagcacatgtgcgcacacatccttcacccacagacacacacagttatacacacagccaaatccagagaaacgggcagacaacagcagccaaccacgtgcgcacacacacttccagccgacactgaaaacacagacaaccctcggaagaggccacgtgcgcgcacatcccgccccgggcccgcaccatcactatcctccgacgcacagacaggagatcccacacactctgccgccgcccgctgcaggtaccgcgccggtggcactaggaccactcctcaaaaactgccccccgccaggggtagcggcgaggacacgccaacaccggactccgccctcgccatgatggaccgactgactgacactctggcaaccagtccggtgtctgcttccagatcggattaaccgtttaactccttcgtgcctgtgcgcgccgcggccaagcagggtgctttgaagacagacgagttccagcgccccctcccagcccggagcggggatctgcgtgggcgggaagggcccccctccttaggtagctgccccccgctggcccggacggaggaggaggggggcggcgctgacagccgcggcgggcggggggcggggaggggcgggacggggcggaggagccggggctggcgccgagcgggccgcggaacgcggagcgcggagcgcggagagcgccgccgggcactgagcagagctccaggcgccgaaaggaagctgcagagcccggcccgggggcgattggcccgcagcgcccccgggtctgtccccggggcgccatggccctaccgcggccgggcgcacccgcggggccctgggctcgctggcttgcgcgcagctgagcggggtgtaggttggaagggccagggccccctggggcgcaagtgggggccggcgccatggaacccccgaccgtcccctcggaaaggagcctgtctctgtcactgcccgggccccgggagggccaggccaccctgaagcctcccccgca

SEQ ID NO: 20699 - DNA, 2300 bp, Homo sapien
gccacacgcaagcccaggcttcctcactctgggccccatggcatcagagccaacactagagaaggaaggatatttcacagaggtggactcgaaaatagagattcactgttgggcgcagtggctcacacgggtggatcacttgaggccaggaattcgagaccaacctggccaacatggtgaaaccccatttctactaaaaatacaagaaaaatttgccaggtattgtggcacatgcctgtaatcccagctacttgggaggctgaggcacgagaatcctttgaacctagcaagcagaggttgcggtgagccaagatcgtgccactgcactccagtctgggtgacagtgagagactgatgaaaaagaaagaaagaaagagagaaagggggaaagggaggaaggagaaaggaaaggaaaggaaaggaaggaagaaatgaaggaaggaaggaaggaaaataaggaaaggaaggagaaaaggaaaagaaagaaagagagggacggaggggaaaggaaaggaaaggaaagaaggaaggaaggaagaaagaaagaaagaaagaaagagaggaaggaaagaaagaaaagaaaatagagattcaccctcttttctcttttttttcgtgagacagggtctcactgtctcaagatggtttagtggcaccttcataactcactgcaacctcaacctcttggctcaggtgatcttcccacctcagcctccaaagtagctgggaccacaggctcatcccactatgccctgctaatttttgtcatcttttgtagagatgggatctcgccatgtcacctgggctggtctcgaactcctgggctcaagtgatccgcccaccttcacctcccaaagtgctgggattacaggcatgagccaccacacctgccttctaggggtgtcttaagagttgtaagacacatctcagaagctgtgggtggcattctaggttgtccccaaggactgtggggtgcatcttgggattctgttctagggtgtgagactgtcttaggagctggagaggaatctagttgtgtccctggggtctattggggcaccccagattttgctggcatctccatggttactagggcatcccctgagtctgaaggcattcccgaggttgtcttggggtctcagcacttgtgggggcatctcagagatgctgtagaaccattcagggattaagggacatctgagggactgtggaggtgttcctggggtctgtggagaactctaggatttggtgggaacctatattcggtctatgaaaatggctctgtgggtgtgggggattctgggggtactgagggagggtctatgcatgatgggatgatgagagttggggatgatggggagctctggaggaattttgggacatctgaggaactgtggtgggggttctgggatctgaagggttttccctgggctctcagagcaccactggcagggagtttgtgggagtgcccccagagatttgggggcatccctggcatttgtggatgcaccctgggattctcagggcactcctggggcttgtggcatgtcccagaaacagtgagaatactgctaggattatgggggcatctggagagctatgagagtgccctagggtttatgagggtgtctcagaacacctctaagttgtgctgagaagccccgggatttgggggggtacccctggacttcttgtgtggggttgtctcagggacaatgagggtgctccttgggattctgagagactgtggggtggctcctggggcttgtggggcctgtcaacaccacggggagtttgcaggagtgtccccacagatttgggggtgtccctggtgtttgtggggacgcgtccggcgattgtgaggacattagagccaacgcgggcggctttggggtctgcgggagagtccccaccagagccgtgcgggcgccccagacccgccccgccctgggggcggctccagcgcgaagccggaagggccgaggcgacagggcggggtggggcccgcgggcccggggctgggcaggcggcctgcgtgggcctggcggggtgggcggcgcagctccccagcgcccgccgaggcggggccgccccgcggccatggcgcggccgcgcggcctaggccgcatcccggagctgcaactggtggccttcccggtggcggtggcggctgaggacgaggcgttcctgcccgagcccctggccccgcgcgcgccccgccgcccgcgttcgccgccctcctcgcccgtcttcttcgccagcccgtccccaactttccgcagacgccttcggcttctccg

SEQ ID NO: 20700 - DNA, 2300 bp, Homo sapien
tggagagctatgagagtgccctagggtttatgagggtgtctcagaacacctctaagttgtgctgagaagccccgggatttgggggggtacccctggacttcttgtgtggggttgtctcagggacaatgagggtgctccttgggattctgagagactgtggggtggctcctggggcttgtggggcctgtcaacaccacggggagtttgcaggagtgtccccacagatttgggggtgtccctggtgtttgtggggacgcgtccggcgattgtgaggacattagagccaacgcgggcggctttggggtctgcgggagagtccccaccagagccgtgcgggcgccccagacccgccccgccctgggggcggctccagcgcgaagccggaagggccgaggcgacagggcggggtggggcccgcgggcccggggctgggcaggcggcctgcgtgggcctggcggggtgggcggcgcagctccccagcgcccgccgaggcggggccgccccgcggccatggcgcggccgcgcggcctaggccgcatcccggagctgcaactggtggccttcccggtggcggtggcggctgaggacgaggcgttcctgcccgagcccctggccccgcgcgcgccccgccgcccgcgttcgccgccctcctcgcccgtcttcttcgccagcccgtccccaactttccgcagacgccttcggcttctccgcagctgccaggatttgggccgccaggcttgggctggggctgggtaagtgcagcgctggtggccgtgggttcaagtcgcccctggccacctggcgcactccagggtctagggttcgtggctcactctctccagcctcactttcctcttctgtcacatagcagcgatcaaaatcatccctgaccgccagggttgccctggagacctctgatagggcatgcagtagacgtttaataaatgttgcatccttcccacttcctgtgcaaacctgaagctgcggtcacgctttggaggagtgagggcgacctgccatccaggtcatgtgttcatcctggggtatgtgttcagttctgtcagcctcagtctactggcctgtgaaatggggccagtcatgccttctgtgggtggccttgcggtgaggcttggtgtcactcctagtaccgggccacagagggcaaatggaagttccctttctggccagacggggtgggctgcgggggcttgaagtctgggagtgacaggccccgaggccacatccagtctggctttctaatgtccttatatcctggaggcagaagttggcagcccggagttgggcactggctggccctgggggcttctccgggtcctcagcctccccctcttccacctactttccacgtgcaattgaggcacagactgaaggagggcacggcggggcaggaccgggcccagcgactggccccaggaacgaaatggggcggggacagaagaggaagaggggccagggcctttgggagccccgcgtggggtccgcagggtgtgtgtagggaaatcgttgcttctctccgggtctctctctctgcgtcctgcgtctctgtctccacttctgtctcttctgtctctgttttgtttctccttcccaccgctgagctgcaccttcccctcccctgggtttatgtcacccggccccacactcgagtcccgtttccccgggggcgcacggcgatcagcgatcagagacctcgagcgggcccagctcgacgtcagggcggggaggggggaaaggcggggccggaggcggtggcaggagggcgggcccggagccgggaaaccggagccccggggcaccccagaggcctaggagggaggagacgggggggggggggggaagtgtgcgtccgactccgcaggacccctgcagggggaggcagacagagcgcccgtgcgctcccctcccccgtgcagacccgggaacgctcgaccgcccggggctgtccctgggggggtcaccagaggcgtggaggcggtgccggcagtggaggccgcagacaccttgggcctggccagcagcgcgcgccacaccgccctgccgccgtccccatgcgcgccccgacgacggcgcttggctcccatgcgctccggtgcagcgccccgggcccggccccggccccctgccctggcactgccccccacgggccccgagtccctgacccacttccccttcagcgatgaggacacccgtcggcaccctccgggcagatctgtcaggtgggtggcccgtggccagtcagtcctctcttttaatactgaagggcactggctgtgctgggg

SEQ ID NO: 20701 - DNA, 2300 bp, Homo sapien
tcagcagttggcccgggagactctggaggagctggactggtgtctggagcagctggagaccatgcagacctatcgctctgtcagcgagatggcctcgcacaaggtgtgcaggtggtgggcagaacccctgggcggggcaggcgggggcggggccagtgggtagagccaaccgctggatgggaccagtgggcgcggcctgcggatggagccagccattaggttgttcctgtgggcggagatagctactgggtgtggctgattagggcagggccaatccctgggcgggggctggtggagctgggccctatggatggagccaaccactaggttaggcctgtagccgaggccaactattgggcgtggctcatgagggtggggccaatctctgggtagggtctatggtatggggtcagtccctgggtggggccaacccctgggcggcagcttcaaggcttgaagctcctgtagattatgactttccccagggctggaggagcctggtgtgtgttgtggggtggggtgtgtctgtctggttgtacatgtgtcaataggtgaccgtttccgttggggggttttatgcttttatggtctgcgggggtgtatctgcggctataggtctgcgtagccgctggtttattggctacgcatttgcagcgctggggtgttgggaatagattctgaagagtggcacgccagtgtgtacttgtgtaggtgtataggtttgcacgggtaattatgcagggttataggtgtgtggggctgtgccagaggggtgcgcatgtctgcaggggagagttggaccagatgggaaactgaatgtgtagctctatgtgtttgtgaatgtgtgtgtttgcagggccgtaggggtgactgcaatgctcccatgtacagttgtgcagacggtgcactgcacaactccaggggacaccattcaggaagcaggcagtatgtgtgaatgatgcttcctggagttggagagagtggtaacagcccttgtgggcgggtgcctatcaagaaatgatctgtaggtgggagtgtctttgttggggggtgcttacagcagtgggtggaggcttgtataggaacatagcagtctgagggcgattgtgtccctgagggtggatcaagcatctgaaatgtagctgtgtctttggatatgggtctgaggatgtttctgcaatggtgtgtgtgtgtgtgtgtgtgtgtgtgtgtgtgtgtgtgtgtatttttgcatctgtgagtatatttccttatggatttgtcgggatatgtttgtgtccaagggcagtggatatttgcaatggttggaaagtgtgtctgtgggtgtgtttagtgtgtgtctgtaagtgtggctggctggggaggccaaggcgggcggatcacctgaggtcgggagttcgagcagcctgaccagcatggagaaaccccgtctctactaaacatacaaaattagtcgggtgtgctggagggtgcctgtaatcccaactactctggaggctgaggcgggagaattgcttgaacctggaaggcggaggttgtggtgagccgagatcgtgccattgcactccagcctgggcgacaagagtgaaaactccgtctcaaaaaaaaaaaaagaaatgtggctggtatctcggtgtctgtctataggtgtgggtctggatgtgggtctggatgtgggtctgtgcccttggatggggcgtgtctgaaggcatttgctatatgctcagctgtggacctataagtgtgttggacatcagagttgtgactgtctccgggtgtgtgtgtgtgtgtgtgtgctgtaagtgtacaacagaaagcatttgagtatctgtgtatattcaagtgtcaagtgcctggatgtgtgtgggtgtccctggaaggtgtgtctcagggtgtttgtacatctgtgagtgtaaagtggatgtgtgtttctgtctctgggtgtgtccatggaggggatgggtcctgatggggacagcccacctaggttctggctgaggcccatgggctctgatgcccctttaatacccccccacccccagcaccacctgacatcccatgcagcctgccagtgctgcagtgagcacacacgcacacacacgggtgcacacacagagctccgcagcctcctcctgggacccttgccctgcccccctcccatgggcacggaccccccaccgcctccacccactgccgcgggggggcccgttggggcccagggctggcgggccatgtaaccagggctgctgctgggagcgcggaggggaagggagcccccagccctgctgggccggcccagg

SEQ ID NO: 20702 - DNA, 2300 bp, Homo sapien
ctggccaggcgaggtggctcacgcttgtaatcccagcactttgggaggccgaggcgggcggatcacgaggtcaggagatcaagatcatcctggctaacacagtcaccccgtctctactaaaaatacaaaaaatattagccaggcacggtggtgggcccctgtagtcccagctactcgggaggctgaggcaggagaatggcgtgaacccgggaggtggagcttgcagtgagccgagatagcgccactgcagtccggcctgggcaaaagagcgagactccatctcaaaaaaaaaaaaaaaaaaaaaagagtttgagaccagcctggccaacatgaagaaatgccatctctactaaaaatacatagtgaaactccgtctctactaaaaataaatacaaaaaaatggccgggcgcggtggctcacgcctgtaatcccagcactttgggaggctaaggcgggtggatcacaaggtcaggagatcgagaccatcctggctaacacggtgaaaccccatctctactaaaaaaatacaaaaaaacttagctgggcgtggtcgcgggcgcctgtagtcccagctaatcgggaggctgaggcaggagaatggcgtgaacccaggaggcggaggttgcagcaagcggagatcgctccactgcactccagcctgggcgacagagcaagactgtctccaaaaaaaaaaaaaaaattagctgctctggaggcacactcctgtaatcctagctacttgggaggctgaggcaggagaatcacttgaacctgggtggcggaggttgcagtgaagcaagatcacaccactgcactccagcttgggcaacagagtaagaatccatatcaaaataaaataaaataaaataaaaattaacggggcatggtggtaggtgcctgtaatgtcagctacttgagaggctgaggcaggagaattgcttgaacctgggaggcagaggttgcagtgagcctagatcatgccactgcactccagcctgggtgacagagtgagactctgtctcaaaaaccaaagccaaatgataccccagggtacacgatctactgagtctttgcccattttcctgagtcctgatgacatacttggcacatagtattaactcttttttttttttctttgagacagagtcttgctctgtcgcccaggctggagtgcagtggcgcaatatcggctcactgcaacctccgcctcccgcctcccgggttcaagcgattcttctgcttcagcctcccgagtagctgggactagaggcgtgtgccaccacacccgggtaatttttgtatttttagtagagatggggtttcaccatattggccaggcttgtctctcaactcctgacctcgtgatccgccagcctcggcctcccaaagtgctggcattacaggcgtgagccaccgcgcccggcaggattaactcatttagtcatcacaatgtacgcggttcctattatttgaatccccatttagcagataaggaagctgagactgtcagcggcagtgataagttacttgtcccggtcctgcttggtgaggtgtgggggtgactggagagtcagcccgtcccactgtcgccctctgcaggtggccaagcaagaggagttcttcaacctgtcccactgccaactggtgaccctcatcagccgggacgacctgaacgtgcgctgcgagtccgaggtcttccacgcctgcatcaactgggtcaagtacgactgcgaacagcgacggttctacgtccaggcgctgctgcgggccgtgcgctgccactcgttgacgccgaacttcctgcagatgcagctgcagaagtgcgagatcctgcagtccgactcccgctgcaaggactacctggtcaagatcttcgaggagctcaccctgcacaagcccacgcaggtgatgccctgccgggcgcccaaggtgggccgcctgatctacaccgcgggcggctacttccgacagtcgctcagctacctggaggcttacaaccccagtgacggcacctggctccggttggcggacctgcaggtgccgcggagcggcctggccggctgcgtggtgggcgggctgttgtacgccgtgggcggcaggaacaactcgcccgacggcaacaccgactccagcgccctggactgttacaaccccatgaccaatcagtggtcgccctgcgcccccatgagcgtgccccgtaaccgcatcggggtgggggtcatcgatggccacatctatgccgtcggcggctcccacggctgcatccaccacaacagtgtggagaggtgagtggcagggc

SEQ ID NO: 20703 - DNA, 2300 bp, Homo sapien
ggcacggtggcagggcagttagccaaccacccgtttattgacccctgcgcagtgccaggccccaggcgagaggcacaggagagggttggcccgacgccgacctacataggtctccctgccatttgaggcgctggggccggggacgagagacagtcgatcaacagacaagcaaaggaggtcatttcagttcctgacaagcgcagtgatgacaataaaacagggaagaggagactttgagttgagtcccagaaagaggggagtgagaacttgcagatccacttgtggggagccacttggagatcccccactccttttgaaacgtaactcacgtctgggcacagcagcctatgcctgtaatcccagcattttgggaggtcgaggagggggatcacttgaggccaggaggttgagaccaccctggccaacatggtgaaatcccatctctactaaaaatacaaaaaattagcccatcgtggtggctggtgcctgtaatcccagctactcaggaggccgaagtatgagaatatcttttttttgttttatttgagatggagtcttgttctgtcacccaggctggaatgcagtggtgcgatctcggctcactgcaagctctgcttcctgggttcacgcctttctcccgcctcagcctcccatgtagctgggactacaggcgcccgccgccacacccggctaatttttttgtatttttagtagagatggggtttcaccatgttagccaggatggtctcgatcttctgaccttgtgatccgcctgcctcggcctcccaaagtgctgggattacaggcgtgagccaccacgcccggtcgagaatatcttgaactcgggaggcagaggttgcagtgagccaagatcgcaccactgtactccagcctgggcaacagagcgagactctgtctcgaaaaacaaaacacaaaacacataactcatctcctggccctccaggatccaggggtttccatgaaacccttccttaagtccttagctctcactgcactccttcccaattctccagattgactgtctcagcctctgagccactgcacttactgtttcctctgcctggaaaactactccccagcctcccactttataataattttcatccttgtctcagctccaacctcaccttctcaaagaggcttggtctgccagattttaaaaaactgcaccccgggtcaggcatggtggcttacgcctgtaatcccagcacttcgggatgccaaggcgggcggctcacttgaggtcaggagtttgagaccagcctggccaacatggcgaaacccagtctctgctaaaaatacaaaaactagccgggtgtggtggcggacgcctgtagtcccagctactcgggaggctgaggcaggaggatcgcttgaacccgggaggcggaggttgcagtgagccaagatcgagccattgcactccagcctgggtgacagagagactccatctgaaaaaaaaaaaaaaaaaagcaaacaaactgcacccgattctcacgttgtcacaatgctgttgtaattttcttcatgaagctgtttttccaggtcttgcttattttagtttatgattgctcctccctgcagttgtcagctctggcagggtaggatttttgtattttgctcactgctgtgtcttcagcacccagatcagtgcctggcatacagtaggtgcccagtaaatggtgaggcaaatgaaggaatgagctcaacatgctctagaaagggaaaggccgccagattgctgaagcagagtgatcaaagggaagaggtggcaggggctaattgcgtagggctttgcaggctgttgaggagttcagttttactaggtactgtgggaggcattggaggatccagagcaggggagagacatgacttcatgtatgttttaagatgggctcttgggccaatcaggttgatcaggtcggggaagtttgcaagtttgcaaatggattctgcttcacctactttgcaggaaaactgacctaggaattgctttatcttgcaaaacgaggcccggcaggtgctggcccagtcccaacccctgccctctgccctgtgctctctcccctccaggtccctgagtgccagaggtggtggtgttgcttatcttctggaaccccatgcagccagatcccaggcctagcggggctggggcctgctgccgattcctgcccctgcagtcacagtgccctgagggggcaggggacgcggtgatgtacgcctccactgagtgcaaggcggaggtgacgccctcccagcatggcaaccgcaccttcagc

SEQ ID NO: 20704 - DNA, 2300 bp, Homo sapien
catgacaaatcagtatccccagtcatgaaaaatagcaatggtttctgtctcttgggagccagcattcgcatttaatatttttattttttatttacttatttatttttttgagtcagagcctcgctctgtggcgcaggctggagtgcagtgcggtgatcttggctcactgcacgctccgcctcccgggttcacgccattctcctgcctcagcctcctgtgtacctgggactacaggcgcccgccaccacgcccggctaattttttgtatttttagtagagacggggttttatcatgttagccaggatggtctcgatctcccgacctcgtgatccgcctgcctcggcctcccaaaatgctgggattacaggtgtgagtcaccgcgcccggccccgcatttagtcttaatgataatctggtaggtaggtgctattatattattactttttatagagaggaaactgaaccatagagaactaagtaagcgcccacgggcactgagctggtaagaggcagatccagggtttgaaccccccaaagacgggtgccacacgcctcttgataggaagtaaatcaaaaataaagacaaggaaggccgggcgcggtggctcacgcctgtaatcccaacactttgggaggccgaggcgggcggatcatgaggtcaggggtttgagaccatcctggccaacatggtgaaaccccatctgtactaaaaatacaaaaaattagctgggtatgatggcgggcgcctgtaatcccagctactcgggaggctgaggcagaattttttgaacccgggaggcggaggttgcagtgagccaagatcgagctactgcactccagcccaggtgacagtgagagactctgtctcaattaaaaaaaaaaaaaaaaaaaaaagacaaggaaaacctgaggcctgggcacagcgcctcacacctataatcccagaactttgggaggccaatggagtcaggatctcttaaacccaggtgttcaagaccagcctgggcaacattgcgagaccccatctctacagaaaaacaaacaaacaaacaaaaactaaaaattagccgggtgtggtggcgcctgtctgtggtcccagctactcaggaggctgaggtgggaggatcgcttgaggccaggagctcaaggctgcagtgagccgcgattgcgccactgcactccagcctgggcgtgcagatcagagcgagaccttgtctctaaaggaaaaaaaaaaagaaagaaagaaagaaaagaaaagaaaagaaaacctagcgaggtagataattttccctagatcctgcggccgccggaccacgaggccggcgctgtgcgttgttaaaaggagaatagcagatggtggcgcgcagccccgcgaggagacatccagcaacgaaatcgggagatggaagggacagtgagaaggggggcctggctgtgcgcccccgcccgatgccccactcctcgccgacgggcgccgggcacctgcgggaagggcgggagaatcgccgctcctttcccgccgcgccctttccgccctctccccgcctccttttcgggcgtcccgaggccgctccccaaccgacaaccaagaccccgcaggccacgcagccctggagccgaggccccccgacggcggaggcgcccgcgggtcccctacagccaaggtaaggcaggaatctcctggactgggtcgcggtcccccggcttcccggaagcgcagtgcgcgggtggcatcactgtgcccggagcccctgcgcgccccggccatccccaccccgagggaccccctacggaggcgacctgggggctgaggtgagcgcttgggcagcagcgacggggaggggtgtccaccccacccctggtgcgggccggggcgcgcaggcctggaactcggggttcagactccccgcgactcggaccacgcggctaagcgcgctcagggtcgcgtgcccccgccccgccgccatgctgggcgccgtggtggccgcgcagctgggcgacagcaggcgtgggcgggggtggggagcggcccctcagcggtccctaccgcctgaggccagggcccggggacttttattgtgacacggcgggcgcccggctctgcttagtcatggtgacctgcgcgcgctccgcgcctcccccacgcgcagcgatggaggcgccggggctcgggcggtggaggcggagccggagcgcggccatggcggggtgagtgaggcgggatgtgcccgggctgcgggcatcgcgggccgcgagcgcccctgcggccgtgcccggagaccaggaaaacgggcgccac

SEQ ID NO: 20705 - DNA, 2300 bp, Homo sapien
tcaatctttcaaattcaccctggaggctccaggggcctagagtttccatttattattcacttacatggcgaaatcccatctatcttttttttttttcttttcctttcgagacgtagtctcgcgctgttgctcaggctggagtgcaatggcaggatttcggctcactgcaaccttcacttacccaccaccacacccggttaattttttgtatttagtagagacggcggtctcaccatattggtcaggccggtctcgaactcctaacctcaggtgatccacccgtcttggcctaccaaagtgctaggattacaagcatgagccactgcgcctggcctctctatcttttaaaaataattataatttggatgaaatttagatgaattctttttttttctttttttttttttttttttgagacagagtctcactctgttgcacaggctggagtgtggtggcgcgatctctgctcactgcaacctctgcctcccgggttcaagcaattctctgcctcagcctcccgagtagctggggattacaggcgcccgccaccacgcccggttaatttttgtatttttagtagagatgggggtttcaccatgttggccaggctggtcttgaactcctgatctcgtgatccacccacctcggctcccaaagtgctgggattacagatgtgagccaccgcacccagcctagatgaattctttaaaataaacttacatacatttatttaaaagttaacgttacatgataaacggtgtgcatgacaaatcagtatccccagtcatgaaaaatagcaatggtttctgtctcttgggagccagcattcgcatttaatatttttattttttatttacttatttatttttttgagtcagagcctcgctctgtggcgcaggctggagtgcagtgcggtgatcttggctcactgcacgctccgcctcccgggttcacgccattctcctgcctcagcctcctgtgtacctgggactacaggcgcccgccaccacgcccggctaattttttgtatttttagtagagacggggttttatcatgttagccaggatggtctcgatctcccgacctcgtgatccgcctgcctcggcctcccaaaatgctgggattacaggtgtgagtcaccgcgcccggccccgcatttagtcttaatgataatctggtaggtaggtgctattatattattactttttatagagaggaaactgaaccatagagaactaagtaagcgcccacgggcactgagctggtaagaggcagatccagggtttgaaccccccaaagacgggtgccacacgcctcttgataggaagtaaatcaaaaataaagacaaggaaggccgggcgcggtggctcacgcctgtaatcccaacactttgggaggccgaggcgggcggatcatgaggtcaggggtttgagaccatcctggccaacatggtgaaaccccatctgtactaaaaatacaaaaaattagctgggtatgatggcgggcgcctgtaatcccagctactcgggaggctgaggcagaattttttgaacccgggaggcggaggttgcagtgagccaagatcgagctactgcactccagcccaggtgacagtgagagactctgtctcaattaaaaaaaaaaaaaaaaaaaaaagacaaggaaaacctgaggcctgggcacagcgcctcacacctataatcccagaactttgggaggccaatggagtcaggatctcttaaacccaggtgttcaagaccagcctgggcaacattgcgagaccccatctctacagaaaaacaaacaaacaaacaaaaactaaaaattagccgggtgtggtggcgcctgtctgtggtcccagctactcaggaggctgaggtgggaggatcgcttgaggccaggagctcaaggctgcagtgagccgcgattgcgccactgcactccagcctgggcgtgcagatcagagcgagaccttgtctctaaaggaaaaaaaaaaagaaagaaagaaagaaaagaaaagaaaagaaaacctagcgaggtagataattttccctagatcctgcggccgccggaccacgaggccggcgctgtgcgttgttaaaaggagaatagcagatggtggcgcgcagccccgcgaggagacatccagcaacgaaatcgggagatggaagggacagtgagaaggggggcctggctgtgcgcccccgcccgatgccccactcctcgccgacgggcgccgggcacctgcgggaagggcgggagaatcgccgctcctttcccgccgcgccctttccgccct

SEQ ID NO: 20706 - DNA, 2300 bp, Homo sapien
agtgtgtgtggaactcggaggagcccgggaggcagaagcagagtggagcagagagaggcacagaagtaacagaaagagacaaatcaggacggcatatggccttgtccttgcggggtcctcactgaggacttgatcacttactctgagaaacacagggagccacgggagggtttggagcagaaaagaaatgtgatctgagttttaagaactgtggccaggagtgtggagtggcagctagggatgggactcccaacatctgtcgagatcctggagcctgagtccccagggtcccaattcgtgggaaagaagttcagggaggcagctggagaggcaggttgctgagcccgggacccgcagccggaagagccccattttcgagagaagtgagattggcgcctgggaggtgtgaagcagccacctccccaccctggggcgcggcttcccctttacagaaggaggtcatttattgagcacctactgggtgccagccacagccatgctgggagatcttcaggggtcatcccagtgggcaccattggagttggcttggtccacaggactggggaacctggcactgaagggttaacaccgtcccaccctgcgggtcccattggctgtgtctttgagcagagcaggcaggaaaggttctgcccaccgagggaacagcgggggcaggagggctgggatccccaaggggctacatgggggcctgacccggcctgagtgccccctgagtttcctcccacgagggtatcccggatccacacttattctcagcctctggctcatctctcctggggcgccctcaccccacccgcggccagcagggcctgaagcatcaggggcaaagggcacggtcctggagaaggtcgcagcagcgggacccagcctcccttcctgaatctgagggtggaagagctgggaccgtctggaagttcctgggaagtcggggtgggggcgtttcggggccagcgggactggtcgttggaggagcagtggcctgggagaggcgtgggagagcatcacagacagcaacaaagagacacgcagaggcaaagagacacgcagagacaaagagacacgcaggcgagagactctgagatcctcctgagagagatacagaggaagtgagggagacactcattcattatctgggcatggttgcaagcgactggagtcccagcagctacgttcagccggctgagatgggaggatggcttgagccgcggaggtcgagactgcagtgacttatgatgttgccactgcactccactctgggccacagagcaagatcttgtctcaaaaaaaaaaaaaaaaaagaaattcttacattgctggggtttactgtctgctaaggacacagcccagaaacaccattaatgagtaaatcactttgtcgtcagcgataagggtgggagagaatcggtcgggggaacacggaatccagggggtgggacaggagagaccctccttatctgaggagcggcaagttcccatcacaatcctgcccgggcccgccccacccccactcgccctgagccgggggcgggagcgggaaattgggaggggcctgtgcccgggagcagcgggaacctatctgctggtgggagaggactcaggctaaggtggcccccactgaagactcctgctaagcaacccactgaagacccctccgaatcatcgacggggcgtccttggggtgcagcccaggaagctcagttcacaggtgggtgggcaatgggagggcgcagtgcccggacacccaggacagaggagacccctccgctggggagaagaggctcaggctgcgaccgccctgctgcagaaccctccctttcccgcctctccgagtcctcccaccgcgatggagcgtccctgggaggacagcccaggcccggagggggcagctgagggctcgcctgtgccagtcgccgccggggcgcgctccggtgccgcggcgagtggcacaggctggcagccatgggctgagtgcccgggacccaaggggagggggcaactgctggcgaccgccggccctttgcgtcgctggcccgccccctcgcctgccagctccagccccgcccccggagcggcgtccgctcactcggttcaaggcagcgcgactgcgggtggcgcacgaccagggcgcagagtgagtggactgcactggacctttgggggcgctgggctgggcctgacccggagggggtcgccctggcggccactttcccggtctaaaaaggcgcaccactccttgcagggagttctccgaacttttcctggaggcctctggggagggg

SEQ ID NO: 20707 - DNA, 2300 bp, Homo sapien
taaatgaaatgaacaaggtggccgggcacggtggctcacgcctgtaatcccagcactttgggagggggaggcgggcgattcatctgaagtcaggagttggagaccagcctggccaacatggtgaaaccccgcctctactaaaaatacaaaaattagctgggcggggtggtgcattcctgtaatcccagctactctggaggctgaggcaggagaattgcttgaagccaggaggcggaggttgcagaggcgaagtttgcagtgagcccaaatcgcaccactgcactccagcctgggcaataaagggagattacaaaaaaaaaaaaaaagcaaaagcaaggtgatttcagataatgccaactgccatttgagatgagggacagatcagggaaggtctctctgaggaggtgaccagctgaccagctgggaaggggtggggagaagggtgctccaggccacctggcccccaagttcaaaagtcttgaagtgtgtgtggaactcggaggagcccgggaggcagaagcagagtggagcagagagaggcacagaagtaacagaaagagacaaatcaggacggcatatggccttgtccttgcggggtcctcactgaggacttgatcacttactctgagaaacacagggagccacgggagggtttggagcagaaaagaaatgtgatctgagttttaagaactgtggccaggagtgtggagtggcagctagggatgggactcccaacatctgtcgagatcctggagcctgagtccccagggtcccaattcgtgggaaagaagttcagggaggcagctggagaggcaggttgctgagcccgggacccgcagccggaagagccccattttcgagagaagtgagattggcgcctgggaggtgtgaagcagccacctccccaccctggggcgcggcttcccctttacagaaggaggtcatttattgagcacctactgggtgccagccacagccatgctgggagatcttcaggggtcatcccagtgggcaccattggagttggcttggtccacaggactggggaacctggcactgaagggttaacaccgtcccaccctgcgggtcccattggctgtgtctttgagcagagcaggcaggaaaggttctgcccaccgagggaacagcgggggcaggagggctgggatccccaaggggctacatgggggcctgacccggcctgagtgccccctgagtttcctcccacgagggtatcccggatccacacttattctcagcctctggctcatctctcctggggcgccctcaccccacccgcggccagcagggcctgaagcatcaggggcaaagggcacggtcctggagaaggtcgcagcagcgggacccagcctcccttcctgaatctgagggtggaagagctgggaccgtctggaagttcctgggaagtcggggtgggggcgtttcggggccagcgggactggtcgttggaggagcagtggcctgggagaggcgtgggagagcatcacagacagcaacaaagagacacgcagaggcaaagagacacgcagagacaaagagacacgcaggcgagagactctgagatcctcctgagagagatacagaggaagtgagggagacactcattcattatctgggcatggttgcaagcgactggagtcccagcagctacgttcagccggctgagatgggaggatggcttgagccgcggaggtcgagactgcagtgacttatgatgttgccactgcactccactctgggccacagagcaagatcttgtctcaaaaaaaaaaaaaaaaaagaaattcttacattgctggggtttactgtctgctaaggacacagcccagaaacaccattaatgagtaaatcactttgtcgtcagcgataagggtgggagagaatcggtcgggggaacacggaatccagggggtgggacaggagagaccctccttatctgaggagcggcaagttcccatcacaatcctgcccgggcccgccccacccccactcgccctgagccgggggcgggagcgggaaattgggaggggcctgtgcccgggagcagcgggaacctatctgctggtgggagaggactcaggctaaggtggcccccactgaagactcctgctaagcaacccactgaagacccctccgaatcatcgacggggcgtccttggggtgcagcccaggaagctcagttcacaggtgggtgggcaatgggagggcgcagtgcccggacacccaggacagaggagacccctccgctggggagaagaggctcaggctgcgaccgccct

SEQ ID NO: 20708 - DNA, 2300 bp, Homo sapien
aggccgaggctggcggatcacctcagtcaggagttcgagaccagcctggccaacgtggtggaatcctatctctactaaaaatacaaaaattagctgggcgtggtggtgtgcgcccgtaatcccagctactcaggaggctgaggcagcagaattgcttgaacctgagaggtggtggttgcagtgagccaagatcgcactagtgcactccagcctgggcaacaagagcgaaactccatctcaaaataaatacataaataaatgaaaataaaataaaaaataaaaattgtccctggccaggtgcagtggctcatgtctgtcatcctagaactttgggaggctgaggctaatcgtttcagcccaggagttcaagactagcctgagcaacactgggagactctatctctacagaaaaatttttaaaaattagccaggggtggccaggcacggtggcccacgcctgtaatcccagcactttgggaggccgaggtgggcggatcacgaggtcaggagatcgagaccatcctggctaacacgatgaaacctcgtctctactaaaaatacaaaaaatcagccaggcgtggtggcgggcgcctgtagtcccagctactcgggaggctgaggcaagagaatggtgtgaacctgggagacagagcttgcagtgagtcgagatcgcgccattgcactccaacctgggcaacagaacgagactccgtctcaaaaaaaaaaaaaaaaattagccaggggtggtggcatgtgcctatagtcctagctactcaggtggctgaggcaggagacttgcttaagcctcggcagttgagactgcagtgagccatgatcaggccactgcactgtagtctggatgacagagcaagaccctgtctcaacaacaacaaccaaaatctgtttgggcctcgcaaggttagagaaaaaaaattaaaaaataaaataaaataaaatattttcctgtagtctcagctacttgggaggctgaggcaggaggatcacttgagctaaggagtttcaggccagcctgggcaacatagagagaacttgtctctataaaaagttaactgattactttttaaaacaaagaggttttttttcagccttattgaggtataatagacatatacaaaaccatgcaaattttaagcgtacaatctgatgagttttcacacctgtgaagccactattacagttaagatactgaatttatccacagctccaaaaaatgtcttcctgcctgaggtggtggctcacgcctgtaatcccagcatttgggaggctgaggcgggaggatctcatgaagccaggagtttgagaccagcctagacaacatagcgagaccccttatctacaaataaaatttaaaaaattaaccaggcatggtggctcctgtctgcggtctcagctactctggaggctgaggttggaggatcagagttggaggctgcagtgagctatgaaagcgccactgcactccagtctggacaacagagccagatgctgtctcgacaaaacaaacactgaaaaaaactttcctggagcacttcattcatccctccctcccgcgcctgcctacccctggattttttttccctgagcataattctcatgaagattcgtctatgttgttgcgtgtattccagccctattttgcacatgaggaaactgaggcacagagaggcgtggcttgccccggaggtcacactagtcgatttggtcccaggccagggcgggttctgggtcggcagcccgcgcaggtgcactcgggaggcggggcgggcgctgcaggtgcgcagtcagtctcacctgggcgcctgccaggaggtcagtcctgggccctggggggcaggactaggggcggggccaggggcaggggttccccagctctgctgcctccgataagggcctgaaggggctgtcgcgctcctggcggtgtgataaggagggcggggggaggccgcgggaaggcgtcggggtttgaggtccccgcctggcgacccgggatcggggcaggaaaggcggctgggcggggagagggcggggcggggcgtctggcttggccacgcccaccgtcatccggggtcctggcccgctaagatggcgatggctgcggtagcagcggcggcggctgttgcctggcccggtaccctggggacgggggccgagtagcgccttccccgggccccgtgaaccggctgcgggtcgcccttggggggcagcggccgcagccccccacctgggccctcggtccgccctcccggcgcgtccatgaactcagtgtcgccggccgccgc

SEQ ID NO: 20709 - DNA, 2300 bp, Homo sapien
ggttttttttcagccttattgaggtataatagacatatacaaaaccatgcaaattttaagcgtacaatctgatgagttttcacacctgtgaagccactattacagttaagatactgaatttatccacagctccaaaaaatgtcttcctgcctgaggtggtggctcacgcctgtaatcccagcatttgggaggctgaggcgggaggatctcatgaagccaggagtttgagaccagcctagacaacatagcgagaccccttatctacaaataaaatttaaaaaattaaccaggcatggtggctcctgtctgcggtctcagctactctggaggctgaggttggaggatcagagttggaggctgcagtgagctatgaaagcgccactgcactccagtctggacaacagagccagatgctgtctcgacaaaacaaacactgaaaaaaactttcctggagcacttcattcatccctccctcccgcgcctgcctacccctggattttttttccctgagcataattctcatgaagattcgtctatgttgttgcgtgtattccagccctattttgcacatgaggaaactgaggcacagagaggcgtggcttgccccggaggtcacactagtcgatttggtcccaggccagggcgggttctgggtcggcagcccgcgcaggtgcactcgggaggcggggcgggcgctgcaggtgcgcagtcagtctcacctgggcgcctgccaggaggtcagtcctgggccctggggggcaggactaggggcggggccaggggcaggggttccccagctctgctgcctccgataagggcctgaaggggctgtcgcgctcctggcggtgtgataaggagggcggggggaggccgcgggaaggcgtcggggtttgaggtccccgcctggcgacccgggatcggggcaggaaaggcggctgggcggggagagggcggggcggggcgtctggcttggccacgcccaccgtcatccggggtcctggcccgctaagatggcgatggctgcggtagcagcggcggcggctgttgcctggcccggtaccctggggacgggggccgagtagcgccttccccgggccccgtgaaccggctgcgggtcgcccttggggggcagcggccgcagccccccacctgggccctcggtccgccctcccggcgcgtccatgaactcagtgtcgccggccgccgcgcagtaccggagcagcagcccggaggacgcgcgccgccggcccgaggcccgcaggccgcggggtcccagaggcccagaccccaacggcctggggccttccggagccagcggccccgctcttggctctcccggggctggcccgagtgagccggacgaagtggacaagttcaaggccaagttcctgacagcctggaacaacgtcaagtacggtgaggagggggcccggagatcgtgggggtgtcgggggccgttgaggaaaaccagaccccggtcctgccagttatcccacccttgttcccgtcctgagtcacctgtgggtcccctccctgcccggcccagggtggacctgtggcaggtccaatagtgttttcaagccccgcccattcccctgtgtgaccttgggcaagatcctttgcttcctggcgcctccgtttttgcccctctctgtaaaatgggtacaataatcagaactaccttccttcatcctgaattgatggtggacactcctgtagctgtcactgggggccccacctccgacggaatccccggagccaccccggagataggaactaggatcgtgcccatttcacagatgggggaatggaagcgctgttgctgtcatgcaagtgcttcatctcgctgggcgctgcccctacgtctccccaggttgggtggttaaaagccggaccagctttagcaagatctccagcatccacctctgtggccgccgctaccgtttcgagggcgagggtgagctggtggttgggaccagggctgggggaggcctctccacgcccgccggagtgtccctggtggcagctgacagacccgctcttgtaggtgacatacagcgtttccagcgggactttgtgtcccgcctgtggctcacataccgccgggacttcccgccccttcctgggggctgcctgacctcggactgtggctgggggtgcatgttacgcagcggccagatgatgctggcacagggccttctgctgcatttcctgcccagaggtgagccataggggggaaggggtgcactaggagtacagggtcaactgccatatcagcagtattagaattacttaccaac

SEQ ID NO: 20710 - DNA, 2300 bp, Homo sapien
catcacagcactgctctgagcttgttgagaggagagctcagggcttagtaaatggggttaatcttggggcagccagccaggtgaggtggctcatgcctgtaatctcagggctttggtgggcagaggagggaggatcacttgagcccaggagttcaagatcagcctgggcaacatagtgagaccccagctctacaaaataaaataaatactggggcagcagacaggggccagcctgcctgtcctgaggcttgttttctctcgtgggcagcttccgggcatttgtggaggacagtgaggacgaggacggcgctggggagggcggctccagtttgctgcagaaacgtgccaaaaccaggcaggagaaggtgggtactggggcctgactggactgctgggggacagggtggcgggtggctgggcatctgcggatgctcagtgctagctttcccccaggcccaggaggaggccgactacatcgagtggctgaagggacagaaagagattcggaacccagattccctgaaggaactggtgagttctcacgcatggtcgctgatggagtagaccgcgtgttccgcgtccatccaacctatttacagaaagtaaccctctgaagatgggatatgtacatctctgggcctcagctcctacatctctttaaatggggataggctgggtgccgtggttcacacctgtaatcccagtgctttgggtggtcaaggcaggaggattgcttgaggccaggagtttgagactggcctgggcaacatagcaaaatggctctacaaaaaaatgaaaaaattagccaggcatggtggcatgcacctgtagtctcaaatacttgggaggctaaggtgggaggatcttgtgagcccgggaggttgggtctgcagtgagctatgatcacacgactgtactgtcacctggatggcagagtaagaccctgtctcgaaataaaaataagaaaccaaaatggggctaatgtcacctactccagaggctggctgtgaggtccatgtggtgagcatgcctgccctccttccctgtcctccattgaccagagtcctgtctcctgtcacccccagacgcatctcaaggaatactggaacgaccctgagttggatgaaggggagcggttcctgcgggattacatcctcaacaaacgctatgaggaggaggaagaggaggaggaagatgaagaggaaatggaggaagaggaggggtgagccactgcatctccccaggacctagattttgggtgcgcttcatgaagtattcccaggcggcactggccaggaggcagagggcaccatgtgtgtatttttttcacagatggtggcagagttagtcttctgtaaggcagagccacagagtataggctctggagccaggtggcactgcctcaaatcctggttcggcttcaagactttcatgcctcagtttccccatctgtaaaatgaggacaatagcagcgtgcaccttgtagggttcttgtgaggattaaatgagttcatacgcttcgtacccaggcgtgcaggaaaggggggctcgacctcacttggctggccccctggcatcaccacatcttgcccctcagggtccacggtcccccagtccagctggctgtggacgactcctcagacgaaggggagctgtttctgaagaaacaggaggactttgaacagaagtacaatttccgtttcgaggagccggactcagcatcggtgtgtggctggggctggggaggactcagcccccagggttcaggcccagggaaccccacatcatctctgcggcccttgtgggcttttctgattgcgcctaggtcaagacctacccacgcagcatcgcgtcctccgtgcgccgtaaggatgagcgcagaaaggagaagagggaagagactcgggagcgaaagaagagggtgagtgtggggggtgagctggggaggaccccccagccctggaggaaagcccatgccctccccctctctgcctgggcctgcaggagaaagcaaagaagcaggaagagctcaagcagctgaagaacctgaagaggaaggagattctggccaagctggagaagctgcggaaagtaacaggcaacgagatgctgggcctcgaggagggggaccttgaagacgacttcgaccctgcccagcacgaccagctcatgcaggtgcggccctcatcccggcccaacatgacgctgagttcacacaaacatggctctcactggccacggtggctcacgcctgtaatcccagcactttgggaggctaaggcaggcagatcacctgaggt

SEQ ID NO: 20711 - DNA, 2300 bp, Homo sapien
ccagctactcaggaggctgaggcaggaggattgagccaggagatggaggctgcagtgagctatgatcaggccactgcactccagcctgggcaacagaataagaccctgtctcaaaaagaaaaaaggccgggcatggtggctcatgcctgtaataccagcaccttgggaggctgaggcgggcagatcacctgaggtcaagagtttgagaccaccctggccaacatggtgaaaccccgtctctactaaaaatacaaaaattagccagatgtggtggtgggcgcctgtagtcccagctacgtggggaggctgaggcaggagaatcgcttgaatctgggaggtggaggttgcagttttccgagatcatgccactgccctccagcctgagggatagagcgagaccctggctccaaaaaagaaatgctgtcacccatgattggaaaagaaaaaaaaaaaaaaaacgctggaaactcaccagaatcgcagatagccctgagagcaggagtctcagtgattccatagccctccgatgacccccgccagctgttgcttggaatagctgctccgcatgggcatggggacaggcgggccctggaagatatattctgaagaccccacttttcctttacagcaaatatgttgatgaggagaactcagacggggagacttccaatcacagactccaggtgggtggggtgaaggctgggtcggggggctgaggggcctggggctggcctgagacctatggccctctctgcaggagacatcgtcgcaaagttatgtggaggaacagaaacagctcaaggaaaggtgaggctgggtgggcgggaatggcccaatggaggaaagttgaggctcgggggttggataggcacgggttcaaattgagctctgtcactttctatgtgcttcagtttcctcatcagttaaacggggttaataacatcacagcactgctctgagcttgttgagaggagagctcagggcttagtaaatggggttaatcttggggcagccagccaggtgaggtggctcatgcctgtaatctcagggctttggtgggcagaggagggaggatcacttgagcccaggagttcaagatcagcctgggcaacatagtgagaccccagctctacaaaataaaataaatactggggcagcagacaggggccagcctgcctgtcctgaggcttgttttctctcgtgggcagcttccgggcatttgtggaggacagtgaggacgaggacggcgctggggagggcggctccagtttgctgcagaaacgtgccaaaaccaggcaggagaaggtgggtactggggcctgactggactgctgggggacagggtggcgggtggctgggcatctgcggatgctcagtgctagctttcccccaggcccaggaggaggccgactacatcgagtggctgaagggacagaaagagattcggaacccagattccctgaaggaactggtgagttctcacgcatggtcgctgatggagtagaccgcgtgttccgcgtccatccaacctatttacagaaagtaaccctctgaagatgggatatgtacatctctgggcctcagctcctacatctctttaaatggggataggctgggtgccgtggttcacacctgtaatcccagtgctttgggtggtcaaggcaggaggattgcttgaggccaggagtttgagactggcctgggcaacatagcaaaatggctctacaaaaaaatgaaaaaattagccaggcatggtggcatgcacctgtagtctcaaatacttgggaggctaaggtgggaggatcttgtgagcccgggaggttgggtctgcagtgagctatgatcacacgactgtactgtcacctggatggcagagtaagaccctgtctcgaaataaaaataagaaaccaaaatggggctaatgtcacctactccagaggctggctgtgaggtccatgtggtgagcatgcctgccctccttccctgtcctccattgaccagagtcctgtctcctgtcacccccagacgcatctcaaggaatactggaacgaccctgagttggatgaaggggagcggttcctgcgggattacatcctcaacaaacgctatgaggaggaggaagaggaggaggaagatgaagaggaaatggaggaagaggaggggtgagccactgcatctccccaggacctagattttgggtgcgcttcatgaagtattcccaggcggcactggccaggaggcagagggcaccatgtgtgtatttttttcacagatggtggcagagttagtcttctgtaagg

SEQ ID NO: 20712 - DNA, 2300 bp, Homo sapien
tctccttcctctggagcagaatccggggtcctttcctgactgtggattcagagaagtgacttgacttctctgagcctcttttcctgtctgtaaagtatatctaacggtagcatctcccctcagggctgttttaaggatagattgggatttacccagtttacacagttcatctgttttgactattgaatgaattgcttcacaagtcacaagtccttagcagagcctaggttattacctggtggtggagttaatgactgtgtccttggcactattcaaggtgggaattgctgactgaatgattccaactccaccaggctgggcaggtggttcaagcatctaatcccagcactttgggaggctgaggtgggagggtcaattgaggccaggagtttgagaccagtttggccaacatagcaagaccccatttctctttttttttttttgaaatggagtttcactcttgttgcccaggctgggttgcaatgggacgatctcagctcactgcaacctccgtctcccaggttcaagcgattctcctgcctcagcctcctgagtagctggaattacaggcacgcgccaccacgcccagctaatttgggatttttagtagagacagggtttctccatgttggccaggctggtctcgaactcccaacttcaggtgatccgcccaccctggcctcccaaagtgctgggattacaggcgtgagccactgcgcccagccagcctttctttcttttttctttttttttttttgagacggagttttgctcttgttgcccaagctggagtgcaatggcatgatctgggctcactgcaacctccgcctccccggttcaaccgattctcctgcctcagcctccggagtagctgggattacaggtgcgtgccaccacgcccagctatttttttgttatttttagtagagatggggtttcaccatgttagccaggctggtctcgaactcctgacctcaggtaatccatccgccttggcctcccaaagtgctaggattacaggcgtgagccactgtgcctggcggcaagaccccatctctacaaaagattcagaactcagctgagcatgctggtgtgcgcttatagtcccaggtatttgggaggctgaagtgggaggattgcttaagcccatgagttcaaggctgcagtgagctgtgggctaggatgttgacactgcactccagcctgagcaagagtaagactccaactctcaaaaaaattaattataataattaatcaggctgggcatggtggctcatgcctgtaatcctagcactttgggaggttgaggcgggaggatcacttgaggtcaggagttcgagaccagcctggccaacatggtgaaaccccatctctactaaaaataacaaaaattagctgggcgtggtggtgcacacccgtaatcccagctactcaggaggctgaggcaggggaatcgcttgaacctgggaggcggaggttgcagtaagccaagtcacgccatgcactgggcaacggagtgagactctgtctcaaaaaaataataataatggccgggtgcggtggctcacgcctgtaatctcagcactttgggaggccgatgcaggcaaatcacctgaggtcaggagttcgagaccaacctgaccaacatggagaaaccccatctctactaaaaatataaaaattagccgggcgcggtggtgggcacctgtaatcccagctgcttgggaggctgagacatgagaacagcttgaacccgggaggcagaggttgcagtgagccgagatcatgccattgcactccagcctgggcaacagaatgagactccacctcaaaaaaaaataagtaaataaataataacaacaataataataatcaaagcaggaattactgactgaatgaccccaaccccaccagatggtgacaagcacaatactcttggacagctgggaattggtggatttgggatttgaatcctctgtctaaccctggccctgccctgtgggattctctgccacggcaaagaagggggttgtgggtgatggcaggtgtctttggtgggttaacagcatcgtcatcagacagtgaggaggacccagaagccttggagaagcagaagaaagtgcggcccatgtacctgaaggactacgagaggaaggttatcttggagaaggcagggtatggagaaggcctacatccccaccccctggttcccagccctgtcaggtctatgggggtcttaggggcaggagagggaaaaaagctggcagcctgggccgggcatggtggctcatgcccataat

SEQ ID NO: 20713 - DNA, 2300 bp, Homo sapien
ctcaggacctcgtggacatcctgcagggccacatggtggccccgctgtgatctggggtcaccctctccagcaagagaaccccgtggggttatgtatcagaagagaggggaagaaacactttctcttcttgtttctcctgcccactgctgcagtaggggaggagcacagtttgtggcttataggtgttggttttgggggtgtgagtgtttgggggacgtttctcatttgtttttctcactccttttggtgtgttggacagagaagggctcctgcaggccacagccacctaaacggttcagtttcttctgcgcctcaggctgctggggcctcagacgagacccaagggcagagcatttaagagtgaagtcatgacctccagggagcctagaagctggtggccttggccggctgtgctcagagacctgaagtgtgcacgttgcttcaggcatggggggtggggggagcgtcccaaatcaataagaaggtagaatgagttatgagttattcatattctgttggaagcttgttttccagtctcttgtacagcgttttaaaagaaatggattctatttattatgctttattggaaaaaatgttgtaataatttaatgtttttacccattaaattaagacttgtgcatgatcacagcacgggtggcttctgatttttgagtctgggatggagagttacacatcccggatgttgatggggatgaggacgggggtcgcggatcgtggatgtggtgggtgaggggagagaatagtaattcccagggcgccagggtgagtgagctgggtggggcagcggttttcgctgtcggaacggaagggaagcaggaaaccgcgagtggagaaagggcccccagatgtcagctgggtgcccggagcacagggggtggggcgggtgggcggtggccgcggccttccccgcaggggcgtagccgtgggcggtgactgcggtgatgaggcgaaagggatcccggaaaagccaggggcggggttagcagcggtacgcctcgtttacaagtggatgcgggcgggactgagggcggccccgccccgtccagggcttcctcaatgcgcgtgcgcaatgggccacagaaccgccatgccggaaccgcgcgggtcgtcgcagctgcgggtgaacgcggcgtttgccgcgcggtacaaccgctaccgggagcgcgaggaactgcagcggcgtgagtgcggggcgcatgcgcgcgggagcctgcgcgcgccggccggttgggaagtggggagtcgagtggccccgccggctgacctgggggggggcatcccgtctgtgtcccgcagtgaaggatcgctacggggaccgagacagcagcagcgactccagctccgagtcggactcaagcgacgagcgcgtggtgcgcgtccccgccccgtcctggacgtgcggaggcgtccaagcccccctctgcaccccgaccccgatgtagacgggggggaacccccaaccccagagcgccctgcgggagcgtcccatcctccgctccccatcccatgagggacagacagtgccccccctctccccaggggagccaaatccccgttattttctctcccctgccacgatccccacctgcccactctgatgtgtggggcgactctgtcccccaagaaccccccctttcctctttcatcctcaagagtctagccattttttagtgtactccttgcgccacgtggggcgcccaacttctcacatcagccctgatcctggccccactgtgcggcctggcccagcccctccccgctgtctctcttgtgccctcagcccacctgccccttgtcaagtctttgtcttccccaggaattaccttctccttgcccctcaccttcctctacccatatcctgtacctacctgtggcctgcccctgcccaccccaagagggcccctctccctcctgctgtttgaccacctgtttgacctccccagccagatccacccccctccatcctaatccctacgctgagctcacctgctggcgccagggctcttattatctcccttctgaaatctatccccaacccttttcctgccctaggaatttgatccccagcaggagcgggacttttacaaaacgctctccttgttgaagaagaaggacccccgcatttatcagaaagatgccaccttctataacagaacaggtccggggccactcctgtctaaacctctccttcctctggagcagaatccggggtcctttcctgactgtggattcagagaagtgacttgacttctctgagcctcttttcctgtctgtaaagt

SEQ ID NO: 20714 - DNA, 2300 bp, Homo sapien
aggggttcctcattttgtagggggctctctgagacaaatctggttacttgggggtggggtcttcattcctaaaggttatgcggatccttgatatagtatgggggccccaatggaggaacaatgtcagattgcaagacatccctatattccctgggagacattttacagggaagtctcgtttctcttttattattacttttggaatcccgcttcttgaaaggagctctcaggtactctgaggtgacatcaccattatgtaggaggaggctatttcctggagaaggggttcgctttcctttgacatcttttttcccttatgaggactatcaattctttgggggtagttctccatctctgggggcccatttcctggaggggattttctgtttcctggtgattgcccatatctgggggcgtctttggtcccttgggggagagtcttaggttccttgaaagtttccatggggggctgttctctgggttggggggtctcattcttaagggagtgaccagcttttggggggggtccctattcccagaagaactttcctgggggcttatgcagcttctccgttcactagaggacccctcctctagcatttcctgtttctgggagatgcctctttctggatgacccttctctttccagtgaccccttttgtggaacctcctcccttgaggacctcctgatcctctgtccctcacacaggtcatgatgtttggcagcaccgccatcgccctggagctgctgaagcaaggtgccagccccaatgtccaggacacctccggtaccagtccagtccatgacgcagcccgcactggattcctggacaccctgaaggtcctagtggagcacggggctgatgtcaacgtgcctgatggcaccggggcacttccaatccatctggcagttcaagagggtcacactgctgtggtcagctttctggcagctgaatctgatctccatcgcagggacgccaggggtctcacacccttggagctggcactgcagagaggggctcaggacctcgtggacatcctgcagggccacatggtggccccgctgtgatctggggtcaccctctccagcaagagaaccccgtggggttatgtatcagaagagaggggaagaaacactttctcttcttgtttctcctgcccactgctgcagtaggggaggagcacagtttgtggcttataggtgttggttttgggggtgtgagtgtttgggggacgtttctcatttgtttttctcactccttttggtgtgttggacagagaagggctcctgcaggccacagccacctaaacggttcagtttcttctgcgcctcaggctgctggggcctcagacgagacccaagggcagagcatttaagagtgaagtcatgacctccagggagcctagaagctggtggccttggccggctgtgctcagagacctgaagtgtgcacgttgcttcaggcatggggggtggggggagcgtcccaaatcaataagaaggtagaatgagttatgagttattcatattctgttggaagcttgttttccagtctcttgtacagcgttttaaaagaaatggattctatttattatgctttattggaaaaaatgttgtaataatttaatgtttttacccattaaattaagacttgtgcatgatcacagcacgggtggcttctgatttttgagtctgggatggagagttacacatcccggatgttgatggggatgaggacgggggtcgcggatcgtggatgtggtgggtgaggggagagaatagtaattcccagggcgccagggtgagtgagctgggtggggcagcggttttcgctgtcggaacggaagggaagcaggaaaccgcgagtggagaaagggcccccagatgtcagctgggtgcccggagcacagggggtggggcgggtgggcggtggccgcggccttccccgcaggggcgtagccgtgggcggtgactgcggtgatgaggcgaaagggatcccggaaaagccaggggcggggttagcagcggtacgcctcgtttacaagtggatgcgggcgggactgagggcggccccgccccgtccagggcttcctcaatgcgcgtgcgcaatgggccacagaaccgccatgccggaaccgcgcgggtcgtcgcagctgcgggtgaacgcggcgtttgccgcgcggtacaaccgctaccgggagcgcgaggaactgcagcggcgtgagtgcggggcgcatgcgcgcgggagcctgcgcgcgccggccggttgggaagtggggagtcgagtggccccgccggc

SEQ ID NO: 20715 - DNA, 2300 bp, Homo sapien
agtgagccgcgatagcgccactgcactctggcctgggcgagtgagactccgtctcaaaaaaaaaattaaaaaaaaattaaaataaataaataaataaaaaagccatggcttgatttgcacaattgccatcctgataccccacctacctgctctcccctgctctgtaccacaccaggcacgctctcacctctgggccttagcatctgctgtgcctcccagctggtgtgcttttccccatataaccacaagtctccctccctcacctttaggtctcaaatcaaatgtcacctcttcagggaggccctccctgcctttgcgtttctttttcttttcttttcttttcttttttttttttttttgagacagagtctcactctgttgcccaggctggagtacaatggcgcgatctcggctcctgcgacctccgcctcctgggttcaagcgattctcctgtctcagcctcctgagtagctgggattacaggtgcgtgccaccaggcgcagctaatttttttttttttttttttttttttgagacggagtctcgctgtcgcccaggctggagtgcagtggcgcaatctcggctcactgcaggctccgccccctggggttcacgccattctcctgcctcagcctcccgagtagctgggactacaggcgcccgccacctcgcccggctaattttttatatttttggtagagacggggtttcaccatgttggtcaggctggtcttgaactcctgacctcgtgatccgcccacctcagcctcccagagtgctgggattacaggtgtgagccaccgcgcccggctttttgcctttccgtttcaatggctcatctggtcagtcctctaccactctaaaaagatttaactattggcggagagcaggagctcacgcctgtaatcccagcacttttggaggccaaggcagaaggatccgttgagcccaggaattcgggaccagcctgggcaacaaagcaagaaccccaacataaaaaaaaaaatctgtatttaaaagccaaacacaaataacaaacaaaaaacaccagcctgggcaacatagtgaaacctcatatctactaaaaacacaaattagccgggcgtggtggtgcgccctgtagtcccagctactcgggaggctgaggcaggaggatcacttgagcccgggaagtcgaggctgcagtgagctgtgatcgcgccactgcacgccggcccgggtgacaggagtgagaccctgactcaaaaataaatacatatataaataaaaattaactattgtctctggccccagaccataggtgtccctgcagcaggggccgactggcgtgctctccactcgggcccctctaggaggtgctaagtaaatatttgaacgaagacctctgagtccctgtctggctgcgactatgtcctctcaggccttcccacgtggcagctgcaggctcctttcctgctggctcagtctgagcccggcagggtgatcccttcctcatccactccgtctctccgtttccctttcttcacggtgcttgacactatctaatattatttggttgtttgaatgtgcgcgtccagctcccaggacgctccctgcacacagtgaatgaataaatgaatgaaataaagcgcccagctcgtagtaagggccaatgaatgtctattagtagtggaacctcggattgggtggctccagccctgcctcccttccctcaggaggcgccgaggtcccagagcagcccgcgcgaccctgcccctgacctttctccctgggtcagttaaaccagccttctttcccgcctgccgggttcatttgaaaaccgaaaaccccgccattgccggcggtccaccggttgccacactctgaccaatcaggagcgacgcgtttcacgccgagcccgaagtttccccggcgacgcgcagccactggttatgcaggccctgtgggcggaacgccgtaaggtcgcgcgccgggcaacgcggtgccgctacacagtagcgagtttgtaagaaaacaaatcagttgcgttcggggcgtggccgggagcacgttggctccgccccctggcggctgcctcagcggcggcggcggcgcaggctcagagcagaccccgcccggcgaggaggagggagggtgagttagggggagacccggcccccaaggggcgggcgccgggcagggccccgcgggcggccgagggttgggcccggctcccagcccctcgccgtcctccggctgacagggggaggagcccgccgggagggccggggtctcgggctggggagccgggacgggagagc

SEQ ID NO: 20716 - DNA, 2300 bp, Homo sapien
catggtgaaaccccatctctactaaagatacaaaaaattagctgggcttggtggtgcacgcctgtaatcccagttacttgggaggctgaggcagcagaatcgcttgagcctgggaggcagaggttgcagtgagccgagattgtgccattgcactccagcctgggcaacaggacgagactccaaattaaaaaaaaaaaaaaaaattagctagttgtggccaggcgcagtggctcacatctgtcatcctagcaatttgggaggccaaggcgggtggatcacctgaggtcgtgagttcaagaccagcctgaccaacatggagaaaccctgtctctactaaaaatacaaaaaaagtagccgggcatggtggcgcatgcctgtaatctcagctactcgggaggctgaggcaggagaattgcttgaacctaggaggcataggtttcagcgagccgagatcacatcactgcactctagcctggtaaactagagcaaaattctgtctcaaaaaaaattagctgggtgtggcggtttgtgcctgtagttccagttactagggaggctgaggcaggaggatggcttgagcccaggaagttgaggctgtagtgagccatgattgcatcactgcagtccagtctagggtacagagtgagaccctgtctctacaaaaaaagttttttggctgggtgcggtggctcacgcctgtaatctcagccctttgggacgctgaggcgggtggatcacctgaggtcgggagttcgagaccagcctggccaacatggtgaaaccccatctctattaaaaatacaaaattagccaggcgtgatggcgcatacctgtaatcccagctacttgggaggctgaggcagcagaatcccttgaacccgggaagcggaggttgtagtgagtagagatcatgccactgcactccagcctggagtctaaaaaaaaaaaaaaattagctgggcatggtggcgcttgcctgtaatcccagctactaggggtgctgaggcaggaggattgcttgaacctgggaggtggaggttgcagtgagccaaaatcattccactgcactccagcatgggcaacagagtgagactccatttcaaaaaacaaaaaaaaataaattttttatttgaaatgaataagagtaaatttgtaagaataataaaagcaagtacatttgtcctgctcggaattatatccacagttcctgttactgagtgaatgaatatttcaaattcagtcagtaaaattcaccagtgaaaattattatatgaatgagtgaatgaatgaattgggcaaattttgagcacccagtgctgagcactagggacataaacatgaacaagacaaagtccctgctgtatgggggctgacgtgtgtgggtgagacagaggagaaagaaggtgaatggatggatgaatcaatgagaggatgaatgaatggatagatgggtggatgaatggatagatgaataaattaatgaatgcaagaatggatggatggatggattgatgaatggatagatgaataaattaatgatgcaagaatggatgaacggatggatggatggatggatagatgaataaattgatgaatgttagaatggatgaatggatggatgaatggaaagatgaataaatgaatgaatgcaagaagggatgaatgaatggatgaataaatggatggatgaatggataatggatagacgaacaaataaatgaatgcaaaaatggatgaagaaatggatgacgaatggaaggatggatcaatgaatcgatggaagatggattaatgaatggctaaatgagtggatgcgtggatggattaatgaatgcaagaatgaatggatggatggacgaatggatggatagatgaatgaaaggaaggatgaatgaatggatggaaggatggttgattggtttggggtctccacccgtcattactcctgggtggctagggaaagtgaaggggggcagcagacccatctgaagtcgcagtacctctcccggccccgcagccatcttcaagttggccgacagcgctgctcacctggccgcctcccctttaagacgcacacacctgggctctcacctgggcgcaggcgcttccgcaggaagaaggaagcggcgccgccatcgcctcccggcgctccctccccgactcctaagtccttcggccgccaccatgtccgcctcggctgtcttcattctggacgttaagggcaaggtgaggctgggcatgaggagttgggagacggacaggtgaggtctcgctcccagggattcaggggcgacccctcc

SEQ ID NO: 20717 - DNA, 2300 bp, Homo sapien
aagaagaaaacattcattcctcatcactaaggagaatcccatggtatgggtgaaacccaccatggtttgcttcaccaatgatctgttaatgggcatttgggctgctcctagtttttttgcccactacgaataaggatactataaggctatcatgaacatttatatgaatgtgtctgtgggtttttcttttcttcacttatactttttcttgggtatatacctagaagtgcaatttctagggtattaactttgcaagaaactgccagatcgttttccaactggttgtggcattttacattctcaccaacagtgtaggagagcccccatatgcttcccatcttcctcaacacttggttcgaccagtctttttaattttagctattcaggtgggtgtgcaatgatatctcatcgaggttttgatttacatttccctgatgacttcgtgctttattcttttttctttctttctttctttttttttttttttttgagacagggtctcactctgtcacccaggctggagtgcagtgatgttttcacccatttttctttctttttttttttctttttgagacagagtttcgctttttgcccagttctgttgcccagtttggagtgcaatagcgtcatctcagctcaccgcaacctccacctcctgggttcaagcgattctcctcctcagcctccagagtagctgggattacaggcatgtgccaccacaccaggctaattttttgtatttttagtaaagacagggattctccatgttggtcaggctggtctcgaactcccgacttcaagtgatccgcccgcctcggcctcccaaagtgctgggattacaggcgtgagcctccgcacccggcctgttttcacccattttttccacaataactgtcaaggctgcagggaacaccccttggttactacatcccatgcacacacacctgcagtggtttgtccagggtcagtgccagacaggaatcgcaccaggtgaacatgacttggatatactctttctgccaggaaacattctgcttcaaagtattcactcacctgattttatgttattaaactctaaaattcttaccaatctgatgaatgaaaatggcatcttttggtatgttcagtggtacacggtgatcaatatttacctatcaattatttatctatccatcttctattattatttttattttattttattttattttattttttgagacggagacggagtgtcgctctgtcgcccaggctggagtgcagtgacacggtctcggctcactgcaagctccgcctcccgggttcacgccattctcctgcctcagcctcccgagtagctgagattacaggtgcccgccaccactcccggctaatgttttgtatttttagtagagacggggtttcaccgtgttagccaggatggtctcgatctcctgaccatcttcccgcctcggcctcccaaagtgctgggattacaggcgtgagccactgcgcccggcctattattattattaattcttattattattttgagacagggttgcccaggcagtggcacaatcatagctcactgcagcctcaaactcttggactcaagtgatcctcctacctcaggctcccgagtagctgaattacaagtgtgcctcaccaagcccagctaattttttaaattttttgtacagatgagggtcttcctatgttgcccaggctggtctggaactatttggcccaagctatcctcccgcctcagcctccggagtggctgggattacaggcccgcgccaccacgcccagcctcaatatctccttgacgatgaaatgcatagatgaatgaatgaatgaatgacctctgtttgctcaccatgcacaccctcaagagggttacttgagagctaagactggaaacaaaggttggggccccacccctcccgggccaggccccgcccccggtccccgccctcgccctctcgaggctcccattggaggaggcgcgcgggggctggcccggcgggaggggcggggccggggcccggggcggggcgctgcagcccgcggagcctcccgcccgcccgggctggggtcgcgctggctcggactccgctccccgccccgccgcggccatggaggacgagcggaaaaacggagcctacggtaggagccgcctccggtcaggggccgcctctgctgacctgcgggtgggaggaccttgagccagggggacatctgagaccctaggcaccggcgctgcggctggatggccctccgcgctcgggcccccgcatccgacactgcgcggatcc

SEQ ID NO: 20718 - DNA, 2300 bp, Homo sapien
aaatgtatattcctgctgaggatacctccacaccacctgtataatgccatgttaaccaaataattggctgcactataaatatctataaatattcaagtagaggcaggttgtggcgtggtgactcgtgcctgcaatcccagcactttgggaggttgaggtgggaggattgcttaaggccaggagtttgagcccagcctgggtaacacagtgagatcctgtctctatttttattgtattgtatttttttttttttttgaggcggagtctcgctctgtcgcccaggctggagtacagtggcataatctcggctcactgcaacctctacctcccaggttcaaacgattctcctacttcagcctccccagtagctgggattacaggtgcccaccaccacacctggctaatttttgtatttttagtacagacagggttttgccttgttggccaggctggtcttgaactcctgacctcagtgatctgcccgcctcggcctcccacagtgctgggattacaggcatgaaccaccacacccggctaatttttgatttattgattgattgattttttgagacactcgctctgtcacccaggctggagtgcagtggcacgatctcggctcattgcaacctccgcctctcgggttgaagtgattctcctgcctcagcctcccaagtagctgggactacaggtgcacaccacaacatccagctaatttttgtatttttagtacagacggggtttcaccaagttggccaggatggtctcgatctcttgacctcatgatccgcccacctcggcctcccaaagtgctgggattataggtgttagccaccacacccagcctattttcttttttctttttctttttggagacagagtctcactctgtcccccaggttggagtgcagtgaggcaatcttggctcactgcaacctccacctcctgggtttaagcgattctcctgcctcagcttcccaagtagctgggattacaggcatgtgccaccacactggctaatgtttgtatttttagtagagaaggggtttcaccatgttggccaggctggcttagaaatcctgatcgacctgcctcagcctcccagagtgctgggattacaggcatgagccactgcacctggcctatgcctgctctttgaggtcagttttggtttcatactttagcctcattttgcagttgaggaaactgaggcttaaggaagataagccctttgttaagtatcctctagttcagagggtgcagaaggagcatttgaattcagggcgacccaggaggatgtgggctccacaagggtggagattgggtctctctggttcctcactgtatgcggtgccccgcccaaggcctgcacccactaagggctgaataaatacttgttctaagaccaggcccagtagtgcacgcaggtaatcccagcactttggggggccacggtgggaggagcccacgagtccaggagttaaagatgagcctgggcaacatagcaacatcccatctctacaaaaaaaattaaaaattagccgagtgcagtagagcacctgtagtcccagctactcaggaggcttagtcaggaggatggcttgaggcagggaggtcgagactgcgatgagctgtgattgcaccactgcactccagcctgggcaacagagggagatcctgtctcaaaaaaaaaaagcagcagacagaaagaaaactaatttcctgcacagcttggagaagttttcagcaccaacattccacagttggttgtctgggtttgggcagtaggccgttttccctcccagtgcctcagtttccacacctgcaaaacgaagccacggaaacgccctttcagggtggccaggggttctaggcggcatcgcccggtggcagggtgttcccagggtgaagccgcagggttcccgggtgggggcggggaaggctaaatgcggccggccggtgagtggcgggagcagctgcagccccgcccgcgccctcccgggtcccttagtctgggcagctgcccagctcgggccggtctgaccggtttgggccgccccgcctggcgctgtgctgggaggagccgccgccagtcgcgcggtcagtgcctccctccagactcgggagggtcgagggggcgcgggagagagcgcgggcggccgccggggctggtcgcctgcagggatgggggacgagcggccccactactacgggaaacacggtaggcagcgacccccgcccgtagccccgggccgacccctcggtccctcggagggggccttgagagaacatggggcgcaggg

SEQ ID NO: 20719 - DNA, 2300 bp, Homo sapien
cttatcccccgcagcctcgcagacgaccctccttactctcccctacccgaaggacctgcccctgtacccctctgcctggcactgctgccggcgcctccttccccctatcccacctcagatcttccccatctccacctggttccgtggtggtcaccatttcagccctcttcccagtgggtggccgccagttaataagtttgttcacagttagtgatccctccttcctcccctgtcctggcctgccagaactgggggcttgggtgtggtcacctggaggtgggtgaggcagaaaattccacaggtctctgaattttattcttgccaaggcaaagacacccctaggggcttttgggagggggctctcccagccctgtcttggttcaggtctccaatcccatccatcttaatcttcttgactttcaggaacgccacagaagtatgatcccactttcaaaggacccatttacaataggtaagagctctgggttttggggggttctccccgctaatactaccccaatccctgtctcttcacaccccctcccatctgttctccaacaaactggtgacaaatatttgaaacttttttttttttttgagatggagtcttgctctgtcaccaggctggagtgccgtggcgcgatctcaatctcggctcactgcaaccttcgcctcccgggttcgagcaattctcccacctcagtctcccaagtagctgggattacaggcttgcaccaccacacctggctaatttttttttttttttgtacttttagcagagatgtttcgctgtgttgcccatgctggtctcgacctcgtgagctcaaagcgatccacctgccttggcctcccaaagtgctgggattacaggtgtgagttaccacacctggcctggacttaatttttaccatgtttatatttatttatttatttatttatttttgagatggagtctcactctgtcacccaggctggagtggtgcaatctcagctcactgcaaccttcccctcctggttcaagcacgtcttctgtctcagcctctccagtagctgtgactactcagaggctactcagaaggctgaggcaggagaattgcttgaatctgggaggtggaggttgcagtaagctgagattgcgccactgcactccagcctggaggacaagagcgagactctgtctcaaaaaaaaataacaaaaaaataaaatacagccaggcacggtggctcacacctataatcccagcactttgggaggccaaggcaggtggatcacttgaggttaggagttcgagaccagcctggctaacatggtgaaaccctgtctctactaaaaatacaagaattagctgggcatggtggcgggcacctataatcccagctacttgggagactgaggcaggagaatcgcttgaacctgggaggtagaggttgcagtaagctgagatcgttccactgcactccagcctgggcgacagagtgagattccctctcaaaaaaaaaaaaaaagtctagcttgggcaacatagcgagaccttgtctctacagaatgtatataaattaaaaaaaaaatgtgtggtggtgtgcacctgtagtctcaactacttgggaagctgaggcaggaggatcacttgagcccaggagttcgaggctgtagtgagctatgatcatgccactgtactccagcctggatgacggagtgagactctgttgcacaaaattaaaaaatgaaatgaaataaaaattaaaatgcatgtgccctttggtacggcattcaaacgactcaggaaaatttgtccaaataacacatggatgagggtgtttgcagagggcagatgggcccatggtgcacacagcaccaagcctcctccaaacactgcccctctgctccccaggggctgcacggatatcatatgctgtgtgttcctgctcctggccattgtgggctacgtggctgtaggcatcataggtgagtagagaatgagcaggacttggagttgcagggtaggcggaggcagccatggcctctggagtgggaacagggctggatctgaggagtggcagtgtctcagtatccctggatctttccacagcctggactcatggagaccctcgaaaggtgatctaccccactgacagccggggcgagttctgcgggcagaagggcacaaaaaacgagtgagttgactccttgcggcctggtggggctggggaagagggggcagaagattctaggcattccccatctctctaagtccagttaacaagtgcttataggctgggcgcggtgactcacgcccgaa

SEQ ID NO: 20720 - DNA, 2300 bp, Homo sapien
gtcaggctggtctcgacctcctggcctcaggagatctgcccgcttcagcctcccaaagtgctaggattacaggcaggagccaccgcgcccggactgcttcaatttatttctctataaaatgagggtaattcatatttctagttggcaaactaaatgacaaggaggtaatgagcagataaaatatgggtaggggcctgtttagttcaggcctgtggaatccagaggcacaatatcgtgctcaacaaaacagtgcttcatattttggatttttgttgtttttgagttgttgttttgttgttgttgttgagacggagtcttgctttgtcacccaggctggcgtgcagtggtgcagtctcggctcactgcaatctctgcctcccgggttcaagcaattttcctacctcgcctcccgagtatctgggattacaggcgcacaccaccatgcccggctaattttttttgtatttttagtagagatggggttttaccatattggccaggctggtctcgacttcctcgtgatctgcctgcctcgacctcccaaagtgctgggattacagacgtgagccaccgcgcccagccttgatttgttttttgagacagagtctcactctgtcacccaggctggagttcagtggcacaatcacagctcactgcagccttgacctcctgggctcaagtgatcctcccgtcttggcctcccaagtagctgaaaccacaggcaagcaccatcatgcctggctaaatttttaatatttttgtagagacaggttctccctatgtggcccaggctagtcttgaactcctgagcttgagcagtcctcccgccttggcctccctaagtgttgggattacaggcgcaagccactgtgcctggcccatattttgattattccttgaactttcctggaagaaaaatgcttggcaatccaatttgaggacactcatagtaaaatattcatattaatagtggtttctagctgggtgcggtggcgcacgcctgtaatcccagcaatttgggagacagaggtgggcggatcacctgaggttgggagttcgagaccagcctgaccaacatgtagaaaccccatctctatttttttttttttttgagacagagtctctcactgtcgcccaggctggagtgcagtggcgcgatctcagctcactgcaacctccgcctcccgggttcaagcaattctcctacctcagtctcctgagtagctgagattactggcgcccaccaccacgcccagctaattttttttttttttttttttttttgtatttttagtagacacggggtttcaccatgttggtcaggctggtctcgaactcctgacctcgtgatccacccgtcttggcctcccaaagtgctgggattacaggcgtgagccaccgcgcccggccaaccccatctctattaaaaatacaaaattagccgggcatggtggcgcatgcctgtaatcccagctgctcgggaagctgaggcaggagaatcgcttgaacccgtgaagtggaggttgcggtgagccgagattgtgccattgaactccagcctgggcaacaagagtgaaactccgtctcaaaaaaaaaaaaaaagagagagaacttagaccatggcagcatatgattatgattccaagtagggggaaagggttctggaagttctcttctgaaggtgacacttgagcagagacctaaggatgtgtgggatccagccatggggagagaatgcaccgggcggtgggaactgcaagtgtaaagtccctgaggcagaagcctcgatgtttgcttctgttaaatgggggcagttgtagctgctttgcaaagttgcaggaggcactgctggactgagcttgtggttcccccatgcaggaatatttcactgctacatggagtactcccgactgcgtggtgaggccggctctgatgtctctttggtggacctcggctttcagacggatttccgggtgtacctgcacttacggcagacctggttggcctttagtgagtcacagtctcccattcctgcccccacatgaggccttggagggagtggggagcccagccggctcagcctttgccctttgcagtgatcattctgagtatccttgaagtcattatcatcttgctgctcatctttctccggaagagaattctcatcgcgattgcactcatcaaagaagccagcaggtggggggccagggtgccaggggccaggatggagctgtccctagagttgtgtcttttgccctgacgcctgtgtctctgctcttccctagggctgtgggatacgt

SEQ ID NO: 20721 - DNA, 2300 bp, Homo sapien
gccttggcctccctaagtgttgggattacaggcgcaagccactgtgcctggcccatattttgattattccttgaactttcctggaagaaaaatgcttggcaatccaatttgaggacactcatagtaaaatattcatattaatagtggtttctagctgggtgcggtggcgcacgcctgtaatcccagcaatttgggagacagaggtgggcggatcacctgaggttgggagttcgagaccagcctgaccaacatgtagaaaccccatctctatttttttttttttttgagacagagtctctcactgtcgcccaggctggagtgcagtggcgcgatctcagctcactgcaacctccgcctcccgggttcaagcaattctcctacctcagtctcctgagtagctgagattactggcgcccaccaccacgcccagctaattttttttttttttttttttttttgtatttttagtagacacggggtttcaccatgttggtcaggctggtctcgaactcctgacctcgtgatccacccgtcttggcctcccaaagtgctgggattacaggcgtgagccaccgcgcccggccaaccccatctctattaaaaatacaaaattagccgggcatggtggcgcatgcctgtaatcccagctgctcgggaagctgaggcaggagaatcgcttgaacccgtgaagtggaggttgcggtgagccgagattgtgccattgaactccagcctgggcaacaagagtgaaactccgtctcaaaaaaaaaaaaaaagagagagaacttagaccatggcagcatatgattatgattccaagtagggggaaagggttctggaagttctcttctgaaggtgacacttgagcagagacctaaggatgtgtgggatccagccatggggagagaatgcaccgggcggtgggaactgcaagtgtaaagtccctgaggcagaagcctcgatgtttgcttctgttaaatgggggcagttgtagctgctttgcaaagttgcaggaggcactgctggactgagcttgtggttcccccatgcaggaatatttcactgctacatggagtactcccgactgcgtggtgaggccggctctgatgtctctttggtggacctcggctttcagacggatttccgggtgtacctgcacttacggcagacctggttggcctttagtgagtcacagtctcccattcctgcccccacatgaggccttggagggagtggggagcccagccggctcagcctttgccctttgcagtgatcattctgagtatccttgaagtcattatcatcttgctgctcatctttctccggaagagaattctcatcgcgattgcactcatcaaagaagccagcaggtggggggccagggtgccaggggccaggatggagctgtccctagagttgtgtcttttgccctgacgcctgtgtctctgctcttccctagggctgtgggatacgtcatgtgctccttgctctacccactggtcaccttcttcttgctgtgcctctgcatcgcctactgggccagcactgctgtgtatctgcccccagacactgatctctgaccccagggatggctaaagaccaactttgcctagaagtgacctgcagcttagggatagggctggaaactggtgggagaatggattctttcccacaaaagtccctggggtcctcagtcctagacctctgcttccttaacgaacctccagcttcctgtccacttccaacgaagcggtctataagatctttgatgacagcccctgcccatttactgcgaaaacctgcaacccagaggtgggcgtccccggggtggggagggcaggtattgccccagcaggccccagatgatttgaaacctctcatgtccacttggaggttcagcaaacaattggcccctgttgcatgtcctgtgctaggtgtgggggaggacgcacagtggggaagagactctctaactggatcgaacaacttcccagggcaagctggcttcctctcttcaacttgaccaggccttcaccctgggtgctaaatcacccatttttccctacttcctttttttttttttttttttttaataagacagagtcttgctctgtcaccaggctggagtgcagtggcatgatctcagctcactgcaacttccaactccctggttcaagcgattctcctgcctcagcctcccgagtagctgggattataggcacacaccagcacaccaggctaatttttgtatttttagtaaagacagggtttcaccatgttagccaggatggtctcgatct

SEQ ID NO: 20722 - DNA, 2300 bp, Homo sapien
ggaggctgtctggagcccattcctttggcctcgacttttcagtgttataactgtccttgaagtaagctggctaagcagaggaaaacttgttcttgttttctttttaacccttaccccctgccacataatcacatctttacacttcttttttttttttttttttttttttaagatgggaagtcggagtctcgctctgtcgcccaggctggagtgcagtggtgccatctcggctcattgtaacctctgcctcccaggttcaagtgattcaagccattcttgtgcctctgcctcctgagtagctgggattataggcgcacaccaccacacctggcgaatttttttttttttttttttttgaggctgagtctcactctatcgcccaggctggagtgcaatggagcaatctcggctcactgcaacctccgcctcctgggttcaagcgatcctcctgtctcagcttcctgattagctgggattacaggcgccctccaccacacccagttaatttttctatttttagtggagacggtgtttcaccatgttggccaggctggtctcaaactcctgacctcaagtgatccgcccacctcagcttcccaaagtgctgggattacaagcgtgagccaccacgcccagccaggaaacccattttcaacacctccttgctcttttttttttctgagacagagtctcgctctgtcgcccagactggagtgcagtggcgcaatctcggctcactgcaacctccgcctgccaggtcaaacaattctcctgcctcagcctcccaagtaggtgggactacaggcatgtgccaccacacccggctaattttcttttgtatttttagtagagacggggtttcaccatgctggccaggctggtctcgaactcctgacctcgtgatccgcccgcctcggcctcccaaagtgctgggattacaaacgtgagccaccgcgcctggccttccttgctcttcttgctccaaatcctgggaacgtctgaatcaacaggcggacatctgtcaaaccttcctagcaactacgcctgcggatggccaacctgaccctggaagacagtggggtttagttaagcacagattgtacatcgggggcctcataaggcgcctggaagcattcaagaacaccacgcttgtaaggacaaagcactcggtcacgggcgcctttacttcggagctccgcgctgctgctggacgagcgtccgttgagtcccagccccaatttttccaggaaatggcggtgagccctctagtgagatattttttggcctgggcctcagtttctccatctgtcaatgggggaaggggaaggcgggctagaggaccccgaccaggtcggctgcagccttcggaagctacggcccagggacgccacaccaaggcaggtctgcgggacgaaagaacccaagaacccgggcgcgcattggcgccggtcccgggctcaaggggcagcaacgaggagacgctggacctggccgttcctcgcacacatctctaaccttctgtgcctctcaagggagatggggtgagcatagccacctccactggagcccgaaaatccccggccgagataccgccactaaaaaggtacacatgcgtcaaagcctctcggagccatttccgctaacgtactcagggcgacgggcgtaagatggcggccgcgcaggcgcaaaatgtcgcagccgtagggaggctccgcctctgacgcttgccttgcatcacgtggtaatggccgctcaaaaaacgccttagcgaaaaccagagcgtgccctcgtcacgtgatggaggactcccagtacggcaaagggaaggcgccaaaagttgtcagatggcgaaggaaaccgcgaaattcgccattgtcacatgatggagcaacctatcgaaagcggagggaaaggtgccgaagtcacgtgactacgcacgcaaacactcccgcttgcaccacgtgcaactcacgcccaccccctcagccccccccttatctcttttcgcccctccctcccatttgggttgggcctgcgtcgaggcgcaacgcggcgtcaaagggggcggggcttcagccggtcacgtgttcccgcacctccccggcgcgcgcctgcccgcccgcccgctcgcccccggtccggactcctcctcctcctcttctcgccattgcagttggacccagcagcccggcgcgcaccgcgtggcttttgggggcagaccccggcgggctgtggcaggagggcggcggcggcggctgcggtcgaagaaggggacgccgacaaggtaagcgtcaatgtgg

SEQ ID NO: 20723 - DNA, 2300 bp, Homo sapien
gggccccagcaccacggaacagggagaggagcacctgccaatgtcctgcggcctcctcctgctttccagctgtgaatgaggccctggttcccacacttcattcacagtctgggcggctactgtaactacatcccacgagaccacacacaaagcatcacgcacaagggacagtggcagcactctgagcaatccatggagattcccatccacaaatacctgaggaaaagagagcttaaagtcctaaatttgaatcctaacttcggatggcacctcgcgattccatgtggaccacaaatatgccatcacaccactcattttaaagagagcaaaatcttgaaaaagattcagcagcagtgaattaccggagtccagaaaaagaaaccactgaaaccgacgcttcgttgctgatccatgtcacctaagcagcaactggcaaacaatgttggaaatgtggagaagagatccctcattctcctcaaatttggccactgaactgggggaggagcatgcagaccgccgtacaccccaaataattcatccaggcggtgaattaactggggcagaacctcatgagtaacctcgagaatctcaatcgttcaactacttgagaaaataaaggtagaaatgggttttaagcatccacgtttcggggcccaggcttgcacccaagtagattgccggtctagagaaggcaaatactaacaatctggaaaaacattcaacaatgaaaacaaactaactaaagaaaaagctgaaaccctctcaagttttgaccctgatctgagagaggcctggctgaccagagatttggaaacccgacgaacccacaaaggcttcctcagcaatccgcgtgggaaggggcttccaaggagggggtccgcctctccgcgacctgtgaggacaaaggaggcgacttttcccgcctcgggaacctgggactctcctggaatcgggggcgggaccgggacaaagaggaggagggggtagggaaggagtgaggaaggggggtcgccccgccgcggaactcgggacccgagggggtgtgtgctccaagcacgtgcgcgcgtccccaggacccccgcaacagacaaaagcccagccgcggggaggcggcagccgggggcccggtgcgcgcgcacccccccgcgcgtggcgccgccgccggccgaggggccgcgtgcgggggggagcggctgcgcgcgcaccgagtcctcgccgccgccgcagccgccattttgtttcctccgcacaatggaagagagttaacggccgagcgcgggagcgaggccggcaagggaggaacgggccaggcgccgggatgagggaaccgggcggaggcggcgagcgtgggatccctccagccttgtcaccgcgaaccctcagtggggatctcactgagggcgggcggggggaggggcagaggcgggagcgggcccggccgccgccacattgacgcttaccttgtcggcgtccccttcttcgaccgcagccgccgccgccgccctcctgccacagcccgccggggtctgcccccaaaagccacgcggtgcgcgccgggctgctgggtccaactgcaatggcgagaagaggaggaggaggagtccggaccgggggcgagcgggcgggcgggcaggcgcgcgccggggaggtgcgggaacacgtgaccggctgaagccccgccccctttgacgccgcgttgcgcctcgacgcaggcccaacccaaatgggagggaggggcgaaaagagataaggggggggctgagggggtgggcgtgagttgcacgtggtgcaagcgggagtgtttgcgtgcgtagtcacgtgacttcggcacctttccctccgctttcgataggttgctccatcatgtgacaatggcgaatttcgcggtttccttcgccatctgacaacttttggcgccttccctttgccgtactgggagtcctccatcacgtgacgagggcacgctctggttttcgctaaggcgttttttgagcggccattaccacgtgatgcaaggcaagcgtcagaggcggagcctccctacggctgcgacattttgcgcctgcgcggccgccatcttacgcccgtcgccctgagtacgttagcggaaatggctccgagaggctttgacgcatgtgtacctttttagtggcggtatctcggccggggattttcgggctccagtggaggtggctatgctcaccccatctcccttgagaggcacagaaggttagagatgtgtgcgaggaacggccaggtccagcgtctcctcgttgctgccccttgagcccgggaccggc

SEQ ID NO: 20724 - DNA, 2300 bp, Homo sapien
tacaaaaaattagctgggcgtggtggcaggcgcctgtagtcccagctactcaggaggctgaggcaggaaaatggcgtggacctggcaggcagagctttcagtgagcagagattgtgccactgcactccagcctgggaagcagagcaagactccatctcaaaaataaaaaaaaaattagccgggtgtggcagcaggcacctgtaatcccggttgcttgggaggctgacgtaggagaatcgcttgaacctgagaggcggaggttgcagtgagctgagactgtgccactacactccagcctgggcaacagagtgagattctgtctcaaaaaaaaaaaagaagaaaagaaaagaaagaaaagaaatagaaaagaaaggatgagtgttgtagacaaaggcaggtgcaaaggccctgaggttggcttgctggtgggcaggggtgttttccaggcgggttttccgggtgtggccttactaaggatgccccaccatctgggcaaccggcatccttagcctttcttacaggatagggggcttgaggctcccttagacaccctcttggccagagtagctcagtttaagacaattgaaaggacatcttctgggacaatagcgctctctgctggccaggacagatatcagatccagttgtaatgataacaattactatataatattgtatattattattatctttttttttagggtttcggtctcactctgttgcccagcctggtgtacagtagcccaatcatagctcactgcagcctccaactcttcagctcaagtgatcctcctgcctcagcttcttgagtagctgagactacaggggcgtgccaccacaccatgttaatgtttttgttttgattttgtttttgtttttgttttttagatgaagtctcgctttgtcgcccaggctggagtgcagtggcgcaatcgtggctcgacctccgcctcccgggttcaagcgattctcctgcctcagcctcccgaatagctgggactacaggcacgcacccccacgcccggctaatttttgtatttttttagtagagacggggtttcaccatactggccaggctggtcttgaactcctgacatcgtgatccgcccgccttggcctcccaaagtgctgggattacaggcgtgagccaccgtgcctggctcacaacctgttaattttttaatttttaaaacttttttttctttttgacacagagttttgctcctgttacccaggctggggtgcaatggcacgatctcggctcactgcaaactccgcctcccaggttcaagcaattatcctgcctcagccttcggagtagctgggattacaggcatgcaccaccatgcctggctaattttgtatttttagtagagacggggtttctccacattggtcaggctggtctcgaactcccaacatcaggtcatccgcccgcctcagcctctcaaagcgctgggattacaggcgtgagccaccgcacccagccacaccagcttaattttttttttttttttttttttgagatggagtctcgctctgtcacccaggctggagtgcagtggcacgatctcggctcactgcaagctctgcctcccaggttcacgccattctcctgcctcggcctccggagtagctgggactacaggtgcctgccactgcgcccggctaattttttgtatttttagtagagacggggtttcactgtgttagccaggatggtctccatcccatgacctcgtgatcctccctcctcggcctcccaaagtgctgggattacaggcgtgagccaccacccccggccctttattcaatctttacaaagtctttatgccgagatgctgtaattcgccacattttatccaagagaaaattatggctaagagagtctctgattgtagctcgaaagtgctagggatgggattcgttcccagttcaattctgattcttcgctttagcgtgttgtgggtaggagttaaatgggcccccagccaggaccaggggttcaaatccgttgccatggtcccccgacgctttcccgggctccagaacggatcgcgtggtcacgtgacagcggccaacatggcgccgcccactgtgtggtacggcccacgtggttccgacagtcaagatggcgggagcagctacccaggcttccctggagtcggccccacggatcatgcggctggtggccgaatgcagccgctccagggcccgggcaggcgagctgtggctgccgcatgggacagtggccactcctgtgttcatgccagtgggcacgcaggccaccatgaagggca

SEQ ID NO: 20725 - DNA, 2300 bp, Homo sapien
atttttagtagggacagggtttcaccatgttggctaggctggtcttgaactcctgacctcgtgatccacccccaccttggcctccagagtgctgggattacaggcttgagccactgcacctggccaacacctgcgttcttgatggcatggcctcttcgggttgaactgggcagctggggcacaagataagcctggacttggaggccagacccaggtttgaatccagcctttggcatatgtagccttggactagtggtttaagctctgcaagcctcaatttcctcttgtttcaggcaagttgaacaatagcacaattctgcagccccttctgtgtcatccaggtcctcagagcgaaagtctaaaatccagaacattggccgggtaccatagctcacacctgaatcccagcactttaggaggccaaggcaagaggattgcttgagaccagtctgggtgacatagtgagatcccatctctaaaaaaagagaattgggccaggcacgctggctcacgcctgtaatcccagtactttgtgaggccaaggcgggcagatcacgtggtcaggagttcgagaccagcctggccaacatggtaaaaccccgtttctactaaaaatacaaaaattaggccgggcgtggtggctcgcgcctgtaatcccagcactttgggaggctgaggcgggcaaatcattgaggtcgggagatcgagaccaacctggctaacacggtgaaaccccatctctactaaaaaatagaaaaaattagctgggcgtggtggcgggcgcctgtagtctcagctactcgggaggccgaggcaggagaatggcgtgaacctgggagacagagcttgcagtgagccgagattgtgccactgcactccagcctgggcaacaaagtgagactccatctcaaaaaaaaaaaaattagccaggcatggtggtgggcacctgtaatcttagctactcgggaggctgaggcaggagaatcatttgaacccgggaggtggaggttacagtgagctgagatcacaccactgcactccagcctgggcgacagagcaagaatctgtctcaaaaaaaaagaaaaaaagaaaattagcacgcaagcatgggagtgtgtgcctgtgatcctagatacttgggaggctgaggtgggaggatcgcttgagcccaggggttggtggctgcagtgagctatgatgacatcactgtactgcagtctgggtaacacagtgagaccctgtctcaaaaaaaaagaagaaaagaaaagagaaaaaacttagaatgccctgaaaaatttgcaactcatttcatggctaacttagatctctcattttttatcccagttgttacaagtattcacatatttttatttttatttattttttatttttttgagatggagttttgctcttgttgtccaggctggagtgcagtggcaccatctcggctcactgcaacctctgccttctggtttcaagcgattctcctgcttcagcctcccgagtagctgggattacaggcaccagccaccacgcctggccaatttttgtatttttagtagggatggggtttcaccatgttggccaggctggtctcgaactcctgacctcgtgatccacctgccttggcctcccaaagtgctgggattacaggcgtgagccatgtgcccagcctatttttattttttaaattttactttggccgggcgtggtggctcatgcctgtaatcctggcactttgggaggctgcagtgggcggattacctgaggtcaggagttcaagaccagcctgcccaacatggcggaaccctgtctctattaaaaatacaaaaaattagccgggcatggtggtgggcgactgtagtcccagctactcggggggctgaggcaggagaatcacttgaacccgggaggcgagggttgcagtgagccaagatggtgccattgcactccagcctggatgacaagagcaaaactccatctcaaaaaaaaaaaaaaaaaaattaagttctgggatacatgtgcagaacgtgcaagtttgttacacagctatgaatgtgccatggtggtttctgcacacatcagcccgtcatctaggttttaagccccgcatgcgttatgtatttgtcctaatgctctcactcccctttcctccaccaagtcttaacatattttgttgtacaaatattacagtgtttgatgacaggctattgggtgttttgttgttgttgttgtttcgttttgttttgtgagacggagtctcgctctgtcgcccaggctggagtgcagtcatctgatct

SEQ ID NO: 20726 - DNA, 2300 bp, Homo sapien
ctcaacgtttttgtttgtttgtttatttgtttttgagacggggttttgctcttgttgcccaggctggagtgcagcggtgcgatctcagctcaccgcaacttctgcgtcccgtgttcaagcgattctcctgcctcagcctctcgagtagctgggattacaggcacgcaccaccacgcctggctaattttttgtatttttagtagaaacgtggtttcactatgttagccaagctggtttcgaacctctaacctcaggtgatctgccctccttggcctcccaaagtgctgggattacaggcatgagccaccgcacctggcgctttttgcctatttctttgagacctggggttttgggtcacaaaacaggcaaatgccatgagccaccctcctcctctttctccatcttcttgtgctgcctcaggtcagagcacttacctgctcctgccttctcactgggtttccttgtctctggcctatttgtctccagaggggtcaaaacacttcaaatcctcctatttgtctctgtccactgtcaggagttccagttcccagaaccccaattttgcctacaaaatagcgtgtcttttcacggggagaggatttgttgagttttagtgggtactcaaaaagatctaaagccagttgggggggttcacacatgtaatcccagcacttttgggaggccggcctgtgagggtcgtttgggcgcaggagtttgagaccagcctggacaacacagcaagaccctgtctctataaaaaataaaataaaaataattagctgggcatagttgcgcacgtctgtggttccagctactcgggacgctgaggcgggaggatcgtttgagcccaggtgcttgttgaattgagctatgagtgcactactgcaccccagcctgggcaacagagtaaggacccagtttctaagaaaagaagattcattagctagacgcggtggctcacacctgtaattccaacactttgggaggccaagacgggcggatcacttgaggccaggcgttcgagaccagcctggccaatatggtgaaaccccgtctactaaaaatacaaaattagctgggcgtggtggctcacacttgtaatcccagctattcgggaggctgaggcaggagaattggttgaaccggggaggcggaggttgcagtgagccaagatcgcgctactgcactccagcctgggtgacagagtgagtaccccgcctcaaaaaaaagaaaagaaaaaagattcatgatctgctaaagttgaagaagtgggggaaaacattggagtgttagcggcgtcaagatcgggcgtgagcagaaagggcacagcatttgcaaaggcgtggaggagtgattttattgcgttctatccctaggaagcaatgacttggcctctaccatttgcagagcgcattgggaccctgctcccagagctggtttgcagtctgggaactgagatgcgctctgggacttgtagttttccccagtgccaggaaactcaaaaatcgagacatcggatcccaccacgaggtgtcgcccttgagcgagtacggtgggatctatcctatacttcagaaggctgttgcagacatccaacaatcacaaggaagaacgggagtttttctgattgacagatatggttctcaatgatagtcaagattcggatgttaaagcccgccctcttttgcctggttggctggagcaacgaagtgatatttatatgaaccaatgggaaattcttagggaacgaggtagtagctcaatccccaacaccattggtccacattgtctactggcacgtctgcctgccaataagatggtggaacttcgccaatgggcagagccaacgtgcctttttcggaaacacccccttcctctcttgacaacttgctttctgccgctattggctgttgcacaacagtgacggttcttttgtccaataagtcagcaagacggtccccagggggaaggtttactcaaccataggcccgtgcctagtttttattggctagtgtatccgagtggcggtgcagcaggccagtcgcgtgcggcgcgagtgctttgggcgcagcccccggggccggggcgggaggtcgctcgggtcgggtgtcgcctgagaaccggatgaggcggcgaccgtgaggccgagccgggagcgggcgtcttgccgaggcccgggcgggcggggagcaacggctacagacgccgcggggccaggtcgttgagggtcggcggcgggcgaggagcgcagggcgctcgggccgggggccgccggcgccatgggcaaccgcgggatggaa

SEQ ID NO: 20727 - DNA, 2300 bp, Homo sapien
gccagcagtgaaaagtccagctggcctccagggagcctggagggggctcagcctccttccacgtggggtgcttcccagagcagcagcgccccttcctctccatttgctcatgacttaagtgccctagtatcctgtcacagaccaagggaaggccagcgtagctccctgcctttctaggcagcccacatagacgggggtcgatggccagggctgcagggcagggacccttggtcacggaggtctttgggttaccccacttgctccatgccatagatgtgaggttccttcatgcctcttttctagctcgccagacactttgtatttattttttatttttttgatgattttttttttttttttttttttgagacagagcctcactctgttgcccgggctggagtgcagtggcatgatctcagctcactccagcctccacctcccaggttcaagtgattctcatgcctcagcctcccaagtagctgggattacaggcgtgcgccaccacactcaactaacttttgtatttttagcagagacagggtttcaccatgttggccaggcttgtctcctaatctcaggtgatctgcccgccttagcctcccaaagtgctgggattacaggcgtgagccactgtacccatcccggccttcccctcaaccccagatggagtctcgctctgttgcccaggctggagtacagtggcacaatctcggctcactgtaagctccgtctcccgggttcacaccattctcctgcctcagcctcccgagtagctgggactataggcacccatcaccacacccggctaattttttttttttttttgtatttttagtagagacggggtttcaccgtgttagctgggatggtcttgatctcttgacctcatgatctgcctgccttggcctcccaaagtgctggaattacagtgtgagccactgcccccggcccatgcccagcctttttgatttttcagacaaggtcttactctgttgtccagaatggattgcagtgacacaaacacggctcattgcatcctcagcctcctgtactcaagcgatccttttgccttagcctcctgagtagctgggactacaggtgtgtgctgccacacctagctaatttttaaaactttttttatcttttgtagagagaaggtctcaccatattgcctgggctggtctcaaacgcctatcctctagtgatctgtctcaacctccccaagtgctaggattacaggcgtgagccactgcacccagctttctctgttgtaggacagatggccaaactctgctttacactttgcaagtataggctgattttatggctttgtttttctttttctttttttttgagacagagtcttgctctgtcacccaggctggagtgccattgtgtgatctcggcccactgcaacctccacctcccgagttctttctcagcctcccaagtagctgagactacaggcacccaccaccacaccgagataatttttgtattttttggtagaaacagggtttcattgtgttggccaggctggtctcgatctcttgatcttaagtgatccttctgcctcagtctcccaaagtgctgggattgcaggtgtgtaccaccatgcctggcccacatttgtctattttgaatcttccttgcttttctctgtagatgcagatgcagccggggagctcatcttgagtgcattctccaccttttcaggggcgatctttccatcttagtttgtagggcctgtccccatgtgtgttcattggcccccgtttccgtggtctggatggactgtccttgcaagctgttgcttgtcctccaaggcgtggataggcccagtgcctgatgtcggccccgtgggctgtttgtagcctcttacactcatgggcagctccgtgccgtctccgttcccagacatgagtgtgtctgtggcttgatttatctgttgctgtctctcaaggctgtgtggtgtggtggccgcatagtggcaccctggtgttggcccttggttggggggagtgtgtctgccactccctggtatcctgcccatgccaccctttctgatctctgacctctctcctgcagcaactgaccaaccacatccgggagtcgctgccggccctacgtagcaaactacagagccagctgctgtccctggagaaggaggtggaggagtacaagaactttcggcccgacgaccccacccgcaaaaccaaagccctgctgcagtatgtaccccggcacccaccaccaccaccaccctggcccctgccttccatcagccacagggcccccta

SEQ ID NO: 20728 - DNA, 2300 bp, Homo sapien
aggctgggaggtggcgggaacctatggaagccacctgaattgtggggaagtggctacctttccttcccagcatcctgtaaatcaagttgagcttcagggcagaggtgctgagctttgacccctgaacttcactcctgtcttctgcaaagtgggaggaataagtgggccttctcagatcgaatgggtgaataatcggaacaggcttagcttgagcctgactcgtagccagcatttgccattgggagctcttgaatttggtttatttgtcttaatatagacagaagacattttgctgctgaaaaatggtaaaagaacagtaaaccctggcttgacttggaacatcattccagagtagtgtggaaacctccgttttgatgcttgctttttccttttcctcataggatggtccagcagtttggggtggattttgagaagaggatcgagggctcaggagatcaggtggacactctggagctctccgggggcgcccgaatcaatcgcatcttccacgagcggttcccatttgagctggtgaaggtagtgccccccggggctgggccctcccgtctctggtcaggcaccctcctgctggcctcaagccaggcctcctcccaggcaataaggtctcaagctcctacctctaggcctgaacttgtggtgggcagggtgtggcctggatgaggtgtccccatgggcttccttttctgacactcagctttgaggttttgggcagaacaatatgaaaacccctgtgtttttcctctgacaaaagccaatatacattctttgcaaaatacatagaaaatacagataaatttacatgagaagatgtccctagcatgtcattgaagaaggaaaaaataggcattggagccagcatgtgcaacatagcactgagctgatatatacaacatccttatgtatgaaactgaacatggatgtctgtctacaagtgtttctttgtatttgcaaggatgtttgcaaaaatgtcagccctgggtgctaggatttgggacttctttttccgtgtgtgtgtgtgtgtgtgtgtgtgtgtgtgtgtgatttgcttgaagttttatactgtttacaatgagcacatagcattttttattaaaaaaacaaacagttttttaaaatcagaggagcaagaccaaatgcagtggctcacgcctataatccgtgggaggccaagggggcctgatcacttgagcccaggagttcaagaccagcctgggcaacatggtgaaaccccatctctactaaaaatacaaaaattatccaggtgtggtggcatgtgcctgtagtcctagctacttgggaagctgaggtaggagaatcacttgagcccaggaggcagaggatgcagcaatgagccaagatggcaccaccgcactccagcctcagtgacagagccagaccctatctcaaaaaaaaacaaaaaaaacaaaaagaaagaaaaaagaaaaagctgggtgtggtggtgcatactgatagtctgaaaaatctaagtttacatgaatttatattcccaccaatatgatgagagagttggtgtcatgtcatgctttctgaaactgggttttaattaattaatttgtttgtttatttttattttttttgagacagggtcttgctctttcacccaggctggagtgcagtggtgcaatcacagctcactgcagcttcgaccttcctgggctcggatgatcctcccacctcagcctcccgagtagctgggactataggcgtgcaccagcccacctggccaatttttgtatttttagtagagatggggtctcactatgttgcccaggctggtctcaaactcctgggctcaagccatctgcctgccttggcctcccaaagtgctgagattacaggtgtgagccactgtatctggccagttttcaattttttaaataaaattttgacgagttaaatattctgccttgtgaatatagccacacgtgggagagaacgttccccagatgcacgcctgccacgggggcgccccgggtgcctccatgcatgtgcttggtttgtctcttctcagatggagtttgacgagaaggacttacgacgggagatcagctatgccattaagaacatccatggagtcaggcaagttccacgaggagagtcaccactgttccttcctctccgtggtgcgaccccccagctaattgggtcacccacacctctgagtccctaatcgttaggccttaagagggctcttggatggttttctgtagctgcgagcccctccctgagggtctccaagggcacatgagggtggatgt

SEQ ID NO: 20729 - DNA, 2300 bp, Homo sapien
aggaggccaaggtgggagggtcacttgagcccagcagttcatgaccatccggggcaatacaatgagacctcatcttaaaaattaataataggctgggcacgatagctcacacctgtaattctagcatgttaggaggctgaggcgggcggattgcctgagctcaggagtttgagaccagcctggctaacatggcaaaaaccccatctctactaaaaatacaaaaaattaaccaggcgtggtggcacgcgcctgtaatcccagctactcaggaggctgaggcaggaggattgcttgaaccttggaggcggaggttgcagtgagccaagattgcgccaccgcactccagtgtgggtgacagggccagactctgtctccaaaaataataataataaagatataaataagaatttttcccttgagcgggggtctgtgacctctttgagctttccaacacagccccagggattgggagcccctaggtgagagccgctggaaactacattgtcactagcagctcaggggagcttgggatagttgaagccccacacctggagaagccctgagccacaaagggttgtaccttgacatcttaacccagctagaggccttgtgaaatatgaacggctgtatcaatgcctgccttcagtaccttattattattattattattttgacacagagtctcgcattgtcacctgggctgcagtgcagtggcgcaatcttggctcactgcaacctctgcctcccaggttcaagcgattctcctggttcagcctcctcagtagctgggattacaggtgctcaccacaacaccaggctaatttttttttatttttttcttgagatggagccttgctctgtgtcccagctggagtgcagtggcacgatttcagctcactgcaacctccacctcccgggttcaagcaattctctgcctcagcctcctgagtagctgggattacaggcgcccgccagcacgcccagctaatttttttgtatttttagtagagagggggtttcaccatcttggccaggctggtctcaaactcctgacctggtgatccacccgcctcggcctcccaaagtgctggaattacaagcgtgagccatcacgtccagcctttttttttttttttttttttttttttgagacagagtctcactctgccaccaaggctggagtgcagtggcgcggtctcagctcaccacaacctccgcctcctagcttcgtgtgattctcctgcctcagccttctgagtagcgacgattacaggagcctgccaccacccctgactaatttctgtatttttagtagagacagggtttcaccatgttggccaggctggtctcgaactcctgaccccaggtgatccacccgcctcgcccggacaaagtgctgggattatcatgccagcctttatcattaatttttaagaaaacctggacgggcacggtggctcacacctgtagtcctagcactttgggaggccgaggcgggcggatcacctgaggtcaagagttagagaacagcctggccaacatggtgaaaccccgtctctactaaaatacaaaaaattagcctggcatgatggtgggtgcctataattccacctactcgggaggttgagacaggagaatcacttgaacccaggagatggtggttgtggtgagccaggatcacaccactgcactctggcctgggcggctgagcgagactccatatcaggaaaaaaaaaaagaaagaaagaaaaggaaaccataatcttcgcaaaatttctgcctatgtccctcccttctccccattgggcaggggtgggggcggggactccaccatgtaccttgcacgatcatagagcctactggaaggaagaacgtaaccattgcatgatttatttttgcgcttgccgtaggtaatacatatgttgttgcttttttgtttcttgagataataatgaattaaatattaacaccatgaatatgattaatagcatgtaattttttttcttttgctgttttttcccctgctcttctcttctcctgtttttgtgcttttcctgctttttctttgtccccttcacgtcccttccatctcttttcctttgcctgctcttccctgatttacccacaaccctaactttgcatattcaaagggggagatcctggtaagtacatgcttagtgtggtagcaaacattagagaatctagtggtgatggagaccccgcccacccctaatattccctgttccccatcccctccaaataacaaaaatactaaaaatcgagctaacctggaaacccca

SEQ ID NO: 20730 - DNA, 2300 bp, Homo sapien
tgtcacctgggctgcagtgcagtggcgcaatcttggctcactgcaacctctgcctcccaggttcaagcgattctcctggttcagcctcctcagtagctgggattacaggtgctcaccacaacaccaggctaatttttttttatttttttcttgagatggagccttgctctgtgtcccagctggagtgcagtggcacgatttcagctcactgcaacctccacctcccgggttcaagcaattctctgcctcagcctcctgagtagctgggattacaggcgcccgccagcacgcccagctaatttttttgtatttttagtagagagggggtttcaccatcttggccaggctggtctcaaactcctgacctggtgatccacccgcctcggcctcccaaagtgctggaattacaagcgtgagccatcacgtccagcctttttttttttttttttttttttttttgagacagagtctcactctgccaccaaggctggagtgcagtggcgcggtctcagctcaccacaacctccgcctcctagcttcgtgtgattctcctgcctcagccttctgagtagcgacgattacaggagcctgccaccacccctgactaatttctgtatttttagtagagacagggtttcaccatgttggccaggctggtctcgaactcctgaccccaggtgatccacccgcctcgcccggacaaagtgctgggattatcatgccagcctttatcattaatttttaagaaaacctggacgggcacggtggctcacacctgtagtcctagcactttgggaggccgaggcgggcggatcacctgaggtcaagagttagagaacagcctggccaacatggtgaaaccccgtctctactaaaatacaaaaaattagcctggcatgatggtgggtgcctataattccacctactcgggaggttgagacaggagaatcacttgaacccaggagatggtggttgtggtgagccaggatcacaccactgcactctggcctgggcggctgagcgagactccatatcaggaaaaaaaaaaagaaagaaagaaaaggaaaccataatcttcgcaaaatttctgcctatgtccctcccttctccccattgggcaggggtgggggcggggactccaccatgtaccttgcacgatcatagagcctactggaaggaagaacgtaaccattgcatgatttatttttgcgcttgccgtaggtaatacatatgttgttgcttttttgtttcttgagataataatgaattaaatattaacaccatgaatatgattaatagcatgtaattttttttcttttgctgttttttcccctgctcttctcttctcctgtttttgtgcttttcctgctttttctttgtccccttcacgtcccttccatctcttttcctttgcctgctcttccctgatttacccacaaccctaactttgcatattcaaagggggagatcctggtaagtacatgcttagtgtggtagcaaacattagagaatctagtggtgatggagaccccgcccacccctaatattccctgttccccatcccctccaaataacaaaaatactaaaaatcgagctaacctggaaaccccatgccgcagccggcgctggactgcacgttgccctgggtataagtcgactcacacaggcactaactggaccgccacccttgaaggcgcacttctgcagccagttcctggcaggttttcctggtttcctgtaggtcagggatggcaaatacttacacaccgcccctgcctcccctcacatccctggctgtggaagatctcgcttaagccagaccagaattcattcttggcactgcccctcctccttctatctcctatgcagatgtcactcatggatcagagcatatttttccacatggcagaaatcttgccctcttgtgcccatggcagacatggctagttgatctagcactctttgccttgtgccgctcctctagcacacgcccatggcagacattgctaagcaatcctagcattctttccaaataagcttgccagcactcctgttctatagcagatgtggctaagtgattaaggtattgtttttctccctatatgataccctcttctctatgcatggcaggcatgactagtcaatcaggagcctctttcctagatgctgcctcttgtcctccagataaattgatgaggctcttctgttccacttaccctttctcctatccttggcctgtgacaggcaacactaattgatcctagcaccgtttcctgccacgcccagaattctcaccacag

SEQ ID NO: 20731 - DNA, 2300 bp, Homo sapien
tctcttctcctgtttttgtgcttttcctgctttttctttgtccccttcacgtcccttccatctcttttcctttgcctgctcttccctgatttacccacaaccctaactttgcatattcaaagggggagatcctggtaagtacatgcttagtgtggtagcaaacattagagaatctagtggtgatggagaccccgcccacccctaatattccctgttccccatcccctccaaataacaaaaatactaaaaatcgagctaacctggaaaccccatgccgcagccggcgctggactgcacgttgccctgggtataagtcgactcacacaggcactaactggaccgccacccttgaaggcgcacttctgcagccagttcctggcaggttttcctggtttcctgtaggtcagggatggcaaatacttacacaccgcccctgcctcccctcacatccctggctgtggaagatctcgcttaagccagaccagaattcattcttggcactgcccctcctccttctatctcctatgcagatgtcactcatggatcagagcatatttttccacatggcagaaatcttgccctcttgtgcccatggcagacatggctagttgatctagcactctttgccttgtgccgctcctctagcacacgcccatggcagacattgctaagcaatcctagcattctttccaaataagcttgccagcactcctgttctatagcagatgtggctaagtgattaaggtattgtttttctccctatatgataccctcttctctatgcatggcaggcatgactagtcaatcaggagcctctttcctagatgctgcctcttgtcctccagataaattgatgaggctcttctgttccacttaccctttctcctatccttggcctgtgacaggcaacactaattgatcctagcaccgtttcctgccacgcccagaattctcaccacagtgcttcaggtatcttgtaccagtcgattgacatggctcccgagatgaatcatatttgctgtccatccctgctgtgggtaacacctccttcctttgtgcagaaccctcagctggggcccagtgtggggcgtgagatgggcgtgaggcccagtccagcccagcccagcgggaagcagcctgctactcatagctgagaactgaacccagctcaaggagctcacctctaggcagccggcctcagcccggctcttacacttggacagcacagcctgggcctccagtcctagcaggggctcccttttgctggacattctcccactgccagccaccaaggcgctggtcatccctgccactgccctctggcggggctcttctggcaatcccagggtctttcttgtagctgagccgatcctatgccagggcctcgctgctcccagggcctgggtgtgcagatagggccatgggtggggcagtgacgggaggaattagttggcctcgggcttgtggttttcaggttcctcatgtgttccccccagtccctttgaatttgccaggccaagaccaggaacctgcttctcccttgtaccccaagaggtttaggggttcctcttttcctaccagaggccacatagcccagccccgtcatgagcgtggccgtggcctctgggtctcccatctgtggttcccatctctacccgggagactcaggccaggaccctcacccaggaaagagactggagcagcctgccagaggatccctgctttgccgccccctgcctgccctgccacccataccgccccatgtgcctgcctgcctgtcactgtgcaccctagcccgcaacggcctgccgcctcttctgtctctcccacccctacttccttctaagcccagtcccattgggatgtgtcccttggatgcaaacctgactttctgctgaggcctggctgctccctttctctggctcacaagtggtggatggctaacgggcctttgtttgccacccacagcttgcagctccctagggtgggattttgtctctgaacccgtgtggagaagggcacctcagggcttctgccagacgtcctgccccaaggcttggtgtgccatccccagcatggccccgatcagtgccctggccctgtggccatgcaccccaaagtgtagcgtgggccctgtgctccagctctgaccaacactaaccccggctggaggcaggagagccaggccaccgaggggtgtgcgggcacatccctctccttagaaaccgggccaggcctaggagtatggaggcctcacatttctctgggggagcaccgacagcctgtctccctgttttccc

SEQ ID NO: 20732 - DNA, 2300 bp, Homo sapien
ccctcttgtgcccatggcagacatggctagttgatctagcactctttgccttgtgccgctcctctagcacacgcccatggcagacattgctaagcaatcctagcattctttccaaataagcttgccagcactcctgttctatagcagatgtggctaagtgattaaggtattgtttttctccctatatgataccctcttctctatgcatggcaggcatgactagtcaatcaggagcctctttcctagatgctgcctcttgtcctccagataaattgatgaggctcttctgttccacttaccctttctcctatccttggcctgtgacaggcaacactaattgatcctagcaccgtttcctgccacgcccagaattctcaccacagtgcttcaggtatcttgtaccagtcgattgacatggctcccgagatgaatcatatttgctgtccatccctgctgtgggtaacacctccttcctttgtgcagaaccctcagctggggcccagtgtggggcgtgagatgggcgtgaggcccagtccagcccagcccagcgggaagcagcctgctactcatagctgagaactgaacccagctcaaggagctcacctctaggcagccggcctcagcccggctcttacacttggacagcacagcctgggcctccagtcctagcaggggctcccttttgctggacattctcccactgccagccaccaaggcgctggtcatccctgccactgccctctggcggggctcttctggcaatcccagggtctttcttgtagctgagccgatcctatgccagggcctcgctgctcccagggcctgggtgtgcagatagggccatgggtggggcagtgacgggaggaattagttggcctcgggcttgtggttttcaggttcctcatgtgttccccccagtccctttgaatttgccaggccaagaccaggaacctgcttctcccttgtaccccaagaggtttaggggttcctcttttcctaccagaggccacatagcccagccccgtcatgagcgtggccgtggcctctgggtctcccatctgtggttcccatctctacccgggagactcaggccaggaccctcacccaggaaagagactggagcagcctgccagaggatccctgctttgccgccccctgcctgccctgccacccataccgccccatgtgcctgcctgcctgtcactgtgcaccctagcccgcaacggcctgccgcctcttctgtctctcccacccctacttccttctaagcccagtcccattgggatgtgtcccttggatgcaaacctgactttctgctgaggcctggctgctccctttctctggctcacaagtggtggatggctaacgggcctttgtttgccacccacagcttgcagctccctagggtgggattttgtctctgaacccgtgtggagaagggcacctcagggcttctgccagacgtcctgccccaaggcttggtgtgccatccccagcatggccccgatcagtgccctggccctgtggccatgcaccccaaagtgtagcgtgggccctgtgctccagctctgaccaacactaaccccggctggaggcaggagagccaggccaccgaggggtgtgcgggcacatccctctccttagaaaccgggccaggcctaggagtatggaggcctcacatttctctgggggagcaccgacagcctgtctccctgttttccctcacctggttgtcattcagtcatggaaccagggtctactaagcactcgttctgtgcccagctctgggctgagacaaggcagtgcccccaccccgctccccccgggtgaatggaggcattcccagactgccagacctttggtgctaacaccaggacgtcctggacagaccaggaagagctcgtcactgcgttcccagaggggatgctgtgacctcacaggggctgctggcctcagccccctcacccaccaccaggcagcccgtgaatggccagatgccaggggtcactgcctgctccaaacaactgtgagagtcctgtctgctcatcccagggagggataagtctgtacccttggccttaacaaggggcgcccggtggcatctcatgctgtccccagcctgggcagtgacttctgcatggtccaggggtccctgggtactctttagccacctccgtcttcatggccacctggggcttagcactcacatccagccaccaaggagccgctggagctgtgggctggtggccctggttcagaatgtcaggcccggggtgggtcggggtagtccggatgaagcc

SEQ ID NO: 20733 - DNA, 2300 bp, Homo sapien
tagctgagaactgaacccagctcaaggagctcacctctaggcagccggcctcagcccggctcttacacttggacagcacagcctgggcctccagtcctagcaggggctcccttttgctggacattctcccactgccagccaccaaggcgctggtcatccctgccactgccctctggcggggctcttctggcaatcccagggtctttcttgtagctgagccgatcctatgccagggcctcgctgctcccagggcctgggtgtgcagatagggccatgggtggggcagtgacgggaggaattagttggcctcgggcttgtggttttcaggttcctcatgtgttccccccagtccctttgaatttgccaggccaagaccaggaacctgcttctcccttgtaccccaagaggtttaggggttcctcttttcctaccagaggccacatagcccagccccgtcatgagcgtggccgtggcctctgggtctcccatctgtggttcccatctctacccgggagactcaggccaggaccctcacccaggaaagagactggagcagcctgccagaggatccctgctttgccgccccctgcctgccctgccacccataccgccccatgtgcctgcctgcctgtcactgtgcaccctagcccgcaacggcctgccgcctcttctgtctctcccacccctacttccttctaagcccagtcccattgggatgtgtcccttggatgcaaacctgactttctgctgaggcctggctgctccctttctctggctcacaagtggtggatggctaacgggcctttgtttgccacccacagcttgcagctccctagggtgggattttgtctctgaacccgtgtggagaagggcacctcagggcttctgccagacgtcctgccccaaggcttggtgtgccatccccagcatggccccgatcagtgccctggccctgtggccatgcaccccaaagtgtagcgtgggccctgtgctccagctctgaccaacactaaccccggctggaggcaggagagccaggccaccgaggggtgtgcgggcacatccctctccttagaaaccgggccaggcctaggagtatggaggcctcacatttctctgggggagcaccgacagcctgtctccctgttttccctcacctggttgtcattcagtcatggaaccagggtctactaagcactcgttctgtgcccagctctgggctgagacaaggcagtgcccccaccccgctccccccgggtgaatggaggcattcccagactgccagacctttggtgctaacaccaggacgtcctggacagaccaggaagagctcgtcactgcgttcccagaggggatgctgtgacctcacaggggctgctggcctcagccccctcacccaccaccaggcagcccgtgaatggccagatgccaggggtcactgcctgctccaaacaactgtgagagtcctgtctgctcatcccagggagggataagtctgtacccttggccttaacaaggggcgcccggtggcatctcatgctgtccccagcctgggcagtgacttctgcatggtccaggggtccctgggtactctttagccacctccgtcttcatggccacctggggcttagcactcacatccagccaccaaggagccgctggagctgtgggctggtggccctggttcagaatgtcaggcccggggtgggtcggggtagtccggatgaagcccctccagaggaccgcccccgactaggacagcatctgggccccagagggattcctggaggccccatctctggcgctcctgccgtgccgtgccctgccatgccctgcactgggggatgcaggccagcccttcgcagctgtccatggccatgctcagcccaccctttgtagcttggccaagtctgtcagtgcctgggtcccaggccgccctgtgcgtgcctccgtgtgcttcctgcagctcccagggccctcgtcctgagtggggtggggggctctgcccacacatgcctccagcggccagggagcatgggagcacagcccccaggctgcctgccgttagttgtcaggtgagtccctgcgcaggcctgggttctgacccccacgcagatgacagctacagccacacaatccccatccatggggtctcccagcctgaaaccctgatgtgtcagtcaaaaggatgaccaccaggcttgcagccagcttgggacatgagccgcgctccttcaatgtccttggggagggcccctgggctcacacctttgaccctagccctctgtgtggatgctacc

SEQ ID NO: 20734 - DNA, 2300 bp, Homo sapien
ccagctgagtctcctggttccctcctgctttgctctggctggcctaaagctcgagacccatttgtccaccagctggccgtgaaaaccttcatagctcttctaggcttgcccctggccatatgacacctggcagctgtcccaggtccctgagccgtgtgcctcctgtacagggagggtgacaatattatctgatatatcttttaagagcaggttcaggaaacccagagtagtagctgcaaaaacaagataagatggttgatagttttttgtgtaaattaagtccagactttagtatcccgggcaaagtggagcagctccacaggcatcagggtccaggccctgcatgttcctcaggattccacctgatatgcagaagccgagctctgcggtgggacaggcctgccatgaaatcctgactttttttttaaacggagttccgctgttgttgcccaggctagagtgcaatggtgcgatctcagctcaccgcaacctctgcctcctgggttcaagcgattctcctgcctcagcctcccaagtagctggaattacaggcatgcaccaccacgcctggctaattttttatttttagtagagacggggtttctccatattggtcaggctgggctcgaactcccaacctcaggtgatccacccacctcggcctcccaaagtgctgggattacaggtgtgagctactgcacctggcccaaaaccccgacttctacttctttgtccaaaatggctgcccagactccagccattgtgatgatgtcccaggcagcagcaggaaggagaggaggagctacaagggcatgcctctccccacacaacctcatccagaggtcgttcggggcagccacttgctgaccacaaacccaactctcacttaaaggctttgtgggcagcttggctgtcttaaccacacctggatgtgggacaggaaaatgtgcgtggcatgtggcacggggcctggcctgtagaccaccatctgcaagcactgtttagcatccattccatttatctcccagctttgagaccctggttcttttttctttttctttttcttttttttttttttttgagatggagtcttcctctgtcacccacccaggctggagtgcagtggcatgatctcagctcattgtagcctccacctcccatgctcaagtgatcctcccgcctcggcctcccgagtagctgggactacaggcgcacaccaccatgcccagctaatttttgtattttctgtagagatgggggtgttgctgtgttgctcaggctggtctccaactcctgagctcaagcaatccccctgtctcagcctcccaaagtgcaggaattacaggtatgagccaccatgcctaaactttacaaaaatttttttgttttgttttgatacatagtctcactctgtcgcccaggctggagacagtggcacaatcttggctcactgcaacttccacctcccaggtttaagcgattctcctgcctcagcctcccgagtagctgggattacaggcatgcagtaccactcccagctaattttttgtattttagtattgacggggtttcaccatgttggccaggctggtctcaaactcctgacctcagttgatcctcctgcctcagcttcccaaagtgttgggattacaggcgtgagccactgtgcccagccaaaactttttttataaaaaacacacaggccgggcacgggggctcacgcctgtaatcccagcactttgggaggccgaggcaggtaggtcacgaggtcagaagatcgagatcatcctggcgaacacggtgaaaccccgtctctactaaaaatgcaaaaaattagctggggtggtggcaggtgcctgtagtcccagctactcgggaggctgaggcaggagaatggtgtgaacccgggaggcggagcttgcagtgagccaagatcgcgccactgcactccagcctgggcgacagagcaagactctgtctcaaaaacaaaacaaaacacattcgggcacagtggctcacacctgtaatctcagaactttgggaagccgaggtgggcggatcagctgaggtcaggagttcgagaccagcctgaccaacatggagaaaccccatctctactaaaaatactaaaattagccaggtgtggtggcgcatgcctgtaatcccagctactcgggaggctgaggcaggagaatcgcttgaacccgaaaggtggaggttgcggtgagccgagattgcgccattgcactccagcctggacaacaaaagcgaaactccgtctcaaaaaaaaaaaataaata

SEQ ID NO: 20735 - DNA, 2300 bp, Homo sapien
cacggagtcctgctctgtcgcccaggctggagtgcagtggcatcatctgggctcactgcaagctccgcttcccaggttcacaccattctcctgcctcagcctccagagtagctgggactacaggcacccgccaccacgcctggctaattttttgtatttttggtagagacggggtttcactgtgttagccaggatagtctcgatctcctgacctcatgatccgcctgccttggcctccaaaagtgttgggattacaggtgtaagccaccacacccggccttaaaattgttaattttatgcaatgtgaattttactgtatttaaaaaaatcaattttagtaatcccaacactttgggagggtgagggagcaggcagatggcttgagcccaggagtttgaaaccagcctgggcaacacagggaaacctcatgtctacaaaaaattagttaggcatggaggtgtacacctgtagtcccagctactcaggaggctgaggtgggagaatcacttgagcccaggaggtagagattgcagtgagccatgatggcgtcactgcaccccagcctgggcaacagagcaagaccctgtcctaaaaaaaatccggccgggtgcagtggctcacgcctacaatcccagcactttgggaggccgaggtggatggaacagaaggtcaggatatcgagaccatcctggctaacatggtgaaaccccctctctactaaaaatacaaaaaattagccaggtgtggtggcacgtgcctgtagtctcagctactcggaaggctgaggcaggaggatcgctggaaccccaggagacggaggttgcagtgagtcgagatcgcgccactgcactctagcctgggcaacagagggagactctgtctcaaaaaaaaaaaaaaaaaaaaaggaaaaaaaaattaaaaaaaaaaagaaaaaaaagaaaaggagtcacccgttctccactgttacttcaaattgtccaagcagtgagtgtaaatgatagaaaaagttggagtgaaaaggaataccaaactgatattacaaagagctacttccccaaattctccaaatgcaggaaagtgctgacaacagccagctgtatttgagggatctttgtcatcacctgccaaccttttccgggtttatctttgaagactaaacatctccctgtacacagtttatgtttagacgggaaccaaataacagattattatttactgagggcctgtgatgtcccacgcactgcggaagcaagcactcaacaagcatttcacgtatcctaaagacagcccagtagcgtaggcctattatccccattttgcagaagaggaaactgaggctcaacagagggaatgcctcaagtaatgggtggggcaggagctgaaccaggcaacgtggctcccagtcccacactgtccttatctcttcctacctgggctgtcgtttttctgacccgaggctactgtaatggctctatttacctgctggcccttgagtctgagacccttggggtgcatggtggggccacgcccctccactgtctataagccaggaaagctgagcactcaatatgaaccaagcctcatctcaattctcacagccgcactacagggtggtcgttccatcactcccgacttacgaggaaactgatacgctgatgcctctaaggcgcaaaaggcgtcgaacctggaccacgctcacagagcaagcaaaacacgacgccacaggtatctccgccccgccccagcccttttataggcgagccctacgggtcgcgtacagggccacgcctagacgctatttttgggtccactccaccacgtcggtcccgccaaaggttgtcacgcgcggcgcactctgggaaaaccacgtggaggtgactaaaaaggaccctgccgcctgtaactttagttgtcttagctactgcctacaaaagatgcgccatcatggcacttatttttgtaattttcctccaccagcggccgagaagagagccgaagcctttgagaaaaatattcccagacggttgagtgtttctgggcacatcaggcattcattcgggccgcctgccctctagtgggggggtccttcactcctggcacctctggttacggacaacatacagaagccactgccaatgagctccgccgagtagcaccggggcagggctagcgcttaaaggagccgcgacccctttgcagaccagagggtgacccggatgatggcggccggcgcggccctagccctggccttgtggctactaatgccaccagtggaggtgggaggggcggggcccccgcca

SEQ ID NO: 20736 - DNA, 2300 bp, Homo sapien
gaaaggaaggggaaccctggccttgggattttcatcacagaggagtgggagaggggacacaggcatgggcctggcactatacagacaacaggaagttcccctctcgaccttcggctcctcaggaccaccagagaaggagatgtcaggaccccttcttgtcccccagctgggccataagacgtcccaggtctctgcacacccgtggaattcctcccttccccagtgggtttttgagcatagggtgcccttgggtgtgttgtgtgtctgcctgctggcttgcttaagttattaattataacacgggtcaaggtgttcccaggcctctatggagtggaatccttcaagctggggacctctggatcccatggttggatggctggggggtggagcgtgtctgaattcaccaaatttgaagcatctctcaagggcagtcagggtggtgtatgcggagcctcctgggggtgtggggagtgcagcagtgccatgccagggtctctgcaacggtacttgcattagagggtttaggaggtggaatgacaggggctacgggtgagggacatgaaggagaatgagggcccctcgcagtggctcacacctataatcccagcactttgggaggccgaggcagggggttgcttgagcccaggaggttgaggctgcagtaagctatgatggcaccactgcactctagcctgggcaacacagtgagaccctgtctcaaaaaacaaaaggggccgggcgcggtggctcatgcctgtaggcccagcactttgggatgccgaggcgggcggatcacctgaagtcaggagttcaagaccagcctgaccaacatggtgaaacctcgtctctactaaaaataaaaaattagctgggcgtggtagagcatgcctgtagtcccagctactcgggaggctgaggcaggagaatcacttgaacccgggaggcggaggttgcggtgagctgagatcgagccattgcactccagcctgggagacagagcgagactccgtctcaaagaaaaaaaaaaaaaaaaaaaaggaatgaggcgtaaatgaggtctagggaagagttaaagctggagtgctaggaagtggcccaagctcactgggtcgcccaaaagagatggggccacccaaaatgaagggggatgcagagagaagacgggtttgtgtggcgggagaggggccctgcgccgggccaggctggactcagcatcgttggaggaggggctgagagaggagggggtcaaaggatatcttgtgcgaaaggagacagtcaaacattaaggattaagaaggcaatgtgggcagagatgatggggaagggaggaggagcggtcgaatgtcggggaggggtcctttcaaccgggctcaggttgctcctggaggccagggctcatcggaaatcgtcggtgcgggggcggtggggggaagggttgggggcgaggcccgggcgctggccacgccctttcccccgcccattccccagagcggggcggctgacaaagcgagtccgggtgggagggcgcgggcaggcacgggggcggggcctcgtcgcggctgggccacgcctccctgagggctgcctcacaaagccgggcgggcccgggggggtggggcccagtctcaggggcgtgtccaggtcggggcagggaagccgcatcacgacgcgcggctgcttgtgtggggcggggtacagggcgtgtccacgcggccgagcaccgcccccgccgtccccgcaccgcctcactcgaaagcagccgttaatgaggcgccggcctgggggcggggcccaggcctccgaggggcgtgcccgcgcgcccgagcaccgcccccgacgtaccctcccgccccgcagttcccgggcggtggagccacctcacaaagcggcgaccgttctcgcggggcggggcgtagccggtcccgccccacggggtgccctctcgttcgctcgctagctccccgcgcccaggacggccggcagagggcgctgcgccacggggccgggccgcggcgacggtggcggcggcggcggcgaggcggcgcgtggccggcaggcggcgctgcccggctcggcctcggcctgcacggcggctgcggcggcggtagcggcagcggcggcggcggcggcggcggcggcggcggcggcggcggcggcggcggcagcggcggcggcctgggcccgggcgcagcggcggcggcggcggggcctggagccggatctaagatggcagcggcggcggcggcggtggggccgggcgcgggcggcgcggggtcggcggtcccgggcggcgcggggcc

SEQ ID NO: 20737 - DNA, 2300 bp, Homo sapien
taaataagctttttgatatcaccaaataatgtgcactcatgattaaagagagagagaacagagcagaacgtctgtattcaaaagtagaaatcggccaggcacagtggctcacacctgtaatcccagcactttgggaggctgaggcaggtggatcacttgaggttagcagttcgagaccaccctggccaacatggcaaaagcccatttctactaaaataaaatacaaaaattagctgggcgtggtggcaggcacctgtagtcccagctactcaggaggctgaggcaggagaatcacttgaacctgggaggcggaggttgcagtgagccgagattgtgccactgcactccagcctgggcaagagagcaagactccgtcttaaaaaaaaaaagtagaaatgtataatgtattcccttctcatcccatttgccagagtttttggtgtctaccttttttatttttttatttttacttttttttttatgagatggagtcttgctttgttaccaggctggagtgcagtgacacaatctcggctcactgcaacctccgcctcccgggttcaagcaattctcctgcctcagcctcctgagtagctgggactacaggcgcacaccaccaagcccagcagatttttgtatttttggtagagacagggtttcaccatgttggccaggatggtctagatctcttgacctcatgatccacccacctcagcctcccaaagtgcttggattacaggcatgagccactgcacccggcttactcagaatttttgttttctctttctgtttttggggggttttttgagacagattctcactctgtcacccaggctggaatgcagtggcacaatctcagctcactgcagcctctgcctcctgggttcaagcgatttttgtgcctcagccggccaagtagctgggattacagtcatgtgccaccatgcccggctaatttttgtatttttagtagagatggggttctgccatgttgcccaggctggtctcaaacttctggcctcaagcagttcatccgcctcagcctcccaaagtgctgagattacaggtgtgagccgccgcacctggcctgttttctcttttgaatcaaatgggagcctgtttttttcctccaagtattttggggatctctccacgtggatctgcatggatctgcctcatccagcgcctgggtcacgcccccctagcatcgcttaccgtcccagaggatggtaggccttgggccctggggaggagttgtcttgacacaagagtgtctgccctggcagggccatcccgagcctcctcctggccactgaggtctgggaaggacgtcctccgttggtgaagtcccttcctgctccccaaggatggagatccatttcctggttcatctggagctctgatcagtaccctgaggccttcccacctgaccccagcttcccctgcaggcactcaccatgcccagagcatttgtccttcaaaagctcatgcctgtcaccaccaggaatgtctgtccttggtctgctcgtgtggaagcaatcccacaaatccagaacaggtggtgtgttctcccagaccctggcctggactctgccatgagtgaccaccacgggccagtagccctgcggggagcccagccggccccagggcttgggcggctcacctgccccagccaagacgggctgcttctccaggcatgagtcagcatggagctgggagacactgccaccaacaactcgggcccctttcctccatgctagaactgcggaggccccggaaaaatgcttttcaactgccagtgagcttccaggggaggcccgtgccactcaccccagacgatccggaggcctgcaggccacagggttggggccgagcgggagcttccccagggcttctcctcccggaggactggcccatggctcatcttgagttctcgcttcattttgaccaagagcccataaagggcaaacattgagagtgaagacagacgcctcatgatgtgcacatcccttatgatcactgtcacctccccatcaccgtcgcctcctatgtctcgctctcacctcccactcctccctcagatcgttcttgatgttggctgtggctctgggatcctgtcgttttttgccgcccaagctggagcacggaaaatctacgcggtggaggccagcaccatggcccagcacgctgaggtcagtggcccgctggtgcccacccagcctcgtcctcgcccatgagtgccatgccggccccagcctagagaagcttgggaacccccaggggcctggggacattacttc

SEQ ID NO: 20738 - DNA, 2300 bp, Homo sapien
cgatctcggctcactgcaacctgcacctccccagttcaagcaatttttgtgcttcagcctcctgagtagctgggattacaggtgtgcaccaccacgcccagctaagttttgtatttttagtagagatggggtttcaccgtgttggtcaggctggtcacgaactcctgacctcaggtgatctacccgcctcagcctcccaaagtgttgggattataggcatgagccactgtgcctggcctgggtgactgtttctatttgcccatctgtcttggggtctgtgcagccctgacgcctgaggcatgtgcctgtggctcttctcatgctaggtatgtgagcgtctgagcatttctgtacaggcaagcagctgtgtgtgcgtgtggcagggtacaggtccccagccagggtagcagccatgggatggagcgtgggcagcagcaggctggtggggcttgtgcaggcaggggcaggggggaagcttccactctcatctctggcccgccctggatccaggccctagggtcctggctggctgtgctcctggaggtgggaggtggcgtcccacagctgtgtctcatgtcttgggtgtgagtatgggaagcaaggctgctccaggggctgtgggccccactctcctccccttctgccctgatggtggggatgggggtggggacagccccagcagagagggcccctcccgatgggacatgaagccagatggcagtcaggctctgtgggcagctgcatgtgcccccgacgtcccagcagccagcttgcagggaggggggaggccaggcctgtgcaaggaggactcctgtccagctcaggaagctcttccaggggttaaaggcagccctcccctctcccagtcacatgtcttctggtcagcaggagccagaggttccttccaggctgggtcacttcccatggtgcccccaggtcccccagggcagaagccgcagcatgtgcatctccctccccgttccagcagctgcagccctgcagctctcgcctcgggtacagcctggtggcgtaaggaggaggcagagtcccactgatacctcaggatctcctcccccagcttgcaaggctggggggcccacatctggaggccaggtgctccttggggcaggcggggctgcggggccctgatcctccctgccactggccctgactcatgcgtctacccttgagtcacagagggaggccctgcccttccctcagtctgtgtgcccagaccaggcaggccaagtggcccatcctgccggctgggtgcctgtgccagaacctaggcagtccctgtggtgtggatttggcttcccccacctggctcttggcctcaactgaggtccccagcggcgttggggtagcccggggcccaccaccctccctctgtccagagcaactttgctatgctttcccggctgcacacatgcacagacggcagggcctgagaggcagcgcctggccacatcccgggcactgcctgcttccccgtgagtctttggcaggtccctcacacctgccaggtctagtaataggacataaagatgagccaccagcctcccagtctcaggtggaattcgtgagctggtgcaggtcaggtacccgtggtggtgatgaaacactgatcagaataggcgctcggtgccactgtcacaggagtgcaggaacgaatggatgacaggctgggagcacccagggttgggggtcttggggtcctttggaagctctgccaggcagtgtgggatgtgtcacctgacgccagcacccctccctgccccactcccaggaaacatgtttcctaccattggtgacgtccaccttgcacccttcacggatgaacagctctacatggagcagttcaccaaggccaacttctggtgagtgtgccctgggtgtcccgcctgggccccacagcctgccttctcagggacagccccagctccccagagagcctgcactcctctttttctgaaagacttgggctagatgagggctgactgggagagaaggcagggctaccccacctgcctcttctgcagccctgaccttgctgtgggggtggggcctgtccacaggtaccagccatctttccatggagtggacctgtcggccctccgaggtgccgcggtggatgagtatttccggcagcctgtggtggtgagtagggcctccagggtactgctgcagtgatcacttgccattgctgtgcagctgtgcagccctcaggaagctacagcccctctctgagccctctcctctgccctgcacagcgctctcacagagatttgggccaaaag

SEQ ID NO: 20739 - DNA, 2300 bp, Homo sapien
tcctgagtagctgggactacaggtgtgtgccaccatgcctggctaatttttgtatttttagtagagatggggtttcaccgcgttggccaggctggtctccaactcctgacctcaagtgatccaccgcctcggcatcccaaagtgctaggattacaggcgccgaccactgcacttggctaatttttctattttattttattttttatttaattttattttatttatcttattttatttttgagacagagtctcattctttttgcccaggctggagtgcactggcacgatcttggctcactgcaacctccgcctggcggattcaagcgattctcctgcctcagcctccagagtagctgggattacaggcgcccaccacaaagcccggctaattttgttgtatttttagtagagacggggtttcaccatgtttggccaggctggtctcaaactcctgacctcaggtgatccacccacccaggcctctcaaagtgctgggattacaggcatgagccaccccgcacccggcagtttttgtatttttggtagagacggggtttccccatgttagccaggctggtcttgaactcctcaggttatctgcccacctcggcccccttaagtgctgggattacaggcaggagccactgcgcccagtccatctttggtcttctgcatatgctgttccctgtgcctggaacatatactcctgcttccctaccctattccccagggaagccttctgtctcctttaggtctcagccaattcctcacctcccccaggaggcctttctctaacccaccagattgtgtgtgtcccctgtgttcccatagtcccgatccataaccagtcccaccataaccctttgagagcaccacagttcgttcaccagcacccaccatcaccagcaccctgcccaggggaagagtggctgaaccctgagcataactctgagccccatcccacctgcctccccagcctgacctgtgaggtgtccacgtcaaagaagctctgatagtagctgaaggtccagaatcccggctgctgctgctgctgctgctcctgcaggagctgcacattgcgggcattcagtgcctgcccggagagcctgggtcagctgggggctgcaaggaggcaggacacagggactcaccgcggccttgtcactctcctcctccacctcatcctcggctccatagctgccacctgagcccacggccacagccacgtgcccttgtggggtcagctgatcgcttctgctggtggtggctgcatctggggtgtcagccagaagattagtggcctcctcgaattctgtggaggaggtatatgggacacacgcacgtttgaggggtggaaagaactcgactgggcccaagctaaaccgatgctcatctgggggcggaggctctgctgagccattgatctcccccaaggtggggcccaacttcctcagtttggaggcatccggaggacatctgttcccttcctcctaaagtggaactgcaacttagggttgacgctgggatggggtcagggtctggggacgagaggctcgggtttgaggtctgagttcagggcgggggcggggttcgagtcagagatgggtctcactcctgggtcagggttcacagccgcctaggcttcggggtagagaaattggaagccgtatcggggggaggttctggcccggggcgggagtgggagatccggccacgtcggggccgcactcaccatggaaggtcagctcgtcggccgatgccatggtcgttcaggggcgtctccgcatccctcgctgaggacagagaccggtcaggcacacttcccccccgcccccgagccggtccctcggcccccagccctacctggcgaccaactgcacccacggaggcttgaactcgtcgtcccgtccccacaggtgcgctccgccccccctcacctgaggccacctgggccggcgtggctggggctctctgcgcctgcgcgtctcgcctacccgtcagactccaaccgactcagacctgacagcaacatccggcgcctgtcctctttctatcctctcccgttgggaagccacttccggtaaagttggcgcttgcgcagaagagactcccgggctcttaacgtcgggtatcaggagtttcttcccggagcaaggacccccaagacggaagaggatggccgcggcggctctgaggagattttggtcccggcgccgcgcagaggcgggcgacgcggtagtggcgaagccgggagtgtgggcgcggctgggtgagtagcggcggaaggcggcagggtgggt

SEQ ID NO: 20740 - DNA, 2300 bp, Homo sapien
agacggggttttgccatattgcccaggctggtgttgaactcctaagctcaaatgatttgcctgctttacccttccaaatattttagtttttgagaaagctctcactattttacctaaactggtcttgaactcctgatctcaagcaatcctcctacctcagccttccaaagagctgggaatggcaaaaatgttacttatcaaaatgaaaggccaggtgtggtggttcactcctataatcccagcactttggaaatgcgaggcaggtggatcacctgaggtcaggagttcaagaccagcctggccaatatggtgaaaccccatctctattaaaaatacaacaatttgccaggcatgttggcacaggcctgtaatcccagctactgaggaggctgaggcaggagaatcacttgaacctgggaggcagaggttgcagtgagccgagattgcaccactgcactccagcaggcaaaacagagcaagaccctgtctcaaaaaaaaaaaaaaaaaaaacgagagagaataggtcatagaataaaaacatttcagctcaaattttatttagttaattactattattattcttttttgtagcatcggagtcttgctatgtcactctagctggcctcaaactcctggcctcaagcgattctcttgcctcagtttgcaaactgctgggattacagacatcaccatgccaggccacaacccaaacttgaaaaagaaaatctaagtggccttagaagagtttgcaagtcagctgaccaatgtggtacctccttaaggagggcctctgaggcccgatgaaaaaggcttatataaaaggctcatgaccagctctgccagtgatgaacatgtgtcaagtcgttctgctgtccccaactcccggacccaggtggctctgaattagcttcagctaataaagaacaaagacggggggcagaaaggctccccaaacttgtgcaaatccagtgagaaaacactttgcacatcatctgtctcagctgttctgcaggtgaggcacactcagaactgcaccaccccaggcaagcagtttgccaggactcgggggcctcagggtttcatctcggggcctccgcctgcaccagcgagtgggcctggctcagggcgagcctgtccttcttctccttctgcaagacctgctcctcccacagcgcctggtccacctgatcgtcggtgagcacgacaggcttgtacttctcatcgaagagccgctcgttggtctcggaatgcagctgctggggcccgaccacccgcaaatgcgccggcaggtgcaggaattcgtcgtcgttgatgtcgcagtcgcgcatccaggcccccagcacccaccagcgacccacgaagcccacgtccaggacccggccggggaagtcggtccagcggggctgcaggtagcggcaacgcgcctggtagaggctggcctgggcgtcgaagggcgcctcgtacaccagcgagcagagccccaggttgacgtagcgcaggcggccacggccccgcagccagagcagcctctgcacgaaggcttcggactcgcggttgcgggtggccggcgccagcagcaggagggtccccgacgcctccagcagcgcctcctcgaaggcaccctcgctgggcgccagcgtgaagcaggccgccgcgccgcccagcagacccacatacacagcggcgcgccccggccgggccctagcctccgccgaagcgtccctgcaggcctcggcgtagtcccggagcagcgcgcgggcccaggaccctgaggggagaggagcgcggtaagagtgatccggccgcggcggccacccaccctgtcgcggcggccacccaccctgccgccttccgccgctactcacccagccgcgcccacactcccggcttcgccactaccgcgtcgcccgcctctgcgcggcgccgggaccaaaatctcctcagagccgccgcggccatcctcttccgtcttgggggtccttgctccgggaagaaactcctgatacccgacgttaagagcccgggagtctcttctgcgcaagcgccaactttaccggaagtggcttcccaacgggagaggatagaaagaggacaggcgccggatgttgctgtcaggtctgagtcggttggagtctgacgggtaggcgagacgcgcaggcgcagagagccccagccacgccggcccaggtggcctcaggtgagggggggcggagcgcacctgtggggacgggacgacgagttcaagcctccgtgggtgcagttggtcgccaggtagggctgggggccgagggaccggctcg

SEQ ID NO: 20741 - DNA, 2300 bp, Homo sapien
ggtctcgaactccttacctcaggtcatctgcccaccttggcttccgaaagtgctgggattacagatgtcagccaccgcacccagccttattgtttgtttcacaggtgaagaaagtgaggtgtagatgctctggtaaacctgcctggtattacccatgcatcacccaggtagtagaaatggagtcgtgttttaaacccaggtccttctggggcctggcttggtggctcatgcctgtaatcccagtgcactgggaggctgagccaggaggactgcttgagcccagtagtttgagaccagcttgggtaacacagcagacctcagctctacagaacataacagacaaaaaaaaaaaaaaaaaaaaaaagctggtggtggtggcatgtacctgtagtcacagctatttgggaggctgaggtggatcccttgagtccaggagtttgaggctgcactgagctgtggttacaccattgcactccagcctgggttacagagcaagaccctgtctctaataaaacaaacaattaaacaaaaacccacccaggtgaggtggctcacgcctgtaatcccaacactttgggaggctgaggtgggcggatcacttgaggtcaggagttaaaaaccagcctggccaacatggtgaaactctgtctcaactaaaaatacaaaaattagccgggcgtggtggcggacgcctgtagtcccagttactcgggaggctgaggcaggagaatcgcttgaatctgggaggcagaagttgcagtgagctgagatcgtgccacctcactccagcctgggcaatggagtaagactccgtctcaaaacaaacaaacaaacaaacaaacaaacaaacaaacacacaaaaaagaaaacacacagaagaggccaagaggctcagggccttcactctcggaggaaggtttctctctttcaccaccagcctgtatgcattcaaacgtgttctttgcaacgacgacttccgtggctgccctatttaaaatgtccatgatcctcccagtgttcacctcacactgtactatttattttttttgagacggaatttcactcttgttgcccaggctggagtgcaatagtacgatctcggctcactacaatctccacctcctgggctcaagcgattctcctgcctcagcctcccgagtagctgtgactacaggcgtgtgccaccacgcccggctaattttttgtatttttagtaaagacggggtttcaccgtgttagccaggatagtctcatctcctgacctcatgatccaccagcctaggcctccctaagtgctgggattacaggcatgagctaccgcgcccggctaatttttgtatttttaatagagacgggtttcaccatggtggtcaggctcgtttctaactcccgacctcaggtgatccggccgcctcggcctcccaaagtgctggattacaggcgtgagccaccaagtccggcctctcatactgcactattttgcttattaatcttgcttcttgtcctccttccccactagaccgagggctccacggcggctgggacacagtagcagatcaataaatatttgctaagctaattaatggcacttgggaagttttgcagagaaggcggccacggtcgggccccgccttgcctccccaaataggcctcgccgccccaggtcagggatcaaagcggttcccaggcgcgcccttggcccgcgggaaaccactgcccggtcttggtccaggcggcccgtcctacggtccagggttcctatttccgagcctcagggacctcctttccccacggaccccacggccaccgggatcccattctccagttgccccatcgtcaccgcggccgccgccaccgccgccgcagtggcgtccgctctgcgcatgctccggggcgtcaagacgcgaggcgtgcagaaggcgaagcgtgcgcaggcgcggggccatcgcggcccgagtggggcggtgcatcggacgcgcgtgcttcctccgggccacgcccacccccgtccgcccagggacgggcgcgcacgcgcgccgggagcggaagggcgggctggcgcgcgcacgaggccgggcaggcggcggaagctggagaggccgccgcggtgctgagggggaggggagccggcgagcgcgcgcgcagcgggggcgcgggtggcgcgcgtgtgtgtgaagggggggcggtggccgaggcgggcgggcgcgcgcgcgaggcttcccctcgtttggcggcggcggcggcttctttgtttcgtgaagagaagcgagacgcccattctgcccccggccccgcgcgga

SEQ ID NO: 20742 - DNA, 2300 bp, Homo sapien
ccaaggagccctggtttcccttcttacagaatggttttgggaaccaagacctgggtcctggatgggcctgttgcttctggggtgtcattgctcctggggccctctcagtggtcagtgctaggagattcatgtgcgcgtgctgatgctttgtgcacgtatcgtctaaaaggccttctctgcctcggcatctgtttctgtgttaagctgaacgtgagttcataccactgtctgcggctctgagtgaggaccacaggttccttctcacacttccaccctgtgtgtgcgcccattctcagcttccgtggacaacagtttcagagtagtgagccggtacctccgggaagcatcttgagccactagagcgcaggccttggggccagttccttgtgtgttcagacctccagattgcagtcagattccatttccagggtgatagaggtcaccttcttcccctacttcagtgaggttgtgaggtgggtgctcctgcagtctttcccactgcgccccacctgggcaagcgtccatgctgtggaacgccagctcctgcaggccagaagagggcccgcgcgctaggaaatgtttacggcgtatgggcatccggctgtgccggccctctcactgggaattgctgcctcctgccatgagctgcttgtcctgcctccgtttggacctctgtctctgggacctgtcccctcagtcccctcctgacccttgctcctggctcttctccctcccagtgcagatgctccgcacacctccggcttctcccttggtgcgctgactgtccccatcactccagggaggtttcactgttcctgagtcagcggaagcacagggtcaggccctacgggccaggtccggtggctccaagatgccatcagggacccagcctcccccaggtttctgcccagtcattcttgggtgactccaaccctcaggctccttacctcatggttgcaggacggctgcactgcctccctcgcctcatgcaggagagtgggcaggaaagagttctaggagagtgggcagggcaaaaggcagcagaagcgcaaggctgctgagcctctgctccccacgcttcttcaggaactctccccagccttcaccacagccatgcgtccttctgtctattggctgtgccgcctggttggctgtggcttccagcggggctggagatgggttcatggtggacacagcacctccctcgtggagctgcttgggggcaaaccacgagtagtccctgggactccagcttcgagccctgtctttacggaccaccccgtctagactttctgagtggcttccctcccccactgaaaactccctgccccagagttcctcccagagcccgtcccctttgggactcagctttattaccgcctccaccctctcctcagtctctaggctgtcggtctcaggtgactcacccctccccactgcattctgcctgcccccatgtcctccctcattccagccctggtcatcccacaggggaacagccacgagttgccgctccctcccatccctgtcctcccgcctgccacctgagccaggccccgcctcgcccctcactgtcctcgttctctctcacagtcaggaaccttccgtggctggagggtggcagaaagactgtttggtgtctcctatatcctcaggtctccacagcactgttgctagcctggctctgggcgtgaagcctgtgctctgaagctgcattttcccggcagcaggtccaggcttccccagccctggcagcattgtttctgtcccccatcacatctctgtgtccctacttctcactctaaagggccttgccctcttttcccagtggcctcccttctgtcctctgaggcagagcccttcacgtcctcgccagtctctcttcctccctccctccctcagctgccctaaacacagtttctctgcccactcggagggctgtggccatgttggcctcgcccctgacagccagtggctatgggtttgcacagtgagccattgatgagagaccggcacttgactctcatttccttgttccatcagaacgctgtccaactgggcgtacgagtttgacaagtgggccccctccgtggtgaaggtgtcttacaaggtaggtcacagccactgaggtttcctctcttgctacggaggtgcaggcggtggtgggcaggacgtccacacatacctctggacagtgaacctgagaatgctgggtctccagtcgcatggagtctccaggacagcctggaactccagtcacatggatccgggagtttggactgggcagggacagggcagat

SEQ ID NO: 20743 - DNA, 2300 bp, Homo sapien
ctcactgtcctcgttctctctcacagtcaggaaccttccgtggctggagggtggcagaaagactgtttggtgtctcctatatcctcaggtctccacagcactgttgctagcctggctctgggcgtgaagcctgtgctctgaagctgcattttcccggcagcaggtccaggcttccccagccctggcagcattgtttctgtcccccatcacatctctgtgtccctacttctcactctaaagggccttgccctcttttcccagtggcctcccttctgtcctctgaggcagagcccttcacgtcctcgccagtctctcttcctccctccctccctcagctgccctaaacacagtttctctgcccactcggagggctgtggccatgttggcctcgcccctgacagccagtggctatgggtttgcacagtgagccattgatgagagaccggcacttgactctcatttccttgttccatcagaacgctgtccaactgggcgtacgagtttgacaagtgggccccctccgtggtgaaggtgtcttacaaggtaggtcacagccactgaggtttcctctcttgctacggaggtgcaggcggtggtgggcaggacgtccacacatacctctggacagtgaacctgagaatgctgggtctccagtcgcatggagtctccaggacagcctggaactccagtcacatggatccgggagtttggactgggcagggacagggcagattagctcactggggaggagacaggagtgagcatggtggccagcactcagaggccagctcaggcgcctgagatggggacccaggaagaggggagcctgtcagccaccaggaatgtgcagatggcggtgcaggctgcgtggttccctcaggccccggccgccgctggcctgcactgcttcctcttccccctgcagcgcgtgttctgcgtggtgaggtctggggacgcgccagcggccctgccagcccctttccccactacccctgtgaggacgagccctcccgccgtgtcactgggcagttgcagggggtgcctgtgcccctcttgccacctggccacccggctccaaaagccgagctgtgcatcctgcttcccttgcagggatccccagcagcaagacgggcctttgtcccccagctccggagtgggaagttcaacgtcttgctgacgacgtacgagtacatcatcaaagacaagcacatcctcgccaaggtaacgtgtccctgtgggaaatgccaggccatgggccgagtgctcacacgtgggtcacgctgcccgtctcctccaaagcccctacaagtttcttcccggagtcccacctgcatgtgcgtgaagacagctgccctgtgtaggggaaaggcctaggtgggggcgacctcaggtttacctccctaactgtctccaggcaggccctgagtcaggcccagaagctggggccatctacacagcatgcgctctgcctcctctcgggccttctgcccagagagcctcagcaccaaggcgtctcctgacccgcctacagagtccccatggggccttggccagaccagtcttgtcctcctgtctcattgccttggccgtccctccctggggccctggcttctcaccacaggccatgggctgagattcagcatgtgggggagagctcgagggccaaataccatgactgcctgctggccttgggcagctggttcgggctgttctgtgagggtcctactgtcctggaagcctcttctgggacgaaactgtgaagggagtcccagcgtggccatgactgagaatacggcccagatagaaaacagacatagccctctgcctccaaaaactcatgttcctcatttgaggaggggtaaagatgtacctggtctcacccctaaacatccagctgagtgagtgttgaacagtagagagttttttgcgttttggtttttttttttttgagaccgagtctcgctctgttgcccatgctggagtgcagtgatgtgatcacagctcactgcaggcctgacctcctggcctcaagcgatcctcccacctcaccctcctgagtagctgggactacaggtgtgcgccaccactcccagctaacttttttaaatttattttttatggagatggggtcttgctgtactgcccaggctggtctcaaactcctggcctcaaggaatcctctcgccttggcctcacaaagcactgggcaactgtgtctggcctaacagtagagttcttgacccaggtatggggggatggaggagctgtttatgggtggctccgcctctcagtgcatggct

SEQ ID NO: 20744 - DNA, 2300 bp, Homo sapien
agcacatcctcgccaaggtaacgtgtccctgtgggaaatgccaggccatgggccgagtgctcacacgtgggtcacgctgcccgtctcctccaaagcccctacaagtttcttcccggagtcccacctgcatgtgcgtgaagacagctgccctgtgtaggggaaaggcctaggtgggggcgacctcaggtttacctccctaactgtctccaggcaggccctgagtcaggcccagaagctggggccatctacacagcatgcgctctgcctcctctcgggccttctgcccagagagcctcagcaccaaggcgtctcctgacccgcctacagagtccccatggggccttggccagaccagtcttgtcctcctgtctcattgccttggccgtccctccctggggccctggcttctcaccacaggccatgggctgagattcagcatgtgggggagagctcgagggccaaataccatgactgcctgctggccttgggcagctggttcgggctgttctgtgagggtcctactgtcctggaagcctcttctgggacgaaactgtgaagggagtcccagcgtggccatgactgagaatacggcccagatagaaaacagacatagccctctgcctccaaaaactcatgttcctcatttgaggaggggtaaagatgtacctggtctcacccctaaacatccagctgagtgagtgttgaacagtagagagttttttgcgttttggtttttttttttttgagaccgagtctcgctctgttgcccatgctggagtgcagtgatgtgatcacagctcactgcaggcctgacctcctggcctcaagcgatcctcccacctcaccctcctgagtagctgggactacaggtgtgcgccaccactcccagctaacttttttaaatttattttttatggagatggggtcttgctgtactgcccaggctggtctcaaactcctggcctcaaggaatcctctcgccttggcctcacaaagcactgggcaactgtgtctggcctaacagtagagttcttgacccaggtatggggggatggaggagctgtttatgggtggctccgcctctcagtgcatggctggagtgacagtactggaatactggggctgtgaactgggtgttttcttttctttttctcttcttttttttttttattgagacagagtctcacagctgtcacccaggctggagtgcagtggagcgatctcagctcactgcaacaacctctgcctcctgggttcaagtgattctcctgcctcagccttccgaggactgggtgctttatcccggagccaacaagggaggaaactgaggcccagggagctgggtatcccacgtgcaggctcttacctcaggtccatgcttcaggtgcctcctttgtggctcacccctgctgactccttacaaagccaggccgttggcaggcacaggaaccaggctctgaaaccccgtgctcccctgccagtggctcagttgatgtaatcaccctgcagtgggagtgctctttgagtgcggccactgcgccccctcccgacccgcatggccctgtatgtagtggcgctggcccctaccccatggggcccacattctgaaccacaggctgctcattagaaatgtaccgtcaccaacccagttcccctgagaccctccacaccagcaggacaagtcccccagtcagcaagatgtgtcttctgccagaacgtgctcggcatttttctgtgctgtagattcatatgtgtgattttgcagggaagccagattgcttttttgcaatttgcattgttcacctgccaatagtcatggggtcacgggcctgtctctgcccaaggcttgcaagaggctacgttgtgtggctccaactcggtgagtcagccccggggcaggacgtcaggcctgtgctctccacccagctgcgctcttccacctggagccttcctggctgctgggcgcagagtgggagattctccccatgtgccgggccacctgctgccccctgccctgattgcccactctggggcccgcagatccgttggaagtacatgattgtggacgaaggtcaccgcatgaagaaccaccactgcaagctgacgcaggtgctcaacacgcactatgtggcaccccgccgcctgctgctgacgggcacaccgctgcagaacaagcttcccgagctctgggcgctgctcaacttcctgctgcccaccatcttcaagagctgcagcaccttcgagcagtggtttaacgcaccctttgccatgaccggggaaaaggtgggtttgcccagctg

SEQ ID NO: 20745 - DNA, 2300 bp, Homo sapien
gcttgttctgaactcctaggctcaagtgatccccccgcctcaccctcccaaagtgctgggattacaggcatgagccaccacatccagacttcacttttttgtttaatgtcgcaaatggcataaggaatgggattcaatggggacacatttataaacgttgcagcagctcctagaacttgcctatccttgtaaacttctctaggtgattgctaattacttctttttttttttttttttttgagacggagtctcactctgtcgcccaggctggagtacagtggcgcaatctcgtctcactgcaaactccacctcccgggttcacgccattctcctgcctcagcctcccgagtagctgggactacaggcacccgccaccacgcccggctaattttttgtatttttttttagtagaggtggggtttcactgtgttatccaggatggtcttgatctcctgacctcgtgatccacctgcctcagcctcccaaagtgctgggattacaggcgtgagccaccatgcccagcccgctaattatttcaatttgaccttgacactgagcctgccaagtaggttcaagcattttgatggcccctttacaggttgggaaagctaatttatctgtccaaggccgaattctgaaactgagtcttaactgccaaaaattcttatcatcaatttcttcttctgggttgggcacagtggctcatgcctgtaaagccagcaatttgagaggcatcatgatgcaagaggaagaggattgagtgaagctaggagtttgggaccagcctgggcaacatagtgagaccccatctataaaaaaaaattaaaaattagttgggcatggtggtgcactcctgtggtcctagctattcaggaggctgaggtgggaggattccttgagcccagggttgacgctgcagagagctgtgatcacgccactgcagtccagcctgagtgacagctggaaataatgataaataaataataaataattatttaaaaaattataataaaaataattaaaaaattattttccctgattaatctttttttttgtccttctgagagttcaatttgtcccttttctgcctggtctcctaggtttccctaaaatcctgctgagaggttagcactgcctgccaaagtcagtttgcaaaatcccagagaaatccagcttattcctgggggaaccgccaagactgcccagccctgtgtggggttcaggcaagtttctcacatgtgcctttttggcaagaggcctctggcaaccccatgagtccccaaagagactcaattctaaaagttggtctccaccagctctctgtggcttaggggttcaagttcaactgtgaaagccctgttttgttttgattttgctttgagggagaggaaaccgcccttctgtttgttcaactccttctcctaaggggagaaatcaatatttacgtccagactccaggtatccgtacaattgatttttcagatgtttatactcagccaaaggcgggatcccacaaaacaaaaaatatttttttggctgtacttttgtgaagattttatttaaattcctgattgatcagtgtctattaggtgatttggaataacaatgtaaaaacaatatacaacgaaaggaagctaaaaatctatacacaattcctagaaaggaaaaggcaaatatagaaagtggcggaagttcccaacatttttagtgttttccttttgaggcagagaggacaatggcattaggctattggaggatcttgaaaggctgttgttatccttctgtggacaacaacagcaaaatgttaacagttaaacatcgagaaatttcaggaggatctttcagaagatgcgtttccaattttgagggggcgtcagctcttcaccggagacccaaatacaacaaatcaagtcgcctgccctggcgacactttcgaaggactggagtgggaatcagagcttcacgggttaaaaagccgatgtcacatcggccgttcgaaactcctcctcttgcagtgaggtgaagacatttgaaaatcaccccactgcaaactcctccccctgctagaaacctcacattgaaatgctgtaaatgacgtgggccccgagtgcaatcgcgggaagccagggtttccagctaggacacagcaggtcgtgatccgggtcgggacactgcctggcagaggctgcgagcatggggccctggggctggaaattgcgctggaccgtcgccttgctcctcgccgcggcggggactgcaggtaaggcttgctccaggcgccagaataggttgagagggag

SEQ ID NO: 20746 - DNA, 2300 bp, Homo sapien
gtcagtttgcaaaatcccagagaaatccagcttattcctgggggaaccgccaagactgcccagccctgtgtggggttcaggcaagtttctcacatgtgcctttttggcaagaggcctctggcaaccccatgagtccccaaagagactcaattctaaaagttggtctccaccagctctctgtggcttaggggttcaagttcaactgtgaaagccctgttttgttttgattttgctttgagggagaggaaaccgcccttctgtttgttcaactccttctcctaaggggagaaatcaatatttacgtccagactccaggtatccgtacaattgatttttcagatgtttatactcagccaaaggcgggatcccacaaaacaaaaaatatttttttggctgtacttttgtgaagattttatttaaattcctgattgatcagtgtctattaggtgatttggaataacaatgtaaaaacaatatacaacgaaaggaagctaaaaatctatacacaattcctagaaaggaaaaggcaaatatagaaagtggcggaagttcccaacatttttagtgttttccttttgaggcagagaggacaatggcattaggctattggaggatcttgaaaggctgttgttatccttctgtggacaacaacagcaaaatgttaacagttaaacatcgagaaatttcaggaggatctttcagaagatgcgtttccaattttgagggggcgtcagctcttcaccggagacccaaatacaacaaatcaagtcgcctgccctggcgacactttcgaaggactggagtgggaatcagagcttcacgggttaaaaagccgatgtcacatcggccgttcgaaactcctcctcttgcagtgaggtgaagacatttgaaaatcaccccactgcaaactcctccccctgctagaaacctcacattgaaatgctgtaaatgacgtgggccccgagtgcaatcgcgggaagccagggtttccagctaggacacagcaggtcgtgatccgggtcgggacactgcctggcagaggctgcgagcatggggccctggggctggaaattgcgctggaccgtcgccttgctcctcgccgcggcggggactgcaggtaaggcttgctccaggcgccagaataggttgagagggagcccccggggggcccttgggaatttatttttttgggtacaaataatcactccatccctgggagacttgtggggtaatggcacggggtccttcccaaacggctggagggggcgctggaggggggcgctgaggggagcgcgagggtcgggaggagtctgagggatttaagggaaacggggcaccgctgtcccccaagtctccacagggtgagggaccgcatcttctttgagacggagtctagctctgtcgcccaggatggagtgcagtggcacgatctcagctcactgcaacctccgcctcccgggtttaagcgagtctcctctctcagcctcccgaatagctgggattacaggcgcccaaccaccacgcccgcctaatttttgtatttttagtagagacgggttttcaccattttggccaggctggtctcgaaccccgacctcaggtgatctgcccaaaagtgctgggattacaggcgtcagccaccgcgcccggccgggaccctctcttctaactcggagctgggtgtggggacctccagtcctaaaacaagggatcactcccacccccgccttaagtccttctgggggcgagggcgactggagacccggatgtccagcctggaggtcaccgcgggctcaggggtcccgatccgctttgcgcgaccccagggcgccactgccatcctgagttgggtgcagtcccgggattccgccgcgtgctccgggacgggggccaccccctcccgcccctgcccccgcccctttggcccgccccccgaattccattgggtgtagtccaacaggccaccctcgagccactccccttgtccaatgtgaggcggtggaggcggaggcgggcgtcgggaggacggggcttgtgtacgagcggggcggggctggcgcggaagtctgagcctcaccttgtccggggcgaggcggatgcaggggaggcctggcgttcctccgcggttcctgtcacaaaggcgacgacaagtcccgggtccccggagccgcctccgcgacatacacgagtcgccctccgttatcctgggccctcctggcgaagtccccggtttccgctgtgctctgtggcgacacctccgtccccaccttgtcctggggggcgccctcgccccaccagcc

SEQ ID NO: 20747 - DNA, 2300 bp, Homo sapien
ctcgagttgcacaatcttgcctggcttatctctgggacacctcctggcagctaataagaaagggctatctttagccactatggcttagaaaggttaggaacctgccaaggtcacaggtaagctgcagcatcagaaagtgaacctgaagtcttttcccctcttgatttcactctgcctaattgttattcactgcctttaggcacaaagaagtgaggtctatgccaacattacacagctggttcaagaagccatgctctcaggcaccaaagggtgacacacacctgtagtcccggctacttggaaggttgaaatgaaaggatcacctgagccactgcacttcagcctgggggacagaacaagaccccatctcaaaaaaaaaaaaaaaaaagaaggaagaaaagaaggccgggcacagtggcttacgcctgtaatcccagcactttgggaggccgaggcaggtggatcacctgaggtcgggagttcaagaccagcctgaccaacatggagaaaccccgtctctactaaaaatacaaaattagctgggcatggtgacgcatgcctgtaatcccagctactcgggaggctgaggcaggagaatcacttgaacctgggaggtggtggttgcagtgagctgagatcgcgccattgcactccagcctgggcaacaacagcgaaactctgtctcaagaaaaaaaaaaaagaaaagaaaagaaaagaaaaaaaaatcataggaaagcaatgagatgttctttaggtggtagcacacataaaaatgttgccacgccaggcgcggtggctcacgcctataatcccagcactttgggagcctgaggcaggcagatcacgaggtcaggagttcaagaccaacctggccaacataatgaaaccccgtttctactaaaaatacaaaaaatcagctgggtgcggtggcgggcacctgtaatcccagctactcgggaggctgatgcaggagaatgccttgaacccaggaagcaggctggaatgccttgcactccagcctgggcaacagagtgagactctgtcttaaaaaaaaagagagagaaagaaaaaaagatgccatcttaacatcttgtttcttgcagaaataccagtgtctagcatggaaccagcaccttagagtcagcactgatcttttctttgttttgttttgttttgagacaggctagtctcaaactccagggctcaagcgatcctcctgtcttagccttccaaagagctcagacttacaggcgtgagccactgcacccagctacatgctaggattctatgtatgtttcattaaacaactatatagcacctactgaataggagacactatcacgccaggctgggctcggtggctcacgcctgtaatcccagcactttgggaggcggaggcaggaggattgctggaggccaggaggtcgaagttgcaatgagctatgattgtggcactgcacttcagcctgggtgacagagcaataccttgtctctaaaaaaaaagtaataagaagaattctcacgccaacgctgacacaggcactagtatgaccctcattttactaaggaggaaagtaccgcacagagaggtgaagtctgtccagggtaacacagctagtaagtggcaacgctgggattcgaacccagtaaatctggctgcagacgccattttgctatgcagcctctcatagaatctacttattctctatgcttattgtgtatcccacgcacacactgtaggatgtaagttccaggagaagctgctcgctgctttgccgttagaaccccaccctgcacagagcaagcgctcgacctatggagaaataaacagccgctttctctcccgcgcaggcgcatcgggaaggataacggagcctcccccttcctgcgccgattggtcatcaccgatgactgacggaggagtggtcgcaggcgcaccaggccagaccaaaggcggcttagcccagtctaagatcctgttccccatgcctattggccattgcttatgactgacgtatcaaaaaatccaatggaaagcaacctcttctggaagagggcgggccccgcggacagtcaaatttgcgcgggttggagcctggcgtagtcatggccgccttccgcgacatagaggaggtgagccaggggctgctcagcctgctgggcgccaaccgcgcggaggcgcagcagcgacggctgctggggcgccacgagcaggtggtggagcggctgctggaaacgcaagacggtgccgagaagcagctgcgaggtgagggtcggagcgtggtcgcgggcccacgggg

SEQ ID NO: 20748 - DNA, 2300 bp, Homo sapien
tctcctcagatccttgcaggaagacgaggttcccttcttccccaaccccttagcgcctcaacccccatccttccgtgtggccagctccgggcctgggctgaggggagggggtgcaggaagggtggggcctgttgggcttggggccccccagccccagggctatgtggaggctgggctatgggaacagctggagcctgtccagggcctggacagatgtgcaagcaggcagtgaggtttggtttctttgttccagacctgcgggggggagggggtcggggggggcccttccgcagccaggctgggtgtgcgtctatgagtgggtcccagacctgggttggggggctgggtgaaccagctgtggagggggctggcctcatctcctcccctccccctacagactcctaactcccggcgccgtggttctctttccccaggtaagcctcagccggtgctgcaggcagtctgactcgcagtccctcaagtgacttccaaggagcatctgtagaaaagaagatggcccaggtcctgcacgtgcctgctcccttcccaggtcaggggactcagggaagagggccctgccccggggagcttcagttctggaggcctgagggggctggggaccttgccctggggactttgagggtgggacacagcccaacaattagaggtctgagggaggaggcagagtcctgccctgggagggtctgaagggggaggcagagtcttaccggaaaaagggggtagtctaagccgagggatagagccctgtcctgggggatttgagaggcgacatagcctagcgccgggagtctgaaggggaggcatagccctgctctggagggtctgagagcagacgcggttgagtaccaggtgggctcccatctcttcggcaaataaaccccaactctccccaggcatcagtcttcaccctgagaatggggacaagaggattcaaaggtcctggtgtttctcccatccccagggacccctggcccagcctccccacctgccttccctgccaaggaccccgatccaccctactccgtggagaccccctatggctaccgcctggacctggacttcctcaagtacgtggatgacatcgagaagggccacacgctgcgacgcgtggcagtgcagcgccgcccccgcctgagctcgctgccccgtggccctggctcctggtggacgtccactgagtcgctgtgctccaatgccagtggggacagccgccactcagcctattcctactgcggccgtggcttctaccctcagtatggtgctctggagacccgcggtggcttcaatccgcgggtggagcgcacgctgctggatgcccgtcgccgtctcgaggaccaggcggccacacccaccggcctgggctccctgacccccagtgcggccggctcgacagcctccctggtgggcgtggggttgccacccccgacaccacggagttcaggactgtccacaccggtgcctcccagtgccgggcacctggcccacgtgcgggagcagatggcgggtgccctgcggaagctgcggcagctggaggagcaggtgaagctgatccctgtgctccaggtgaagctctcggtgctccaggaggaaaagcggcagctcacagtacaacttaagagccagaagttcctgggccaccccacagcgggccggggtcgcagcgagctctgcctggacctccccgatcccccagaggacccagtggcactggagacccggagtgtgggcacctgggttcgagaacgggacttgggcatgcctgatggggaggctgccctcgccgccaaggtcgctgtgctggagacccagctcaagaaggcgctgcaggagctgcaggcagctcaggcccggcaggctgacccccagccccaggcctggccaccgccggacagcccggtccgcgtggatacagtccgggtggtagaagggccacgggaggtggaggtggtggccagcacagccgctggcgcccccgcacagcgggcccagagcctggagccttacggcacagggctgagggccctggcaatgcctggtaggcctgagagcccacctgtgttccgcagccaggaggtggtggagacaatgtgcccagtgcccgctgcagctaccagcaacgtccatatggtgaagaagattagcatcacagagcgaagctgcgatggagcagcaggtaagcggtcgcaggcaggcaggggagaatggcttggggggggggggcctctttcttcccatggctcatcctggactctcagaacgccagggtccaggcagggtgc

SEQ ID NO: 20749 - DNA, 2300 bp, Homo sapien
cccgctgccgcgcccgccccgcgcgccctccccgagctgggccccggccagctccaccccctcccgccgccgagccgttccgccccccgcagcggcccagggacagcaggcggtgggggggaggccggcagtgggaggaccctgcctcggggacttagggaggaaggaaggacgaggccggacaccccggcgcgcacacacacctgctgtccaggtgagatccagtctccaaccagcgtctctccatccccaccccccaccgcggccggggcgcccgggcggctggagggggcggtgccggctgggggggcgggaccagccggagggggcgtggtgcgggcggagccacctccgagggccgggcgcccaggctgcggcgcgcgcgaagacgctcgggcggcgggacccagggaaggcagcggccggagcgcgcaaggcgagtgggacccggggctgggtaggggttcaagtctggttcggggatcgagtgtgcaccccctccacacacacctactaccctaccccccgcctccaaccctgggacacgacctcgctggtctcaacgagccgctgcctccaactccaccttctgtgcccaaactttccagacttggagtgtctgtccccgcgtccctgccccctcctcgtctttgaccccatacccccatcgattcctcccagtaccccccatcgattcctcgtgccctgcccgtttctcctgtcttggctcccctctgcccgctctcccctgtctctgtcccactttctgcctctgttcctccccggctctgccctctccccgcactgtcccccctcgccctcctccgcggccatgccccagacggcgggaaggcggccgggcgtccggccgggctgggcctgggcttggcggctgggccggcgtggggagcggcagctgtttgccattagcccgggatcccacaggccccgccccctctctgcacggggcggggtccttctcgcctccccccaccccgagtttggggcgggaagacccccccccaccaccaccaccgacctccgcgatgtgcaggccggtcttgggtggtgggttggggagacccgcgccccttccctgcgctccctacctgtcccctcttataggctccagtctctccatctctgtcttatcctgtcaccccttccccattccccaggggtcccatggcgagagaagggtctcagccacagacatccatctcccccaccacaccccctcgtctcctttctcttccccttactcgggacgtgctggtcctcatcgagggcggtgagatgactgagtaccctcagacctcagtctccgtatctgggaaacgggtagagatatctgatgtggagtctgagggtggtggcttggtgggcagtggggggatccaccaggcttaggttcatgttcaggcccagccacttccccatggccccagtgaccccgaggaagccactgtacctttctgtaccctctgcatcccctgtctgtgaaacggggcgataagtgcccatctcatagaattgtcatgacaattaaaagagttgatgttaggctgggtgcagtggctcatgcctgtaatcccagcactttgggaggccaaggcgggcggatcacctgaggtcaggagttcgagaccagcctgaccaacatggagaaacaccatctctactaaaaatacagaattagctaggcgtggtggcaggtgcctgtaatcccagctactcaggaggctgaggcaggagaatcgcttgaacctgggaggcagaggttgccgtgagctgagatcgcgccattgcactccagcctgggcgacaagagcaaaactccgtctcagaaaaaaaaaaaaaaaagagttgatgttagtattactgttactatactatttacccagcagcaccctcacttcccccacccccagcccaccccgctcggctattccaatcctgctccaatcccgcttgctccctgcttctccatctctctttggtggccagaaaatattttcaatcaactttctgttgctcaggggtgagcctccaggcaaatggaaaacggaatttcctgcaattggtgaccatgtgttccaggtgttgaaagacagagaagcgaagacagagacgtggaaagacagggagagagacacggagagagacgcagaaggacagagacgtggagagagacgcagagagacagagacgtggagagacacagagagacgtggagagacacagagagacttggagagagacaaagcaagacaggacgggagaacaaggacaagctcagg

SEQ ID NO: 20750 - DNA, 2300 bp, Homo sapien
caagacaggagaaacgggcagggcacgaggaatcgatggggggtactgggaggaatcgatgggggtatggggtcaaagacgaggagggggcagggacgcggggacagacactccaagtctggaaagtttgggcacagaaggtggagttggaggcagcggctcgttgagaccagcgaggtcgtgtcccagggttggaggcggggggtagggtagtaggtgtgtgtggagggggtgcacactcgatccccgaaccagacttgaacccctacccagccccgggtcccactcgccttgcgcgctccggccgctgccttccctgggtcccgccgcccgagcgtcttcgcgcgcgccgcagcctgggcgcccggccctcggaggtggctccgcccgcaccacgccccctccggctggtcccgcccccccagccggcaccgccccctccagccgcccgggcgccccggccgcggtggggggtggggatggagagacgctggttggagactggatctcacctggacagcaggtgtgtgtgcgcgccggggtgtccggcctcgtccttccttcctccctaagtccccgaggcagggtcctcccactgccggcctcccccccaccgcctgctgtccctgggccgctgcggggggcggaacggctcggcggcgggagggggtggagctggccggggcccagctcggggagggcgcgcggggcgggcgcggcagcgggaggtcacccctcccccaggcggcccagggctggaagcggcccagcgcagtcctggcacacggtggcgtgaccgccgcgcgagaagggaggctgcagagtcctgggcgccggcgccagccagacctgcattcccatcccagacccaccaaacttttgctgctctgtgcctcagtttattcatctgtaaaatggagatgatcatgttagctacctgataggagcgttgagaagattcactgaccattaggaaggggcctaaccatcaggaaggaggcccttcgggttaaaaactctcataaatggagtggcctacttttgcagagatctttctgggagcccttttagtacacagccagccactcagcaagggcttaataaatattattaagccggcgaggtggctcacacctgtaatctcagtgcttagggaggccaaggcaagaggactgcttgaactcaggagttcgagaccagcctgggcaacatagcaagaccctgtctatgcaaaaaaatttttaagtgaaaaaaaattaggccaggcgcagtggctcatgcctgtaatcgtagcactttgggaggccaaggtgggcggattatttgagccaaggagttggagaccagctttggcaatatggtaagacgccatctctacaaaaaacaaaatacaaaaaaccacctggggccgagaaatggctcatgcctgtaatcccagcactttgggagtccgaggtgggtggatcatctgaggtcaggagttcaagaccagcctggccaacatggtgaaaccccttctctactaaaaatacaaaaactatcctggcatggtggtgcacatctgtaatcccagctactcgggaggctgaggtatgagaataacttgaatctgggaggtggaggttgccgtgagccgagattgcaccactgcactgcagcctgggtgacagagtgaaactctgtctaaaaaaaaaaaaaagaaaaagaaaaaaaagccaggcacagtggcatgtgcctataatctctgctactcaggaggcttgagccccggagtttgaggctgcagtgagctatgactgtgacactgcattccagcctgggggactgagtgagagcgtctgttaaaaacaaacaaacaaaaaccaggtattgttattgcaggtaagcatgtgacattatttgtgtgttgccttccctactagaacatcagctccacaagggcaggaatttttgcctgttgtcaccacgatgtccctggcacccagtatgttcttggtgtccccattgatgatgcagggatgtgtggatatggggcagtggactgtgagcatgtgatgagcatgtgacccagcccctagtgaccgcaccacatggcacaggttgcttataaaaaccattttaaattaaaaaagggaggaagcatcagtgcacacagatggggacacaggggcagagggcccagccccaagtacagtgtggtcaccccacagcccagtgggcaccagggcagactcccctcgcagcacagacagctgaggcccgggtgctggttcctctaggtacagctttggtccttgtgg

SEQ ID NO: 20751 - DNA, 2300 bp, Homo sapien
aggaggaagaggatgtgggctgggaggtctatggagttgggggccccatggccatgctgacccaccctcattctttttccaggaactccttgaacagagcaagtttccgaaaggcagacctctgagcccacaaggaccaaagctgtacctagaggaaccagcacccgggcctcagctgtctgtgctgcgaggggagtctgccctggtgcccactgggctgtggggtgaccacactgtacttggggctgggccctctgcccctgtgtccccatctgtgtgcactgatgcttcctcccttttttaatttaaaatggtttttataagcaacctgtgccatgtggtgcggtcactaggggctgggtcacatgctcatcacatgctcacagtccactgccccatatccacacatccctgcatcatcaatggggacaccaagaacatactgggtgccagggacatcgtggtgacaacaggcaaaaattcctgcccttgtggagctgatgttctagtagggaaggcaacacacaaataatgtcacatgcttacctgcaataacaatacctggtttttgtttgtttgtttttaacagacgctctcactcagtcccccaggctggaatgcagtgtcacagtcatagctcactgcagcctcaaactccggggctcaagcctcctgagtagcagagattataggcacatgccactgtgcctggcttttttttctttttcttttttttttttttagacagagtttcactctgtcacccaggctgcagtgcagtggtgcaatctcggctcacggcaacctccacctcccagattcaagttattctcatacctcagcctcccgagtagctgggattacagatgtgcaccaccatgccaggatagtttttgtatttttagtagagaaggggtttcaccatgttggccaggctggtcttgaactcctgacctcagatgatccacccacctcggactcccaaagtgctgggattacaggcatgagccatttctcggccccaggtggttttttgtattttgttttttgtagagatggcgtcttaccatattgccaaagctggtctccaactccttggctcaaataatccgcccaccttggcctcccaaagtgctacgattacaggcatgagccactgcgcctggcctaattttttttcacttaaaaatttttttgcatagacagggtcttgctatgttgcccaggctggtctcgaactcctgagttcaagcagtcctcttgccttggcctccctaagcactgagattacaggtgtgagccacctcgccggcttaataatatttattaagcccttgctgagtggctggctgtgtactaaaagggctcccagaaagatctctgcaaaagtaggccactccatttatgagagtttttaacccgaagggcctccttcctgatggttaggccccttcctaatggtcagtgaatcttctcaacgctcctatcaggtagctaacatgatcatctccattttacagatgaataaactgaggcacagagcagcaaaagtttggtgggtctgggatgggaatgcaggtctggctggcgccggcgcccaggactctgcagcctcccttctcgcgcggcggtcacgccaccgtgtgccaggactgcgctgggccgcttccagccctgggccgcctgggggaggggtgacctcccgctgccgcgcccgccccgcgcgccctccccgagctgggccccggccagctccaccccctcccgccgccgagccgttccgccccccgcagcggcccagggacagcaggcggtgggggggaggccggcagtgggaggaccctgcctcggggacttagggaggaaggaaggacgaggccggacaccccggcgcgcacacacacctgctgtccaggtgagatccagtctccaaccagcgtctctccatccccaccccccaccgcggccggggcgcccgggcggctggagggggcggtgccggctgggggggcgggaccagccggagggggcgtggtgcgggcggagccacctccgagggccgggcgcccaggctgcggcgcgcgcgaagacgctcgggcggcgggacccagggaaggcagcggccggagcgcgcaaggcgagtgggacccggggctgggtaggggttcaagtctggttcggggatcgagtgtgcaccccctccacacacacctactaccctaccccccgcctccaaccctgggacacgacctcgctggtctcaacgagccgctgcctccaactccaccttctgtgcccaa

SEQ ID NO: 20752 - DNA, 2300 bp, Homo sapien
cagcatgagccaccaccacgcctggctgcggtggcttcaattttgcataagcatctgaatatgtcatccagatgtacaaaggcagggcaggctctgagcagtcatttcccagatacatgaattcatctttctgagcctcagtttctacatctgtaaaatggggatgattcataccttccgtggtggactgcaagagagaatcggagaatcccacagccagatcagggacaggagagatcccagaaggatccttggaggaagacgaggaggaggaggaagaggatgtgggctgggaggtctatggagttgggggccccatggccatgctgacccaccctcattctttttccaggaactccttgaacagagcaagtttccgaaaggcagacctctgagcccacaaggaccaaagctgtacctagaggaaccagcacccgggcctcagctgtctgtgctgcgaggggagtctgccctggtgcccactgggctgtggggtgaccacactgtacttggggctgggccctctgcccctgtgtccccatctgtgtgcactgatgcttcctcccttttttaatttaaaatggtttttataagcaacctgtgccatgtggtgcggtcactaggggctgggtcacatgctcatcacatgctcacagtccactgccccatatccacacatccctgcatcatcaatggggacaccaagaacatactgggtgccagggacatcgtggtgacaacaggcaaaaattcctgcccttgtggagctgatgttctagtagggaaggcaacacacaaataatgtcacatgcttacctgcaataacaatacctggtttttgtttgtttgtttttaacagacgctctcactcagtcccccaggctggaatgcagtgtcacagtcatagctcactgcagcctcaaactccggggctcaagcctcctgagtagcagagattataggcacatgccactgtgcctggcttttttttctttttcttttttttttttttagacagagtttcactctgtcacccaggctgcagtgcagtggtgcaatctcggctcacggcaacctccacctcccagattcaagttattctcatacctcagcctcccgagtagctgggattacagatgtgcaccaccatgccaggatagtttttgtatttttagtagagaaggggtttcaccatgttggccaggctggtcttgaactcctgacctcagatgatccacccacctcggactcccaaagtgctgggattacaggcatgagccatttctcggccccaggtggttttttgtattttgttttttgtagagatggcgtcttaccatattgccaaagctggtctccaactccttggctcaaataatccgcccaccttggcctcccaaagtgctacgattacaggcatgagccactgcgcctggcctaattttttttcacttaaaaatttttttgcatagacagggtcttgctatgttgcccaggctggtctcgaactcctgagttcaagcagtcctcttgccttggcctccctaagcactgagattacaggtgtgagccacctcgccggcttaataatatttattaagcccttgctgagtggctggctgtgtactaaaagggctcccagaaagatctctgcaaaagtaggccactccatttatgagagtttttaacccgaagggcctccttcctgatggttaggccccttcctaatggtcagtgaatcttctcaacgctcctatcaggtagctaacatgatcatctccattttacagatgaataaactgaggcacagagcagcaaaagtttggtgggtctgggatgggaatgcaggtctggctggcgccggcgcccaggactctgcagcctcccttctcgcgcggcggtcacgccaccgtgtgccaggactgcgctgggccgcttccagccctgggccgcctgggggaggggtgacctcccgctgccgcgcccgccccgcgcgccctccccgagctgggccccggccagctccaccccctcccgccgccgagccgttccgccccccgcagcggcccagggacagcaggcggtgggggggaggccggcagtgggaggaccctgcctcggggacttagggaggaaggaaggacgaggccggacaccccggcgcgcacacacacctgctgtccaggtgagatccagtctccaaccagcgtctctccatccccaccccccaccgcggccggggcgcccgggcggctggagggggcggtgccggctgggggggcgggaccagccggaggggg

SEQ ID NO: 20753 - DNA, 2300 bp, Homo sapien
ccgagatcataccactggactgcagccatctcaaaaaaaaaaatacacgggtggggttaaggggagggatagcattagaagaagtatctaatgtaggtgacaggttgatgggtgcagcaaaccaccatggcacgtgtatacctatgtaacaaaactgcacgttctgcgcatgtaccccaaagtattaaaaaaaagattacgaaaaaaaaccatacacacacaaaagcctcaggggaagaaaccagggggtggacacaggccttctgacagtcagcaaacctcacaggatgcctgttttgagccaggcttgatgccagcacccgctgggggtgaggggcatattaccacatgccagaaggcagttgggcatggaggtcatgggcacagggccagatgggtgggtgtttgggtcttggccctggggaatgcctctgtctctgagactcactttcctctttgaggaataggaaaaaaaaactgcttctcccatcaatgagggaagacagatgggtgaagtgcagatgtacatcgtacctgtgccatagaatattcttgctaaaagtggtgaagggctgggagagtggtggctcacacctgtaatcccagctaatcaagaggccaaggcaggaggatcacttgagcccaggagttcaagaccaactagggcaatatagtgagaccctgactctacaaaaactaaaataaaattatttgggcatggtggcatgtacctgtagttccagctatgtgggaggctagggtgggagcatctcttgagcccaggagttggaggttgcagtgagctatgattgtaccactacactccagcctgggtgatggagtgagaccctatctcaaaaaaacaaaaaagataagtagcagtgaagaccatggagccctctgtgggagctgagtggaaaggctcaacccctatctgggataggggtggtcagggtgggcttcctggaggaggtgatggagggtgggtaggagcacggaggctcacaagggagatgggtagacaggagcacagtggagagaggaagacagtttggggaatcctgaccccacctcaccctcagggcgggctctacgaggcggtgaatgaggtctacaagaacctcatccccatcctggaagcccaccgtgactacaagaagctggccgcggtgcacggcaaactgcaggaggccttcaccaagatcatgcaccaggtgggcccaggaccccctccccagaccccaccctcagccccactcctcatccccactcctcatccccagggatctgctgaccttgacccttctcttccccacagagttccggctgggaggtgagtcagccttggtggacagccacctgcctctgggacccccgtgatgactggccagcagccatcagtgaacaccagggggcaccagaggagcatggccgctggcccttggggctggggctgtggccacaagggacccaccccattatttccctcccttccccaaaaatgcccccaccccccgccccagatctcgagggcagcttgtgactcacccagctgggagctctccagagacacccctccctctgccagggccagcttggtcactgcaggggggtggcggggtgactcttgactccctcatggtctcttggtctctttctcatctctccccagtctatcacgtggctctccctatcttggtatctcactgtctcttagtctctgtctctccctgcgtacccagcttccagcctcccccaggctctctgctcctcatttctggttaatgtgtcctcccgctccagcccccccgaatcccgcttcttccctgcttaggtctatttttaggcatctcctagtttggggagaatgttctggccaaagatggcagaaacccagagcccaggcaggcaggctgggtgggagctgggtggggagggcaggtcctcttcgcccccgcccccctcccgtctctgatctctccccccacggaatgattctcacggggcagtgttaaccaggaccctgggggttgagggaactctgacctctgacctctcccatgacattgtctctctgtcccccacacctctggccccaccatgtctgccccatcctccccggatcggccttggtaagtgaacatccagccattctacttcctttccagtcatggggtggtgtttttagggtggtagggagggggttccttcttccaaacttagggctggggacaggagcaggggaatgccatggaacaagggaaccagagccactgtcctagagtgagacacagccatcc

SEQ ID NO: 20754 - DNA, 2300 bp, Homo sapien
aacatagtgaggcccctgtctctacaaaaaaattaaaaattagctaggactaggcacggtggctcacacctgtaatcccagcactttgggaggctgaggcaggaagatcatgtgagcctaggagttcgagaccagcctgggcaacacggtgagaccccatttctacaaaaaaataaactgagtgtggtggcatgcacctgtggtcctagctactcggaaggctgaggatcacttgagcccgggaggtcaagcctacagtgagccatgatcgtgccactggactccagcctgggcaacacagtgagagcctgtctcaaaaaaaaaaaaaaaaaatgttagccagagaggatggcacacaccacctgagatcccagctactagggagctactagggaggctgaggcaggaggatggcttgagcctgggagttcaaagctgcagtgagctgtgattgtgccactgcactccagcctgggagacaagagcaaaactccgtctcaaaaaaaaaaaaaaaaaaggagctcattcattgagcacttactgtgtgctctgcaactccatggagctgactgctttgccacagtttacagtggaaggaaggcagaatcagagtggccaagtcactcacctggggtcacacagcaaggggcttaaacccaggtctgactccgaacccagtggtacttggccaaagaggacagaacacaaacccctgcccaagcagtcctcatttgggccagtccccttctgagccagaacggggaggggctggacagtgtctgtctgggtccttgggggcagttcccggagctgctgttcgaggaggacacggagctgtgtgccgacctgtgcctgaggctcctacgacactgtggcagccgcatcagcaccatccgcacgcacgccagcgcctcgctgtacctgctcatgcgacagaacttcgagatcggccacgtgagtgggggctaggaggcatggtccacacatggctctggtcagggtggccagtggggtctcaaccatacagggagtgagggagggggagacagtcattgagcataatgagcaggaggagggctcagaatgcaattgggggtcaggtgccgtggctcattcctgtaatcccagcactttgggaggctgaggtgagaggatcacttgaggccaggagtttgaggctgcagtgggccacgactgtgccactgcactccagcctgagcaagagtgagaccttgtctcaataaaaaaaaaaaaaaaaaaaaaagggccaggcacagtggctcatgcctgtaatctcagcactttgggaagctgaggcaggtggatcacttgaagtcaggagttcgagaccagcccagccaacatgatggaaccccgcatctctactaaaaatacaaaaattagctgggcatggtggcgggtgcctgtaatcccagctacttggaaggctgagacacgagaatcgcttgaacctgagaggcggaggttgcagtgagccaagattgcaccactgcattctagcctaagtgataaagtgacactcagtctcaaaaaaaaaaaaaaagaaagaaagaaagaaaagaaaaaatgctgggcgcagtggctcacacctgtaatcccagcattttgggaggcctaggcaggtgaatcacttgagttcaggagttcgagaccagcatagccaacacagtgaaaccctgtctctaccaaaaatacaaaaattagtagggcgtggtggcatatgcctgcagtcccagctactcgggaggctgaggcaggagaattgcctgaactcgggagatggaggttgcagtgagctgagatcatgccactgcactccagcctgggcgacagagtgagacccccatctcaaaaaaaataaagaacgcaagggccatgtcggcaggttgagcagactctgatgtggggtctggggtctgagactcccggctccaccctcccgcccctgtccctgcagaactttgcccgtgtgaagatgcaggtcaccatgtctctctcgtccctggtggggacgacgcagaacttcagtgaagagcacctgcgacgttcactcaaaaccatcctcacctatgctgaggaggacatggggctgcgggacagcaccttcgcagagcaggtgacacctgctgggtccccgccccgcctccccttcatataactcccaaccccaccaccttggctcccttcacttcctaatgctctcattggcccctggacgttccccggctccaggtccaggacctgatgttcaacctgcacatgatcctgacggacacggt

SEQ ID NO: 20755 - DNA, 2300 bp, Homo sapien
ggtgcagtggctcatgcctgtagtcccagcactttgggaggctgaggtgggcggatcacaaggtcaggagtttgagaccagcctgaccaacatggtgaaacccagtctctactaaaaatacaaaaaaaaaaattaggcaggcatgatgctgcatgcctgtaatcccagctacttaggatgctgaggcaggagaatcacttgaacccgggaggcagaggttgcagtgagccgagatcgcgtcactgcactccagcctaggcaacagagcaagactccatctcaaaaaaaaaaaaaaaaaaaaaaaaaaaccgggcgcagtggctcatgcctgtaatctcagcactttgggaggccgaggcgggcagatcatgaggtcaggagttcaagaccagcctggccaacatagtgaaaccccatctctactaaaaatacaaaaattagccaggcatggtggcacgcacctgcagtcccagctacttgggaggctgaggcaggagaatcactagaacctgggaggcggaggttgtggtgagccaggatcattctactgcactccagcctgggcaacagagtgagactccgcctcaaaaaaaaaaaaaaaaaaaaaagtgattttttttttttcttgagctcctatgatttgaaagagtgaatatttttaaagtccttagaacagcatctggcacataggagataccatataagtgctgattgatgctatagtaataacatcaaggccaggtgcagtggctcatacctgtaatcccagcactttgggagtccaaggtgggcggatcacttgagtccaggagttgaggaccagcctagacaacctagtgagaccacgtctctgcaaaaactacaaaaattagctgggcgtggcagcacgcacctgcagttccaactactcaggaggctgaggtgggaggatcacttgagttcaggaggttgaggctgcagtaagccaagattgtgccactgcactccagcctgggtgacagagtgagatcctgtctgaaaaaaataaaataaaattggccaagtgcagtggctcacgcctgtaatcctaatactttgggaggccgaggcgggcagatcattcgaggtcaggagtttgaaaccagtctggccaatgtggtaaaaccccatctctactaaaaatacaaaaattagccatgcacggtggcgcgcacctgtaataccagctactcgggaggctgaggcacgagaattgcttgaacccgggaggcagaggtcgcagtgggccaagatggcgccactgtactccagcttatgtgacaaagcaagactgtatccaaaaaaaaataaaataggccaggcgccatggctcatgcctatagtcccagcactttggaaggctgagacgggcagatcacaaggtcaggagtttgagactagcctggccaacatggtgaaaccccgtctctactaaaaatacaaaaattagccgggtgtggtggcgggtgcctgtaatcacagctactccggaagctgaggcaggagaattgcttgaacctggggggcggaggttgcagtgagctgagatcaggccactgtactccagccggggcaacagagcaagactccgtctcaaaaaacaataataaataaaataagtaaaataagtgaattccaggagcagacaaccagaaacccactcttggggactgttgtgagggaagacttctttttttttttttttttgagacagagtgtcgctctgttgcccaggctggagtgcagtggcgcgatctcggctcactgtaacctccacctcccaggttcaagagattctcgtgccacagcctcccgagtagctgggattacaggcgcccgccaccacacccagctaattttttgtaattttagtagagatgggattttgccacgttggccaggctggtctcgaactcctgacctcaggtgatccacccgcctctgcctcccaaagtgctggtattacaggcgtgagccactgtgcctggccatgagggaagacttctgaaatttgagacagggacagcacttaccaagggtttatctttctttccctctgtctttccctgccagagggcccaggtcagcggtcaagactggcctcaatgcttgactcagacacagaaggcgaaggggacattgcgggtaccatcaacccctctgtggccatggccattgctggtggccccctagcccctggctcccgggccagcatctcccaggggccaccaacggtgagtagggaggcttgtccccatagacatcatccactttgaatgaga

SEQ ID NO: 20756 - DNA, 2300 bp, Homo sapien
tccccctgccttggcctcctaaagtgctgggattataggcattagccaccatgcctggccccagctaatttttgtatttttagtagagacagggtttcatcatgttggccaagttgatctcgaactcctgacctcaaatgatccatccagctcggcctcccaaagtcctgggattacaggcgtgagccaccgcacccagcctcttctcccagatatttctcgtctcacagggatttctacaaactcaccatccgggaggctgggctcagtgccaggaaggcgaaaggcgtagtggacgtaggcagccagctgtgggcagtgaccgcgggcatcctgggctgcctccaggctccggtgaacaaggctgactacatgggccattgcttcaaaggctccacggcccaggttcactgcagggcagagcagaggtcaagttccagggcccaaggcctctcacctccccgcccactttccaaatataaagacatcaggatttgagggatcatgtgctcattaaggggtcacaaatttttttttttttttttttttgagatggagtcttgctctgttgcccgggctggagtccagtggcatgatctcggctcactgtcacctccgcctcccaggttcaagcaattctcctgcctcagcctcccgagtagctgggattacaggcatgcgccaccacgcccagctaattttgtatttttagtagagaaggggtttctccatgttggtcaggctggtctcaaactctcgacctcaggtgatctgcccgcctcggcctcccaaagtgctgggatgacaggcgtgaaccgctgcacccgggccaaagggtcacagaagaccttctctgggtgcaggggactggaggtcatttttcagatgagaaaaatggccagagaggtaaatgggcttatagaagatccctcaggacctcaggactgagaagccatgtggatggggaaactgaggtctgaggccacattcgcttaccaatctggccactgatgatcgggggcctgatgaccagacgcacgagcttgtccagcacgtggtgggagaaggccacaaggggttcggggctggccaggcgcagtgctgcaagactggcccgcagctcctgctccacgttgccctcgctcagcacagtgtccttgagccggaatgggaaggctccctcctccaggacgtgcaccagggtgaagaatttgtccaggtaggggtcctgggtagggatgtggagtgagcagggtggggcctcagggaatgaagaccacccctgcctgaatcagcagcttcccttaaagctgggtccagctgaccaaagtcacgtccaaggcctgaggccagacctccccggccatcggcaactgttactcaatcgtagggcaggcaagaggggagcagggcgggactcttggttcccggcccaccccgtacctgggggtgcacagaggacacggctgtgagctccacactgaacacgcccttgtgaccgtccacccagcgcatgcccggaagcgccacctgtgggagggaggcaccaggtgggcactggtcagccctccctgactgatcaggtcacccagcggccccagccattgcgacactgcagcgtgagtgtagcccggtctgggggtgcagccaagcaccctgcccccagccctggtcccagtagactgagagggtccactgggcaggctggaaatccacatgccaagacgggggcagagaatggagacacagggtgaatgaatattcattgagtaggtcaggaaacaggataggaggatttgaggcctagggtcattaacaatggtgcattcatggggaatgataaggtactacgagggcaggggacagtgatcaggaaggcagtcagggtggctaaagtgggaatggagcagagaggcaatgggaatctttggggaggacatgtaggacacagagaggcattaataggggaataatgagctacacgggggccctggaggcaccagtagaggataacaagcctcccaggattgacaggaaggaaggcaggtgactcgggagtgcttctggggacagtgcattggcaggcaggagctccagggcacatacatcgggtgtgagcacggaatagctgggcggcggctggtccacagacactgggagacagaaggggccggtcctcaggcgcccgtgctgcagcagtgggatccactggggagaggctggaggtcaggtctgcggccaggttgggggacgaggagggctcagggggagggagggaggggacggctcacagtaaagcc

SEQ ID NO: 20757 - DNA, 2300 bp, Homo sapien
caaagtggctggaccactccgggcaggcacgtgggctgtgtgcacatgtcacatgccaggctgtgagcagccctactgcggcctgactagcaggatgctatcctgcgtctgactggcagggtttgggggttcccctacaatccaggcctctttcctgtgggttcaaggtctgacatggattcattgggcagcaaggcaagaaactgtgtctcgggggtgcatggtgactcagggtgggcatgtggctcattcctgtaatcccggcactttgggaggccgaggcgggtggatcacctgaggtcaggagctccagaccagcctggccaacatggtgaaaccccgtctctactaaaaatacaaaaaattagccaggtgtgatggtgggtgcctgtaatcccagctactcgggaggctgaggcaggagaatcgcttgaacctgggaggcagaggttgcggtgagccgagattgtgccattgcactccagtctgggcaacaagagcgaaatgccacctcaaaataaataaataaataaataaataaataaataaataaataaataaataatagaggataaaatgccagcaacccatagatgggaatgagaacagcacgtgcaaaggccctgaggcagagccacggccttgtctgattcaacctcaaattctccctggggcatttgctgaccagggaaagaagggctgtccaggaggaaggacctgccggtgcagaggcatgcaggtgagaaaggggtgagctcctccagaggggagtgtcggctggagaattctctaaaaatgctgcagcagtgctgggagagaggccagtggggagagatttgagaccatagattaaccaagacatccccacctcttcctcttggtagaggcggccccgaaagtctagactcccaaactggctcactcaggtcccaccacctggacctggggcacatctccgagcactccagtgcctagccaggctcctctgactcccatgctgtagactgggagcacggacaatgcaggcgctggagacccctgtgagtcacactgagcaagcacccgaacacctctgtgcctcagtttactcatctgtaaaaggaggaaaacaataatttcttctgcatgtgtgaattgcagggccaggctcaatgacatcttagcaattagactttttgagacagggtctcgctctgtcacccaggctggattgaaatggcacaatcacagctcactgcagccttgacctcccaggctcaagcgatcctcctccctcagactcccaagtagctgagattacaggcacacaccaccatgcctggttaatttttgcattttttgtggacacggggtctcattatgttgcccaggctggtctccaactcctgggctcaaacaatcctcctgccttggccccccacagtgctgggattacaggcatgagccaccatgcacggccacgattatacttacaggtatgattattagatacatgaacatcgttattgttttccagccaggagtcagagggcagaaagagcgccccccaaaccccggaaatctggggcctacccagcctgggtcccagcgcctcccctccctccctccctcctgagcttcagtttccccagccctgctcctggggtggtaagaccaccccactaaaccccgggagcctggggtccacctagcccgggtctcagcgcctcccttccctccctccctcctcaggctcagtttctccagcccagctcccagggtggaaagagcgcccccgccagctcgggagtctggggcacccccagtctgggtcccagcgcctcctctccctaacttccctcctcagcctcagtttccccagcccttctcctagggtagaaagagcgtccccccagcccgggagtctggggcccgcccagcctggatcccggggcctcctctccgtccccagcctcagtttccccagcccccaggactccaggcgacccctccggcctgcaggggcagcacggagcggcccgggccacccggaagggccccgcccccgcgccggccccgccccgccccggctgcccagaaccgggaggcggcggcggcggcggggccggggcccggggcggcggcggcgggacgcgaggaccatggctgcctccgagcgccgcgccttcgcgcacaagatcaacaggtagtgtggccgcggggccccctcccacctcccccacgtggcccggctccgccccggggcggtgcgaccctccccgcccgggcgcccccaattcaacccctttccgcctcggccc

SEQ ID NO: 20758 - DNA, 2300 bp, Homo sapien
gattcctttccggccagttccttccaggagctgctcccacgtctacagcgccgtctgctactcacccagctctcttgtatctgagcctcattttcccaccgtcctttaagcccgttttcccactgctcatttgcagccaagtttccatctcgcatctttgcgtcccccttctctgcaccctcctttgcacccccattttcctgctttcccttgagtccacatttcccagacctcctttgccccctacattttccaatgctctcttgcatgcccatttatcaccctcttttgtgcccccatttccaggccctcagcccctggttctgaggttccttacttcaaatgaccttttttttttttttttttttttcctgaaacggaggagtctccctctgtctcccgggctggagtgcagtgatgtggtctcggctcactgcaacctccgcctcccgggttcaagagattctcctgcctcagcctcccgagtagctgggactgcaggcacccgccaccacaaccggctaattttttgtatttttagtagagacagggtttcactgcattagccaggatggtctcgatctcctgacctcgtgatctacccacctcggcctcccaaagtgctgggattactggcgtgagccaccgcgcctggcttcaaatgacctcttaaataaaggtgtggaaggacacactcctggctgtgaacagcacccgtggtccaggaggagacagcactcctctgtgaacatcttgcttagttctacatgttccaagaagcaggcgatttgacagacattcattaaattaattaaagtgtaaggtattttctcccatttgaaccatccgccttcccccaatccatgcaggacctggacccagacacaccccagcccagggctggacagagaggggatcggggtggggcaatgtgaagctgctatggttagggtggggaggtatgggggcaaagtgggctacagactgcaggatctaggcctggaggtcttcagtgctgacatacagaaggtttttggtcctgaaatgctaactacatctatcaccatggagaaaagcccaatgacctgctacttgggaggctaaggtgggaggatcacttgagccagggaggtcgtggctgcagtaagccatgatcacaccactgcactccagcctgggcaatggagcaagatcctgtctcaaaagaaaaaaacccagtgaccaatggctcacagttccaggactctctgccttacaggttcctgccctcatgttactcttggggcttcaaagcctggtcttgcttcctgtgtggcctcaggcagttcccttggcctctctgagccctgtatgaaggatgggccaagtatgggcttgggcttgggaggcccggtggcttgtagctagatttctgcatcacagagcctctggatccattcattcattctccgcgggtttcttaagtactgcagtgccaggctttggggacacagctgtttttgtttttgttttgttttgtttgagacagagtctcactccgtcaaccaggctggagtggaatggcacgacctcagatcactgcaacctccacctcctgggttcaagtgattctcctgccccagcctcccaagtagctgggattataggcgtgtgccaccacacccaggtaatttttgtattgtttgtattgttagtaggtctcaaactcctgacctcaggtgattcgcccgtctccgcctcccaacatgctttgactacaggtgtgagccactgcgcctggcaggggtcacagctgttaataggacagcccaagttcccccctcccccgcttggatcccccagtctactaggagatgtcaactgtgcaagtggttagctctgggcactatgcccacagggtcctggtggcatctggagggtaccagggtagcataccatgcctgttctctttccctgctgtgacctgtttgaaggatgaggagccaacagggggcagtttggggcacctgatttccctggaccatgagccttgctccagaacccaattgtgatgtgataaaaggcttatgaccagggcagggggcagctgctgggccgccttggacaaccatcaggcagccaggacacagaggggcagagcaagtcagcattggcgccccttcctcagatccctatcatcttgggaaacagtagcccagaggttcaggaagatgttaacttaaatgttcagggtgccccagtctgttcagcatggctgaaatccacactccgtattcttccttgaagaaactgttatcttt

SEQ ID NO: 20759 - DNA, 2300 bp, Homo sapien
agaaggggtttcaccatgttggtgaggcttgtctcaaactgacttcaagtgatccacttgcttcggcctcccaaagtgctgggattacaggcgtgagccatcacgcccagccgagggtatcttttataccaacaaattagatgactgaggtgtaatggacaaatcctatgcacaaagtgagggtatctgaatatgtgggcgggagtcaaaaatttttagctactttaacactaaagtcaaactaaagtagcttcaaaaagacttctcaagatgcagtatggcctgctgaggtttttttgttttttttttttttaagacagagagtcgctcgtcgcccaggccgcagtgcagtagcatgatctcagctcactgcaacctccacctcccgggttcaagcgattctcctgtctcagcctcctaagtagctgggactacaggcacctgccaccacgcccatctaagttttgcatttttagtagcgacggtttcaccttgttggccaggctggttttgttggccaattgtctctaaactgctgtcaaaaaaaggaatggatcagattgtcttgaatagggcagagctaacctgtaatcacctgtgtgatgagaaacagctttgactgcattttactcctgacctggcctaagctttctgtttacataagatttttcaagaattcaacttcaagtagcagccgagagagctgcctcaggattctctcaaaaactgggaataatatgggaacatttgtttcttctaaaaataaggcaaatgttacattgaatgatttggggggtgaggtttaattggaaatggtctctggggactgaaaactgatgtttttgcagattacctcagggaaacggaggtttgttgagtttacagacacattaaaccaaaggccgtgggaaaacccctctccagctccaggggattggtcaggaccacccactaaccagtgccttccttcttaacattcacttttagcagcttgtgtttattttacatgggcagttttgatgggaaattgccatgaccacaggggtttggagttctgctttttttttttcttcttctttttcgggggactgggggactcctcccaagatcacattttagcatctttctctcctactccatttagaaaaataagtaacaggtgaaatgtggtctcagtgttaacgggataattctgctaccggctcctccctgatgattctgaaatacactactgaacgagctctggctggtcctttctatcctggatgtggttcttctgtgtagcaattccttgatgtccagtttggaaagatgtactcttctcaacaagaaaaacttaaatccgtcgtgcccaaatatagttgtgcttttatttccattagtgaagtgcgtttctgggaaagggggtttgatttgcaactaagcagatatcagtcaagggctcttcaagacacagcagaaacctcaccgggcctcgggctgcctcccactgggtcccatggccaccaccttgaccttggaaagctctgttatatggaaggtagggaggacactatttccctcaactacttctagtaaaaagctcagttctctccccagcagcaagagggcacctgtgaacacctgagtcacagcgcattcctcctctgcttagaacattcgatggctcccaccttacttgcagtaaatgctgaggtccttcctgtggcccccggggccctgcatgatctgatccatcccttccctaccctcatctctccactggcctccccacacttgctcccctccggccactctggcctacttgctgctatctgaacataccaggcccctgccccaaggcctttgcccagaatgttccccctgcctctgcctggatggcccttacccaaggtagtcacagttgatatggtttggctttgtgtccccacccaaatctcatctggaattgtaatccccataatcctcacgtgtcaagggagagaccaggtggaggtcattgaatcctgggggcggttcccccatgctgttctcctgatagcaagtgagttctcacgagatctgatggttttataagggattcttccgccttctctcggctcttctccttcctgccaccttgtgaagaaggtatctggcttcccctttgccttctgttataattgtaaatttcctgaggcctccccagccatgttgaactgtgagtaaattaaacctcttatgtttttttgggtatttttttgtttttttttttttgagactcagtcctactctgccacccagctggagtgcagtggtgc

SEQ ID NO: 20760 - DNA, 2300 bp, Homo sapien
ccctactgacattgggggtggccatgtgacttgctttggccaatgaaatgtgagcagaggtggcatgtgtcccttccaaggagaagtattacaaaacagtacataatttgctgcattttcacttcacaaaacaaccatcatgggaaccaaaccttagctgttggggccgtgaagtctttgggagtgcttgttactaagcataacccagcccttcctaactaatgcacttcatcctcattcatccacgtggcagctcttgaggcagctacttttgttcccacgaggcagtgggggctcagagaagttcagcaaattgagtaaggtggaattgctgggattccaacaccagcaaaacctgggtatttcacaaagggatccaacccactttaactttctttatttagagataaagtcttgccctgtcacctaggctggagtgcagtggcacagtcataacctactgaagcctctctctctcccaggctcaagcaatccccctgcctcagcctccggagtagctaagactacatgtatgtgcccccatggtcagctaatttttttttcttttttctttttttctttttctttttttttttttttttttttttgtggccagctaattttcaaaaaaattttttgtagagttgggatctctatgttgcctaggctggccttgaactcctgagctcaaggaatcctcctgcctcagcctcccaaagggctgggattacaggcatcagacactgtgcccagcctcatttattttttaatttttttttttttttttttgagacagagtctcactccatcgtctaggctggagtgcagtggcgcgatctcggctcactgcaacctccacctcctgggttcaagcgattctcctgcctcagcctcccaagtagttgggattacaggtgtgcaccaccatgctcggctaatttttgtatatttatttatttatttgagacagagtttcgctctttttgcccaggctggagtgcagtggcgtgatctcggctcactgcaacctccgccttccgggttcaagcaattctcctgcctcagcttccagagtaactgggattacaggcatgcgtcaccacgcctggctaattttgtattttttagtagagacagggtttcttcacgttggccaggctagtctcgaactcccgacctcaggtgatctgcccacctcggcctcccaaagtgctgagattacaggtgtgagccaccgtgcccagcccctaatatttgtatttttttttttttttttttagtagagatgaggtttcaccatgttggccaggctggtcttaaattcctgacctcaagtgatccgcctgccttggcctcccaaagtactgggattacaggcataagccaccgcgcccagctctcgtttatttttatttatttgaaacagggtcttgctctgttgcccaggctggagtgctgtggtgcaatcaaggctcactgcagcctcgatgtctccagcaatcctcctgcctcagcctcccaagtagctggggttacagacgcacgccaccacacctggctaatttttgttatttttagtagagatgaggtctccttacgatgcccaagctggtctcaaactcctggcctcaagtgattctcctgcctcggcctcccaaactgctgtaattacaggccaccgcgcctggcctagcctactttaaggccggcactgcacttgacaaacactaactcagatcagaatcctcccacaactctgtgaggttgggtactctcgctatgagctacttgacggatggggaaactgaggctcaaagaggttaagtaacgcgtccaaagccacaagactagaaagtggtggagctgggactcgaaccaggcccaagactctatgcttttaacagccgtgcgtatagtagaagctctttacaagcagctgggaaaatgagatgttgcttggctaggacgggctctagacgcttggtgcagcttccagcccctcccacccgctctctgaaagccccgcccaagactcggcccctcttcgtcctcccccatcccccgctccgggaacggcccttcctccgccttctgggcggagcccgcgcgggatccgggtggctgcaggctgctggcttctgcggctgcggggtcggggtcgcggccagggccaagccgcagcgagttcacaggcggaacccctgcaggcggcgccccctacgcgaggtcacccctgggaaggagcgcagcccacccggcccctccgcatccgagcaggtctgtggggtacgggggtttgg

SEQ ID NO: 20761 - DNA, 2300 bp, Homo sapien
tgtcagtggttaacaacatgtctggtatacagcaggtgctcaataaatgggcatcattataggagaggcttacaggataaaatggctgacactccaaaccatcatgcttcatgaatggggaaactgaggctcttggctctacccttgcctgcccctccccctgcttctcatgggggaaaaaaaaaagacagcagccatttctgaagaagcatttattagcatgcagggcccatgctagaggctccttatttccagggcaaggccagcgagacagagcccattgctcaggacgcagcccagattgcaaagagaggacagcccatggtagcggaagaaattctggcggagagcactgtacttggggtccttctctcgcagctggcggtagggatcgggaccctggtggctgcctggtacctccccacccaggcctcgctccttctccacggtttgcagggcccacatggcagctgtggtgcggggttccagccagcgggcgttgacagtggccagcgtaaggctcaggaacagcaggtaaagctggcagggagagcagaggagaaggtgagccatgcctgggaggccagaggggccctagggagggtctttctgcatcctcaacagcacaggggtgggggtggggacagcactggatcaaaaaacctgcctccccctctttccttgaacccagactgagggacccaaagcagaactccagctcttctactctgaaactggcagctctgaaggaaaggctccatccccacctcctctatccccccgcaaaacctcccgagcctcttctcctctgatactcagactggaagtccccagagcaggatctctttcctcagtggccacagcccagacgcctgaagctgacattggacccacagagggtgaataaaaagtctttgagtggctgggcgcagtggctcatgcctatagtcccagcactttgggaggctgaggtgagtggatcacttgaggccaggagttcaaggacagcctgggcaacatgggcaaaaccccgtctctactaaaaatacaaaaattagccaggtgtgggggctgtccccctgtaatcccagctactcaggaggctgaggcatgaggattgcttgaacccgggaaggagaggttgcagtgagccaagattgcaccactgcactgcagcctgggcgacagagcaagaccctgtctcaaaaacaaacaaaacaaaacaaaaagtctttgaaggcaggcatggtggctcatgcctgtaatctgtaatcccggtgctttcagagatgggggtgggagcatcacttgaagccaggagttcaagaccagcctgaacaacacagcaaagaccctcatctttttttttttttttttttttgagactgagtttcactcttgttgcccaggctggagtgcaatggcgtgaccttggcccactgcaatctccgcctcctgggttcaagcaattctcctgcctcagcctcccaaatagctgggattacaggcgcacaccaccacacccagctaatttttgtatttttagtagagacggggtttcaccatgttagccaggatggtctcgcgctcctgacctcgtgatccacccacctcagcctcccaaagtgctgggattacaggcatgagccactgcgcccagcctattttttttaattaggaaaaatgtttttgccattctcacattgctataacaccatctctatctgttttaagtatttgaataccttctgagcctgtttcattaaaataaataaataaaaggaaaaaaaaacagtctgtgaagttctagttacccataatcccctcctgtctgtgagattattcttgaaacacctgtcaggtctcacttacccacgtctatgaaacataatgcaggcaagggaaggccagagtaaatagagaaatctgagatgcagagatagtttcttgccttgtggccagaaaaatgtgtggaaggggataggaaaccataaattcccagtcgggctggtttttaaacaataagctggggtcaatgtgccagctcagctgagtcaccacagcttggcagcaggcccagccagcgggaggagagggaacagcagctagcagggagatgctgggggatagacagggctgctggggactgttgtacaggctgtgcactgctcaagggtatccagagcccagctttgtatctaccaggaagaaggggctcccctcccctcccttcctcttccctcccctctcctttcctctcctctcctttcctttcctttttttttttttttttgagatgg

SEQ ID NO: 20762 - DNA, 2300 bp, Homo sapien
gggataggaaaccataaattcccagtcgggctggtttttaaacaataagctggggtcaatgtgccagctcagctgagtcaccacagcttggcagcaggcccagccagcgggaggagagggaacagcagctagcagggagatgctgggggatagacagggctgctggggactgttgtacaggctgtgcactgctcaagggtatccagagcccagctttgtatctaccaggaagaaggggctcccctcccctcccttcctcttccctcccctctcctttcctctcctctcctttcctttcctttttttttttttttttgagatggagtcttgctttgtcgccctggctggagtgcaatggcatgatctcggctcactgcaacctctgcctcctcggttcaagcaattctcctgcctcagcctcctgagtagctggaattacaggtgcacaccaccacgcctggctaatttttttgtatttttagtagagacggggtttcaccatgttggtcaggctggtcttgaactcctgacctcgtgatccgcccacctcggcctcccaaagtgttgggattacaggcgtgagccaccatgcctagcctttttttttccccccctggaaaaggtgtagccataggcgctgactgaggtcctgggaacaagtctccagagggcagtggcactcaaacccacgtacctggctggcctcccagaatgtgagctgagcccaagcatgctgtgaagccaagatgcagaggttgatgaaggcacagcccatggagatgtggaagtagaaggggaagagtttgctctgcactagtccgaaggtatgtcggggaaggcttcggaaaagcaggaagcctgcagggtatggggaccacaggggtgttagggcacttcccggttcccctcttatttccatccccaccccaggtacccatgacatccaagctgagggtccctacctgagacgaaggtcacccacatttgcatgccccaggcacctgacaagaccagtagatggaccatcttaatcaggcctcctaggttcccgccttcctccatcttgcagtcctgggaaggaggcaccgggtggctcagaactttacctttgcctcatgcgtggccttcagaccctgtgagcccgctcggggacagggttacggccaatccagcagagattctggcaaagcatcccgggaatgagagtgagaaaggcccaaagcagtcaaggcccaaagacaaccctcgaccccatctctccaaatgtcagccctcaagatctcaggctctctggacctcaatctccatgccacttcagaggccccaaatttcagccacagcagctccagatcatagccctaggtcttcagagatcactccactaattcccaaatatcaccccagggatccagttctgacagccaagaccactcctctcataaaataataccggatattaggtgaagatcccgaaagccccgaggaaaccctaaatctcatcctgaggacaccgatcccaccaaagccccgaggaaacgccaaatctcatcccgaggacaccgatcccaccgttaggaaccgggacctcaatccgcagcacccggattccgagaacagaggcgtcggggccaaatgggctgaatctggtacctcactcccacgcccccgggtggacagcgaccctcctcggccgcgtcccctcgtgggtttcccccaaccaataattcgtcccgcctcccagctgagcccgaagccaatcgggtcgtagatctgcacctttctatcccgccctcctgggtattgactaatcgtagaaacccccctgggatcccgccccctccacgggcttttatccaattacgccgcggctactaagcgcagctgaagcgtgaaggcgccaatgaggccttcggctactccggcaggggcggaactaaaatgccggccacacccctctctgtgactcagtctctgagcgttttaatacgatggtgtccccgcgggatcaaacttcagcgtcacagctgaggactggcttcgtggtccctgatgggagagcatgaacaggtggtatgtggtaggtggggttctggagcctggcgggtgtagatttcacaacccagggggcggagccaggatgatgaccccgccccctccctaaataattctcccgggagggacacggaagcagcaaccgggatgggacggggagagaggaggcactactggggacctaagctggttctcaaatgcctctccttttcccctccaagcctcccaggcttcctatggtccctaag

SEQ ID NO: 20763 - DNA, 2300 bp, Homo sapien
tcagcaacagagtgagactcagtctccaaaaataaaaaacaacaacaaaaaagattatcccagccccaaggtttgggctgggcagtgagaaggacccagaaggccccaaagaaaaaaaatcaggcctcagaagagtccaaagaaaaaagggaccttgacattggcttaaaggaaggcctttcctggcagggagcagcatgtgcaaaagcttggaggtgtggaatcacatgctctatgctggtaaattcatgatggctgaatcgaggtccgagaggaagcagcaggaggttagcagagcagctccagtaaggcattgacggccaagccaggagtttcgacctggccccacaggtgaatgccagccatagagtgtgagcaggagaggcagggcatatctgttcaataaatgttagctgaattggggcccagacccgtgctagaagaggctggaaacaggaaacagctgagctctgggtctcacattcaactcccctccccctccagtatagccacatatggcacagatggagatatctggggcaggtctgcctggagaaacttctaggtgaaaggcaccttgccctgagtcacactcagcctcttcccccaaatcctctagacctttctctctgtcacccttgccaggccctctgcctgattcagtcgacctggaagactcctacacgctcttcagaactactcaggctgggcacggtggctaacacctgtaatcctagcactttgggaggccaaggcaggtggatcacctgaggtcaggagttcgagaccagcctggccaacatggagaaaccccatctctactaaaaatacaaaattagccaggcgtggtggcgcatgcctgtaatctcagctacttggaagggtgaggcaggagagtcgcttgaacctcagaggcggaggttgcagtgagccgatatcatgccactgtgctccagcccgggcaacgagagcgaaactccgtctcaaacacaaacagacaaacaaaaactattcagcatatcttcagtaaaatcttccttaatccttttttaggctcctattttctgagcacctaattgagtgccgggcatcccctaagcattcactggatcttcacacccaccctgtgatgtacacgtttttcttctgcctgaaatgtcctaagctgcccctccgagagtcactgcctcagggaggtcctcacttccagggacagcagagtatgacggttaagcagggaaactctccagctagatggcctgggttcaaatcctagctctgtcccttccagctgtgtaatactggtcgcgttactgaacctctccatgcctcagtgtccccaactataaaaacgagatgtcataatagtcaccttactgggatgttgtgattagataaattaatccatgccagtgcctggtatagagtaatggggagctgtgtttgctctggaatgtcacgctgagaacccgggacttagggaccataggaagcctgggaggcttggaggggaaaaggagaggcatttgagaaccagcttaggtccccagtagtgcctcctctctccccgtcccatcccggttgctgcttccgtgtccctcccgggagaattatttagggagggggcggggtcatcatcctggctccgccccctgggttgtgaaatctacacccgccaggctccagaaccccacctaccacataccacctgttcatgctctcccatcagggaccacgaagccagtcctcagctgtgacgctgaagtttgatcccgcggggacaccatcgtattaaaacgctcagagactgagtcacagagaggggtgtggccggcattttagttccgcccctgccggagtagccgaaggcctcattggcgccttcacgcttcagctgcgcttagtagccgcggcgtaattggataaaagcccgtggagggggcgggatcccaggggggtttctacgattagtcaatacccaggagggcgggatagaaaggtgcagatctacgacccgattggcttcgggctcagctgggaggcgggacgaattattggttgggggaaacccacgaggggacgcggccgaggagggtcgctgtccacccgggggcgtgggagtgaggtaccagattcagcccatttggccccgacgcctctgttctcggaatccgggtgctgcggattgaggtcccggttcctaacggtgggatcggtgtcctcgggatgagatttggcgtttcctcggggctttggtgggatcggtgtcctcaggatgagatttagggtttcctcggggc

SEQ ID NO: 20764 - DNA, 2300 bp, Homo sapien
tcagatgtgactcccaaataggctctctgaacatagcctccctgtgaagctagacaatgacctcccacccctgagcaattctcagcctccctcacctcttaggctcgaggccttgggacaggcccccgagcacaaagtgaggctgtctatggagttctgcagcacgtgcacagcagacctgcaagaagacaaggagctgggggcgctgggagactccacactgctcagggtgtagacagcagtacagctaaggttgggggccgtggtggggtgagtcctagggggtgagggaagtctggactcaggtgggctccaggttctggtggtcactgccagatcccgttgggggaacgggttcagaggagggtcaggggtcagactgcaggctgggcatcaccatatatcactcagttccttctggaggtcatccttccagcagccactggctccctgcggtatctcttcagtctccggacaggcggctgtctcatgaccctgctgcttcatcttggtcaggatctggggtggggagggatgagagaacagcagtcataataataatgacaatagtgccaggcgcggtggctcacacctgtaatcccagcactttgggaggccgaggcgggcagatcacgaggtcaggagattgagaccatcctggctaacacagtgaaaccgcatctctactaaaaatacaaaaagttagccgggcgtggtggcgggcgcctgttgtcccagctactcgagaggctgaggcaggagaattgcttgaacccaggaggcagaggttgcagtgagttgagatcgcgccattgcactccagcctgggcaacaagagggaaactccgtctcaaaaaagaaaacaaaataaataataataatgataatagtaaaaggtgactgttatatagcacttgttatatgccagactgcattcaagtgcacagtactcagctaatacagacacctgatcaggtagggaggagtgtttttttttgttttgttttttgtttttgtttttggtgtttgtttcttttttgagacagggtctcagtctgtcgcccaggctagagtgcaatggtactatcagggctcaacgcaccctgaacctccaaggctcaagtgatccccctacctcagccttctgagtagctaagtctacaggcatgtgccaccacaccctcttgttttttttgttttttgtagagacagggttttgccatgttgcctaggctggtcttgaacttctggcctcaagcaatccaaccacctcagcctcccaaagtgctgagataacaggcatgccacagcacccaacaggatgagttttctttttctttttcttttttcttttttttttttaagatgggagttttgctcttgtcgcccagggtggagtgcaatggcacgatttcggctcgctgtaacctctgcctcctaggttcaagccattctccatcctcagtctcctgagtagctgggattacaggtgcctgccaccacacccagctaatttttgtatttttagtatagacggggtttcatcatgttggccaggctggtctcgaacttctgatccacccacctcagcctcccaaagtgctgggattacaggcgtgagccaccgcgcccagccaagatgagttattattacatccattatacagatgaggaaactgaggctcagagaggtcaagtgacttgcccacagtcacacagcagtgagtggcagagctgagatttgaacccaggctccaatctcatggtggaggctggccaaaatccccatccctccctctcccactcctccccagggtccccatctcctccactcactttgcggcatttcacctgcgttttctgcattttctgaatgttcaccaagttctctgagatctcatcctcctgcgcttctgtggagggagggggctcaggcggacaaaggctgaagaaggaccccctccccacacaccggctgtgggctccaggaactcacggagcttctgatagatgaaggtcacctcctcccgcaccagttccagctcctcccacaggaacttcttgctgaggggacagtgcagcctagacctgcactccctgcctggcccctgacctcccatgcccctatctgtgcctccacccatccccgcaagctctgtcccctccccacacttccctgcccttttcccctccccttctacaatccccctaccctcatccccctcctctccttctgatccccagcctcccattctctcagtctctcccaccccactcagcctcctatcacctggcctcca

SEQ ID NO: 20765 - DNA, 2300 bp, Homo sapien
acctcgtgatctgcccgcctcggcctcccaaagtgctgggattacaggtgtgagccaccgcgcctggcactattgtcattattattatgactgctgttctctcatccctccccaccccagatcctgaccaagatgaagcagcagggtcatgagacagccgcctgtccggagactgaagagataccgcagggagccagtggctgctggaaggatgacctccagaaggaactgagtgatatatggtgatgcccagcctgcagtctgacccctgaccctcctctgaacccgttcccccaacgggatctggcagtgaccaccagaacctggagcccacctgagtccagacttccctcaccccctaggactcaccccaccacggcccccaaccttagctgtactgctgtctacaccctgagcagtgtggagtctcccagcgcccccagctccttgtcttcttgcaggtctgctgtgcacgtgctgcagaactccatagacagcctcactttgtgctcgggggcctgtcccaaggcctcgagcctaagaggtgagggaggctgagaattgctcaggggtgggaggtcattgtctagcttcacagggaggctatgttcagagagcctatttgggagtcacatctgatgggtgttattctatggtcacattaagtagtgttctggggtcacattaaggagtcactggaggtttcatccaggagtcattcatggtcacattcagagtcacttggatcttatatgagtccatggggactccacacagtggctcatgcctgtaatcctaatattttgggaggctgaggtgggaggattacttgagtctaggagtttgagaccagcctgggcaacacagtgagaccccatctctccaaaaaatttaaaaactagctgggtgatggtgcacctgtggctgagcacacctgtagtctcagctactcaggaggctgagacaggaggatcgcttgagcctgcgaggttgaggctgcagtgagccataatcgtgccactgcactccagtctgggcaacagagcgagaccccatctctaaaaaaaaaagtgtcaattgggtaaaatgcaagggtcattgaagtcataatttggtgtcacactggatcacattcaagggaattgggggtcatggtttaagtatcaatgaggtatactatgaagggacacagggcctatatttgggggttacttgagggtcacattcagggaacctgtccctcctgcaggccacaaggggcaccagtgcctgagccctccactcccctcctgggactctgactccgactgtgaccaggacctctcccagccacctttcagcaagagcggccgctccttcccacccggtgcagatcctccccagtccccccctccacccatttccctcctgacctgcccttgactcccacagtctagaccctcagaacaggcccagatcctgatctgggcatgcggtccctgacctgcagccccggagtcccctggacctggccaggccctgacccaccctctctctccacagcttgagcagccgggactgctctccctgaagacccctccagagagaaaataaactagcccagaccctcctctagccccgactgttagtcttgctgcttcctgtgcctaggaatccccctgccctcctagtttacccctcattgttgggggggaggggtgtagagaccccaggggtcattcgggatgtgtgggcttggaatcaggggacatctgaagccagatttaatatatgacaaggcaaggagtcattctgtccagacacgagcagccagacagacttccacactggccacagagccttcctttctggggggccctggcgaatggggaaactgaggcccagagagggagaggcgcggcccagggacatactctgaagcccctccctcctattaccctcggagccccgcccaccccagggtcctccctctctacttccattcttggttccttcctacaatcgatgctaacacgccccgcctccaagatcacggaggccccgccccacggggctatgcaaatgagacgcccggaggccccgcccctccctccacctcggagtctgcgcggcgcggccaggcccggccgaccgcgtctcggtcttcgcgtctgccagcctggctggcagtccgtctgtccatcccgccgcgccggggcagtctaggcggagcgggggctcaggcggcggcggcctcgacgcggtgagaggagggggtgggggcgcccctcatcccctcccgtgggcttcccacccccggt

SEQ ID NO: 20766 - DNA, 2300 bp, Homo sapien
attcagcatgctcccatgtatgtaactgtgctggactctgtgatgtgggtgtcactactgagtatttgtgcatttttgtttgtttttgttgagatagggtctcgctatgttgcccaggctggagtgcagtggcacaatcactgctcactgcagctttgacttccttgggctcaagcaatcctcctgcctcagactcccaaggagctgggactacaggtgcacgccaccacacctggctaaatttttttttttttttttgagacagagtctcgctctgtcgcccaggctggagtgcagtggcgcgatctcggctcactgcaagctccatctcccgggttcacgccattcttctgcctcagcctcccaagcagctgagactacaggcgcctgccaccatgcctggctaatttttttttctatttttagtagaggctgggtttcaccgtgttagccaggatggtcttgatctcctgaccttgtgatctgcccacctcggcctcccaaagtgctgggattacaggcgtgagccaccgcgcccggccaacacctggctaattttgaagtattttgtagagatgggggtctccctacattgcccaggctggtcttgaactcttggcctcaggcaatcctcttgccttggcctcccaaagcactgggactacagacataagccaccacacctggcctgtatgtgcatttggagtgttgaaatgtgaggtgaatcatgcgttgtatatctgctgggggatgggggctgaggtggcgtgtttgacagcgcagtgtatcggtgtgcttcactgtgtgtgtctgtgtgtgtagtggcaatgtcatagttgcgtgttttgcaagagaaagggtgtgggggatgaatgtgggacagagtttgtatgggatgctttgtgtcaggatagggcaaggttggagcatgtggatgatggggattctgaaagtagaatatattcagagatgccatggtgtgtgtgtgtgtgtgtgtgtgtgtgtagaggggtgtgagtgagcccagctgtgtgagtgggtgtgttgggggatgtcgtggagctgttttctggtcccagagggagagagaaagcccaggaaatctcactttctccctgcccctgggtctccaggcaacggcaccactttggagttaccaggagacaaggttgccagggcaacacaggcgtgagtggcagctctggggcgaagtctgggtgagaagatccagccagggatcacgatcattcactttgttcctccctttctccctgtttctcatcaatcccacctcccttccttcattgtcttaacgagcacgtatttgagaacctacaaatgtgctaggtgctattctcggtactggagaacagaagtgaacaagacaatgtccctgctgtatctctccttcagtcttccagctcctgtctctttatctctcctgcttccttctttgtcctgcggtcctgccttccccccgtaccacaaaggcggccccacagaaccccttagccagtgaggaagtaagttgagaggcttcatctcacagactttcggggatggccgttgatgttttgtccacgagcctgtgtccccagacacacactccggcccatactcaggtgcacagaaagacaagcacacagctcatccccctctccaaaactctcagttgtcattggatgacatcagcaaaaccacacacaaatacatgccgatcacaatactcctctgagatatcataagccccattttacagcagggcaaactgaggctaggagcctttaaataatatgtcactcattctggtctactcctccaactttcaacccttatatttgtctgattagctgacaataatagtattcgtgctggttcccccagcagcctccctcagggaagggtcttatttccctcgaatgcacccattcctccgcataggttctaaccatttgcccattcacctgaggaatcgagttttgatggacagattcctagaccaatagagaaactaagtgaactgtaccgatgcggccacggcttgggcgggactaaggctgggaacgagccaccgattggtcagagctacgcggcgaatggcggagacgctgaggcgggtgctaaccaggggcggtgcggcctggtccggggaggagaacatgcctgccgccggaccgcctttgctgctgctcggtacaccaggatctggaaaaacagcgctgctatttgctgcggccctagaggcggcgggggagggccaaggcccagtcctcttcctgacacgaaggcctcttcaaagc

SEQ ID NO: 20767 - DNA, 2300 bp, Homo sapien
ccacctgcttaatagaaacagggtaggagtattgccattttattttatttatatttatttatatttatttatttattttatttatttatttttttgagacggagtctcgctctgttgcccaggctggagtgcagtggcacaatcttggctcactgcaagctccacccactgggttcacaccattctcctgcctcagcctcccgagtagctgggactacaggcacccgccaccacgcccggctaattttttctatttttagtaaagacagggtttcactgtgttagccaggatggtctcgatctcctgaccttgtgatccacccacctcggcctcccaaagtgctgggattacaggcatgagccactgtgcatggactatttatttatttttttgaaacagagtttcaatcttgttgcacagcctggagtgcaatggtgtgatctcagctcactgcaacctctgccttctggtttcaagcaattctcctgcctcagcctcctgagtagctgggattacaggcacccaccaccacgctcgaatatatatatatattttttgagacggagtcccgctctgtcaccaggctggagtgcagtggcacaatatcggctcactgaaacctccggctcctgggttcaagcgattctcctgcagcctcccaagtagctgggattacaggcatgcagcaccacgcccatctaatttttgtatttttggtagagatggggttttaccatgttggccaggatggtcttgatctcttgacctcgtgatctgcccacctcggcctcccaaagtgctgggattacaggcgtgagccaccgcgcccggcctacgcctggctaatttttgtatttttagtagagacgtggtttcgccatgttgcccaggctggtctcgaactcctgacctcatgatccgcctgtctcggcctcccaaagtgttgggattacaggtatgagccaccgcgcccagccaattattattattttttgagatgcagtctcactctgttgcccaggctggagttgcagtggcatgatcttggctcactgcaatcttcatctcccagactgaagcagttctcatgcctcagcctcctgagtagctgggattacaggcacacgccaccacacctggctaatttttgtatttttagtagagatgggatttcaccatgttggccaggctggtctcaaactcctgacctcaagtgatttgcccacgtcggcctcccaaagtgctgggattataggcgtgagccaccgggcccagcccaagagaataaaaatgtgggtggtaaaaatttttttcccaaaaattcgtaaatgaaaatctcacatattatgcatactgcccaggagcatggcctagcactgtgcaaacactcaactgctggtcgttgcaaggattattattggccggcttcagtggctcgtgctggtattcccagcacattgggagatggaggctggaggattgcttaagtccgggatttcaagaccagcctggacaacatagtgggatcccatctctacaaagaattttaaaaattagccaggtgcagtgggaagattgcttcagtccagaggctgcagtgagctatgattgtgccactgcactccagcctgggtgacagagcaacaccctgagacagagagagagagggggaaggagggaaggagggaaggaaggaaggaaggaaggaaggaaggaaggaaggaaggaaggaaggaaaggagagagagagagagagagagagagagagagagagaaaataatttttatttatttccaggctgggaagagatgctgatttctgcgataaaatcagtaggtacattttttggaatgttcgctatgtgccaggctagattttacagatgagaagtctgaagctcaggtaaggtaagtcacctgtccagggccacaaagaaaaaaaaaacgtgtgtctgaagccagaacgggagctgttgcggcccaactccctcccctgcccccaagcggcctctgggctcgggaagggcccctgcctcctcccgccaggcacttatctctacccaggctgagtgctggccccgccccctcggggatctgccacttagaggcgcctggtcgggaagggcctggtcagctgcgtccggcggaggcagctgctgacccagctgtggactgtgccgggggcgggggacggaggggcaggagccctgggctccccgtggcgggggctgtatcatggaccacctcggggcgtccctctggccccaggtcggctccctttgtctcctgctcgctgggg

SEQ ID NO: 20768 - DNA, 2300 bp, Homo sapien
aaaaccacacatctggttttttgttgttgttgttgttgtcgtcatcatttgtttttttgtttctttgtttgtttgtattgagacagagtctcgctctgtcacccagactggagtgcagtggcacgatcttggctcactgcaacctccacctcccaggatcaagcaattctctctgcctcagcctcccatgtagctgggattacaggcacccaccacgacgcttggctaatttttgtatttggtagagacggggttttgccgtgttggccaggctggtctcgaatccctgacctgaggtgatccacctgccttggcttcccaaagtgctgggattacaggcgtgagccatcactcccagccaaatttcacctggctaacagagtgaaaccctgttttcctgcccagcacctagaacagcacgtgagctgggctcagtgactcacgcctataatcccaacactttgggaggccaaggtgagaggatcacttgagcccaggagttcaagaccaacctgggcaacatggcaaaaccccatctctgcaaaaaatacaacaattagctgggcgtttgtggtgcacgtctgtagtcccagctattcaggaggctgaggagggaggatcgcttgaacttgggcggtcaagccttcagtgagccaagatcaggccactgcactccagcctgagtgacaaagtgagactccatctcaaaataaaatgaaataaaaagtaagtaaacaacagcaaattcaggatacccaggagatccctggcaggcctgtgccatccagctgcggacaaggattctctccttgttaaggccagccctgggggccactacccacaagccccacctctcatggggcctgctccctgctgtttatctcctccctaccctcatccaaggtggtctggcttctagagtgggccttaacccctggcttctttttttttttttttttttttttgagatggagttttggtcttgttgcccaagctggagtgcaatggtgcgatcttggctcactccaacctccgcctcccgggttcaagcgattcttctgcctcagcctcccgagtagctgggattacagaaatatgctaccatgcccagctagttttttatattcttagtagaaacagagtttcactctgttagccaggctggtctcaaactccttacctcatgtgatccaccagcctcggcctcccaaagtgctgggattacaggcgtgagccaccatgtccagccctttcttaaaaaaaatttttttggccgggcacggtggctcacgcctgtaatcccagcactttgggaggcccaggcaggcggatcacgaggtcaggagatcgagaccatcctggctaacacagtgaaaccctgtctctactaaaaatacaaaaaattagctgggcgaggtggggggcgcctgtagtcccagctacttgagaggctgaggcaggagaatggcgtgaaccccggggggcggagcctgcagtgagccgagatcgcgccactgcactccagcctgggtgacagagcgacactccctctagagtgcagcctctgcttctcaggttcaagctatccttctgcctcagcctcccaagtagctgggactacaggtgtgagccaccatacccggctaatttttgtatttttagtagagacagggtttcaccatattggccagggtggtctggaactcctgacctcacatgatctgctcgccttggcctcccaaagtgctgggattacaggcgtgagccatcgcacctggcctaccactgacttttgattactcaaagcatgaagggtatatatgatgggtctgcaggcatcgttcctgaggaattgtccaaggagaccccagacctggctcagtttttctcttccctcaggaggaggccactgagggatcccaagaagaggacaacaccccaggcagcctgccctcagtgagtgattacagtttgggatggggacaagtgggaccttcagggagggttgtggatggtgatggggtcagtaatggccccaagtgactggagctttgggggctgcagaaaccacccccaggccctgtcccctaccttggcaccttccttacggacctggttatgctggacacagccctgccggatatgttggaggtctgacccctgacccttgacccctgaccccagctccacttgcccccagcacaatgggcctcccaatatccacccttgatcctacctgtactcctgacaccaccccacactcccttactacagtggggctcctgacatcccagcccctg

SEQ ID NO: 20769 - DNA, 2300 bp, Homo sapien
agagacagcgtttcactatgttggtcagtctggtcttgaactcctgacctcaggtgatccacccacctcggtctcccaaagtgctgggattacaggcgtgagctaccatgcctggcccgctttttttttttttttttttctttttcaaaatccagtcaagcaaaggcaaaaattcaggtcttcaatcccactacccacattttgagtgctcagccaccacactggacatagcagatagataatttttccaccattgcagagaattatatggaaagtgctgccctagtttctttgaggtcagaggagaaaattaacatttgtttaagaccttctatgtgctaggccctgggacacactttatttcattttattttattttatttatttttacttttattttattttgagacagagtctcgctctgtcgcctaggctggagtgcaatggcgcgatcttggcttactgcaacctccacctcctgggttcaagtgattctcctgcctcagcctcctgagtagctggtactacaggcgcccgccaccaggcccagctaattttttgtagttttagtagagacggggtttcaccgtgctagccaagatggtctcgatctcctgatctcgtgatccgcttgcctcggtctcccaaagtgctgggattacaggcgtgagccaccgcacccgactatgaattttatttttagatacagggtcttgctctgttgcccaggctggactcgaactcctgggctcaagtgagcctcctacctcagcctcctgagtagctaagactacacttgcaccatgtagtttagaagaaagtagatgaccaccatgctcatctattttattttaacaactttattttgggttcactttttgctatggaaaatttcagacatatacaaaagtagagagaatagtatgaagaacattcagacatccatcacctatcatcaacgatgatcaatttcacaaaaaaatattttcaggatgattttaaaacaaatcccgggcttatgtcaattcatacataaatgttttgggtacacatgtctgacaacaggcttactttttttttttttttttttgagacggagtttcgctcttgttgcccaggctggagtgcaatggcaggatctcagctcacctcaacctctgcctcctgggttcaagtgattctcctgcctcagcctcccgagtagctgggattacaggcgtgcaccaccacacccggctaattttctatttttagtagagaggggggtttctccatgtttgtcaggctggtctcgaactcctgacctcaggtgatccgcccaccttggcctcccaaagtgttggtattacaggcgtgagccatggcgcccggcccttttatttttattttttaataaccttcatgttcatacttaaaaaaaaatcagaaatatttgatataaaaaaaatccaatccaggccagatgcagaggctcctgctggcgatcccagcattttgggaggccaaggcaggtggatggcttgagcccaggagattgagactagcctgggcaacatgttgaaactttgtgtctacaaataattagctgggcatggtggtgactgcctatagtcccagctgcttgggaggctgaggcaagaggatcattttagcctgggatggtcaaggctgcagtgagccgtgattatgccactgtactccagcctaggtgacagagcgagaccctgcctcaaaaacagaaaaaatacccagtctatattcaaatattcaaatcccctgtttgtgcctgaacctttttttggacactgggttttcctattttgcctgggctgggcttgaactcctgaccctcccacctcagcctcctgagtagctgggaccacaggtgcccaccatggcacccagccctaaattttcttttgacagttgtttctggccaggtgttgtggcacatgcctatagtcccagctacttaggatgctgagatgggaggatctcttgactccgggaaatcaaagctgccgtgagctgtgagcatgcccctgcactccaggcgatagagctgggggaaggaggaatagttgtttcttcaaattgaaatccaaagatctactcaaggtatttggttgtttgcttctctttttttttttttttttttttttgagatggagtctcactctgttgtccaggctggagggtagtggcgtgatcttggctcactgcaacctccgcctcctgggttcaagcgattctcctggctcagcctcctgagtagctgagtttacaggtgcccaccaaca

SEQ ID NO: 20770 - DNA, 2300 bp, Homo sapien
ggggagaggcctagtggcagggccccagagaccaggggcggacctgagtgatgagggggtgaagctgggtatcaaggtgcctgcttaaggagggatgggagtgggcagtggtctccagttggaactagggcatatctcggaatggggtagggaggagggggaacgtgacttctcggtggcccctggccccgcccaccttcctctctcgcttcccatccccgcttagttcctcgccagcttagagggaaggctgcccgaatacaacacccgcatcgccctgccccttgccacttccaaggacaagttttttggtcagtatgggtggggggatgaaggggtgcggttggggccccaagctgggtagcaggaggttgtcagataccctgttcagggccaaggtgggggtggagtggggtggtaaagggaaggggagccagggatggggacctggatcccacatcgctccctgctcatccccccaccccccttagacgaagagagtgaggaggaggacaacgaggtagtgacccgcgcatcactcaagatccgttcccagaaattaatcgaaagtcacaagaagcaccgtcgctctcggaggtcctagactcgtcctgacacccaccaggcggcccccttcggagcccccgatccctccgggtctagcgcaggccccacggggccccttcaggggctgaacgcggcccggaccgggaacggaggcggccagcggcgcccggaggggaggaaggggccgggccagacgttcccacagtaaatctccccagctgggtccgccccggcctcagagttgcgcaataaatgttaccgaccatgaccctgggtattcatctgtttttgaccctgcaccacccaagagacggctgtccctgaaaacccagggccacagactgcctcctccaacctgggtcatgatgactcccatcagctagtgacgcagatggagcttaaaaatgggagatggcccgatgtagtggttttatgcctgtaatcccagtattttgggaggctgagttgggaggatcacttgagtccaggagctccaggctgcagtgagctatgatcgtgctactgcactccagcctgggccacagagccagaccctgtctcaataaataaaataagggcggggtgcagtggctcattcatacctatattcccagcactttgggaggctgagctgggtgtgtcgcttgagcccaggggttccagactagcctgggcaacatggtgaaaaccagtttttaccaaaaaaaaaaaaaaaaaaaaaaaaaaaagctgagcatggtggcatatgcctgtagtcccagctacttgggagactgaggcaggagaatggattgaacccaggaggcggagattgcagtgagccaagatcaagccactacactgcagccttggcaacaggagtgagaccctgtctctaaaaaataataaggctgggcgccgtggttcatgcctgtaatcccagcattttgggaggctgaggtgggcgaatctcttgaggccaggagtttgagaccagcctggcaagtatggcaaaaccccgcctctacaaaaaatacaaaaattagctgagcatggtggcggcacctgtaatcctagctacttgggaggctgaggcacaagaatcctttgaatctgggaggcggaggttgcagtgagttaagatcaagccactgtactccagcatgggtgacagaacgagactccatctcaaaataatagcaataataataaaaagtggaagatgcccccacacttgatcaagctagccccttccactggaggacagaggactctggtctggggacacacacatgcccccacacaggagctcccccacatctggggatacaaaaaagaccccttggggacagatatgtcctttcttctggggacagattgataggcacccagcggaagagccaggacctctcctgggctggcgctgggtccggctggaggcacccagaggctgggtccggcctgccctgccccgccccgccccagcagctcggccgctccgcccctctggcctcagcgcccggccactgcccgccgcccgccacccgccacccgccggcccttccgcctcactcagcggcgccactgagagggacgggcgccggccatggagcgcacagcaggcaaagagctggccctggtaaggggacaagggatccccggaccccgcatccctggtgacccgcaggtccagaaactccaagcgcccgcccgtcggacggtatctgctcccaatctgaacttgccctggagtc

SEQ ID NO: 20771 - DNA, 2300 bp, Homo sapien
cagcactttgggaggctgaggtgggcggatcatttgaggtcaggagtttgagaccagcctggccaacatagtgaaaccccatctctactaaaagtacaaaaattagccgggcatggtggcgcacgcctgtaatcccagctacttggaaggctgaggcaggagaggggcttgaacccaggaggtggaggttgcggtgagccaggattgcgccactgcactccagcctgggtgacagagtgagattccgtcttaaaaaaaaaaaagggtaatcttgcatggttgcttgtgaccttaagcagtttaatcagcccaagcctctgtcttgtcatctgtgcaaggggtatgatatgcgtatgccatggatacctattggcacgtgatatatggcattcggaaacctcttagtccagcatccaacacgtaataaatgctcacagtgaagtacagttgaccgttgaacaccatgtgttcacatatatcattcatcctttcaagttaaaaaaaattgagatgggcaggccgggcacagtggttcatacctgtaatcccagcactttgggaggctgaggcaggaggattgctagaggccaggagttcgagaccagcctgggcaacatagtgagatccttgactctacaaaaaataaagtagccagatgtggtggcacatgcctctagtcctagctacttgggaggctgaggcaggaggactgcttgagctcaggaggttgaggcttcagtgagcagtgatagcaccactgcacttcattctgggtgacagagcaagacccagtcccaaaaaagaaaagaaaagaaaatacaacagtcctggaatgcaaaacctgagtatacagagggacaactgtttgtatctgcaggttccacagggctgactgtgggacttgagtatggaaggattttggggttttttgttttgttttgttttgttttttgagacagagtcttgctctgttgcccaggctggagtgcagtggcaggatctcagctcaatgcaacctccacctccagaggtcaagtaattattgtgcctcagcctcctgtagctgggattacaggcacccaccatcatgcccggctaattttttttttttttttttttttgaggcagagtctcgctctgtcacccaggctggagtgcagtggtgcgatctcggctcactgcaagctctgcctcccaggttcacaccattctcctgcctcagccccctgagtagctgggactacaggtgcctgccaccatgcacggctaattttttttttttttttgtatttttagtagaggcgggatttcactatgttagccaggatggtctcgaactcctgacctcgtgatccgctcactttggcctcccaaagtgctgggattatggacgtgagccaccgtgcccggccatgcccagctaatttttgtatttttgtagagatggggtttcaccatgttggccaggctgatcttgaactcttgacctcaggtgatccgcccgcctctacctcccaaagtgctaggattacaggaacgagccatcatgctcagcctcacacctggctaatttttgtatttttagtagagatgcggttttaccatgttggccaggctggtcaacgactgcattcttataatattaagttgatgagcctggcacagtggctcacacctataatcctaggactttggggggcctagaactttgggaacacctgaggtcaggagttcgagaccagcctgaccaacatggagaaaccccatgtctactaaaaatacaaaattagccaggtgtggtggtacatgcctgtaatcccagctacttgggaggctgaagcaggagaatctcttgaacccgggaggcggagactgtggtgagccgagattgcaccattgcactgcagcctgggcaacaagagtgaaactccatctcaaaaaaaaaaaaaaagttgatgattgcaaaaaaggtctttcctctgggatgttgcacccatgcacccacccagtaactgtgtgtctgtccacctcacctgcctgccagagggtgaccggaaggctttttttgagagctctcagtggaacatcaagaagaaccaggagaccatcagtcagctccgcaaggagactaaggcactggaactaaagctgctggacctgctcaaggtaaggagcaaaggggtgggtgtagggttcccgcggcggtggatggtgggggacaagtaggtagcacctggccttagctggaggtggcatgctgaaaggtgactggacttccctccttgcagggagatgagaaa

SEQ ID NO: 20772 - DNA, 2300 bp, Homo sapien
cgtgttggccatgctggtctcaatgtcttaggacattgccaaatggcccctgtggggcaaaccaacccttttccaacaagaaccactggtttacaccttatggtactttgctatgtgccaggcactgttctaagcactttacacatttcaggtacctatgttgtactgttactatccccatttcacacatcgagaaactgagaacaattaggttactcttagtcccccaaggttggacaactattatgcagagccaggattccaacccagaaaatctggctctaaaaatctatgctcaggccaggtgcagcggcccatgcctgtaaccccagcactttgggaggctgaggaggaaggattgcttgagcccaggagtttgagaccagcctgggcagcatagtgagaccccatctctacaaaaagtaagaaaattagccaagcacagtggtgtatgcctgtagtcccagctactcaggaggctgaggtggaaggatcgcttgagcctaggaggtcaagtctgcagtgaactgttatccaaccactacactccagcctcaacagcagagcaagaccctgtcagaaagaaagaaggctgggcgcggtggctcacacatgtaatcccagcactttgggagccaaggccgtggatcacttgagatcaggagttcgagaccagcctggccaacatggtgaaacccagtctctactaaaaatataaaaattaggtgtggtggcacgcacctatagtcccagctagtcaggaggctgaggctcgagaatcgcttgaaccttggaggcagaggttgcagtgagccgagatcatgccactgctctccagcctaggcgacagagcaagaccctgtctcaaaaaaaaaaaaaacaaaaaaaaaagaacgcgggtgcagtggctcacgcctgtaatcccagcagtttgggaggccgaggcgggctcacgcctgtaatcccagcagtttgggaggtcaagagattgagaccaccctggccaatatggtgaaatccctctgtactaaaaatacaaaaattagttaggcgtggtggcgtgtgcctgtagtcccagctactcaagaggctgaggcaggagaatcgcttgaacccgggaggcggaggttgcagtgagccgaaatcgttccactgcactcccacctggcaacagagtgagattctgccaaaaaaaaaaaaaaaatagagaaaataaattacaagaaagtatgaagtacagttcagtcggttctgaacccatgagaagttttaagagacagagaaggaaaaacatgaactaagtatgagtttttgcccagaaacggtttacctagactcatgctggagaaatacctttgtcacaccatgaagattggatgggcactgttgacccctgaccctctgtaccctctggagccatcttacctaacagttgtatctttttatgtaactcagccacctgagagtgcacagagggcttccctgcacctctgtggaaggatcctcccttggaacggcctggggtccacgcctgggctgtgcccttgcctcggaggtggctgggtttgcccgaagcctccctgcccttgaccctggaagagggcgtcgaagcctggtcctgaggaggcagggcgttggcggaggccgccctgcacagaggagatgtcatgatggggttggggctgaaggcccctaggggttagggggataactaggagtcagtcgcccctgtcagggatccgtcagctcggattcctagggctctgaaaaatgcactttccgaccgctaggtggttgcgctccgcatctctcggttgccaggtaaccgcctccccgtctctctccactgtttccatggagatcacccgcgttccgtggctgacactgcgttctcattggctgaggctgcatagaggggcggtcccaacagtgggcggggtagagccgcgccgcaggacggagggtctggacactttggggtcacgtgctcattccgtttccctacctcccccaaccttatcccgcccctgggggttcgcgggcatttttcaggaactttctttccggcttgagaagccgccactcccaagatggaggtacgctgcgccgccattaagagctagccctcagaactatcctctctaaggtttcacagtcctgcccaagatggccgtctcggctctggcaccgcccccactcctgcctctcccaacatggcgaccctgagtctccgttcccggtgcggaacgtacgaccggaagtgacggggtccagaaatttccgctttctttctgcagcag

SEQ ID NO: 20773 - DNA, 2300 bp, Homo sapien
gcacgcacctatagtcccagctagtcaggaggctgaggctcgagaatcgcttgaaccttggaggcagaggttgcagtgagccgagatcatgccactgctctccagcctaggcgacagagcaagaccctgtctcaaaaaaaaaaaaaacaaaaaaaaaagaacgcgggtgcagtggctcacgcctgtaatcccagcagtttgggaggccgaggcgggctcacgcctgtaatcccagcagtttgggaggtcaagagattgagaccaccctggccaatatggtgaaatccctctgtactaaaaatacaaaaattagttaggcgtggtggcgtgtgcctgtagtcccagctactcaagaggctgaggcaggagaatcgcttgaacccgggaggcggaggttgcagtgagccgaaatcgttccactgcactcccacctggcaacagagtgagattctgccaaaaaaaaaaaaaaaatagagaaaataaattacaagaaagtatgaagtacagttcagtcggttctgaacccatgagaagttttaagagacagagaaggaaaaacatgaactaagtatgagtttttgcccagaaacggtttacctagactcatgctggagaaatacctttgtcacaccatgaagattggatgggcactgttgacccctgaccctctgtaccctctggagccatcttacctaacagttgtatctttttatgtaactcagccacctgagagtgcacagagggcttccctgcacctctgtggaaggatcctcccttggaacggcctggggtccacgcctgggctgtgcccttgcctcggaggtggctgggtttgcccgaagcctccctgcccttgaccctggaagagggcgtcgaagcctggtcctgaggaggcagggcgttggcggaggccgccctgcacagaggagatgtcatgatggggttggggctgaaggcccctaggggttagggggataactaggagtcagtcgcccctgtcagggatccgtcagctcggattcctagggctctgaaaaatgcactttccgaccgctaggtggttgcgctccgcatctctcggttgccaggtaaccgcctccccgtctctctccactgtttccatggagatcacccgcgttccgtggctgacactgcgttctcattggctgaggctgcatagaggggcggtcccaacagtgggcggggtagagccgcgccgcaggacggagggtctggacactttggggtcacgtgctcattccgtttccctacctcccccaaccttatcccgcccctgggggttcgcgggcatttttcaggaactttctttccggcttgagaagccgccactcccaagatggaggtacgctgcgccgccattaagagctagccctcagaactatcctctctaaggtttcacagtcctgcccaagatggccgtctcggctctggcaccgcccccactcctgcctctcccaacatggcgaccctgagtctccgttcccggtgcggaacgtacgaccggaagtgacggggtccagaaatttccgctttctttctgcagcaggaaccgcggctgctggacaagaggggtgcggtggatactgacctttgctccggcctcgtgtaggtgtgaacgagcgggtgggagggcacctcagtttcttacagggggcaaccggagggtgcatgtgtgggtgtggacggcggaggctgttaatccctttggtctgttggcgggaattgggtcacaattgggcacagggagcggaggttttgagatcttgagatcctcgccattgatttgagcaaagtgagactggccaggattggggagatcgctgcccctcgcccccatatcggaaacaaagtgaggcctcattgcctggaagcgatggaggaatccaattggctggaagtagccctctcccactgaccgggatccgctttcttcctgcagcgtgaagacacagcgcatctccccgctgtaggcttcctcccacagaacccgtttcgggcctcagagcgtctggtgagatgctgttgccgctgctgctgctgctacccatgtgctgggccgtggaggtcaagaggccccggggcgtctccctcaccagtgagtcctcctgttcaccctcccgccaggctggaggtgggaggggccaacattgggccttagggataggcatttacagccttttgactcagtttcccggtagtgctccgctggtggggatgggaggacagaggtggtatttggtggagaaggcgcttacctgccctgggctgagcttcctgta

SEQ ID NO: 20774 - DNA, 2300 bp, Homo sapien
atcacaaggtgacgagatcgagaccatcctggctaacacagtgaaaccctgtatctactaaaaatacaaaaaaaaactagctgggcgtggtggtgggtgcctgtagtcccagctactcaggaggctgaggcaggagaacggtgtgaacccgggaggcggagcttgcagtgagccgagatggcgccactgcactccagcctgggaaacagagcaagactccgtctcaaaacaaaaacaaaacaaaacacacggtctcatccaggcacggtggctcacacctgtaaccccagcactttgggaggccaaggcaggaggatgacttgagcccaagagttccaggctgcagtgagctacgatcatgccactgtactccagcctcagcaacaaagcaagaccctgtctcttcaaaacacacaaaaacaaaaagccagggtctcccttcacctctgtctcctgctggattgctcttggccccaccctgtctcccacttctaggggtttgcccgtgttgacccctccatctgcagcaccttcgggattcaactgaaacctcacctccttggaggagccttctctgaccccgaggcttgggaggaggacgactctgggctcctccagctgcccggggccataacactgaccactgacttctgagcttgtttctgcccactcaaaggggagccagcagaggtagtatcttggtcacacagacagggcctggcactgagcagtgttcaataaacatctgatggatgaacagagaaaaggctcacctggctcgtcagagccatctttgcagtcgcaatagtcatcgttgacctgatcaaatgggatggtggccgaaccgtccaggcaggtgaaaggcttggactcatcgtagaagtgatgatctgcggggtacaggaagctcagcccagggcaggtaagcgccttctccaccaaataccacctctgtcctcccatccccaccagcggagcactaccgggaaactgagtcaaaaggctgtaaatgcctatccctaaggcccaatgttggcccctcccacctccagcctggcgggagggtgaacaggaggactcactggtgagggagacgccccggggcctcttgacctccacggcccagcacatgggtagcagcagcagcagcggcaacagcatctcaccagacgctctgaggcccgaaacgggttctgtgggaggaagcctacagcggggagatgcgctgtgtcttcacgctgcaggaagaaagcggatcccggtcagtgggagagggctacttccagccaattggattcctccatcgcttccaggcaatgaggcctcactttgtttccgatatgggggcgaggggcagcgatctccccaatcctggccagtctcactttgctcaaatcaatggcgaggatctcaagatctcaaaacctccgctccctgtgcccaattgtgacccaattcccgccaacagaccaaagggattaacagcctccgccgtccacacccacacatgcaccctccggttgccccctgtaagaaactgaggtgccctcccacccgctcgttcacacctacacgaggccggagcaaaggtcagtatccaccgcacccctcttgtccagcagccgcggttcctgctgcagaaagaaagcggaaatttctggaccccgtcacttccggtcgtacgttccgcaccgggaacggagactcagggtcgccatgttgggagaggcaggagtgggggcggtgccagagccgagacggccatcttgggcaggactgtgaaaccttagagaggatagttctgagggctagctcttaatggcggcgcagcgtacctccatcttgggagtggcggcttctcaagccggaaagaaagttcctgaaaaatgcccgcgaacccccaggggcgggataaggttgggggaggtagggaaacggaatgagcacgtgaccccaaagtgtccagaccctccgtcctgcggcgcggctctaccccgcccactgttgggaccgcccctctatgcagcctcagccaatgagaacgcagtgtcagccacggaacgcgggtgatctccatggaaacagtggagagagacggggaggcggttacctggcaaccgagagatgcggagcgcaaccacctagcggtcggaaagtgcatttttcagagccctaggaatccgagctgacggatccctgacaggggcgactgactcctagttatccccctaacccctaggggccttcagccccaaccccatcatgacatctcctctgtgcagggcggcctccgccaacgc

SEQ ID NO: 20775 - DNA, 2300 bp, Homo sapien
ggacgggacgtgagtgtcccctagttggagctgcccacctttccgtgggcctgggtttccctccccgccaccctcgcctctagaaaccagccagatcctccttgggttcccccggcgtggggtccaggctgatcccaagccccgtgtgaccccgcctcttactcgtggatggccaggtccaggatgccctgggcgaggagatagggggaccaccctctccccaggagctgggcacagaccctcagcctcagggagtgtgtctaggcatctagtgatcggatggcttttcccagccccactacgctctggggaaagccagacctgggttcgaatcctggctgtgcctctgagcttgctgggttacctggtggagggtggacttttgggggctgagaggcacacggggagcctaggagatgtcaggtgccaaggagcagggggcttcagagggaccgaatgggcaagggtgggggtgggctttgctgggtgggggaccaaggcagatggcagcttcaatgtgccgggtcctggggtggaaggaggtgccacctgggtgagttggtagagaggtcatcggacatttgggggtccaggtatctcccagtcccaccccttactttgagctcctttggggtcatggagtcctgaggagggggcaggagggtggggaggcccctacaccttgaggtcctgaagcaagttccagggtggggccctgcagggaagaacaggtgggccacatggtgcccccaactgagagccactggggcctcacccctccagtctgcttctgccacgcccccgcagggtctcggtgactgagctgcagactcacccggagctggacacagatggggatggggcgttgtcagaagcggaagctcaggtacccccggctgccccttggttggggacttctagggagcattgccccagggtgacctcagggcacaggagggggaccaaggaaagctccttgctggcctgggatgcctcctctgggtgagctgggatggcagccactcagggccgcttcccgcctggcaggacccgggatggagccaggtcgcgctggagcccgtttccccgcacctgcccccactctacccgctgttgagcacccaatccccttcctcccccacccctgtcctgccctattcccctcctcccccacaccctcgtcccctgtctgtctcctttcctatcctcctccttccccgtggcccctggcttctggcctcccttctctgcccacccctgggtttctccctctccatctgcagcctgggccttggcctctcccttggagggcctggccctctctggtcctgggctctctcttcctccatctgtacgtccgtttgtccatctgcttctctctttctgtctcagtgcccccaaccactccagcccctggtctcctcctcccctcccacgggcctgtgctgccccctcctggccgcagtgcctcactggcgtggccctggcctggtcatcagggcccggggcccagccctcccgtgcctggcaccgcagcccgggtgccggggtggccgagatgggggacacgtggtggcctagatcttgacaccacccccaacacacacaggccctcctcagtggggacacacagacagacgccacctctttctacgaccgcgtctgggccgccatcagggacaagtaccggtccgaggtcagtggaggagaagggaggggacttggtcctcccaccacactgcccccaccccgcctcacaaaggagctgcctctggttctggcacctggccaccctggccagctgggtggccccagcaccccccaccgagaccccccgaccccagctgtcggtcctccctgcaggccccgcaggaggggcagagacaccgaggctgccccttgggctgtggtgtgagcctgagggtgtgggtggaccctgagtccacaacaccgaccgcactgctcacccgccaggcactgcccaccgaccttccagcaccttctgcccctgacttgacggagcccaaggaggagcagccgccagtgccctcgtcgcccacagaggaggaggaggaggaggaggaggaggaggaagaagaggctgaagaagaggaggaggaggaggattccgaggtgcagggggagcagcccaaggtccgtgtttgggggagaagtggagacagagagggtgggggaagggctactcactgaccctgcccctgccccaggaggccccaccgccactgtcacccccgcagccggccagccctgctgaggaagacaaaatgccgccctacgac

SEQ ID NO: 20776 - DNA, 2300 bp, Homo sapien
tgcgttgttttccggggatgctgtttaggtcggtggtcagggagggcctctgaggaggtggcatttgcgcatagaccagaatgacaaagatctatcccagaagaaagctgggggaggaaattctcaggccagaggaacaaccagtgccaaaaccccgaggtagaactagctcggcgtgttcctaaaacaggaagccgcggggggaaggggagttggcggcggctgccctggccccatttcccggaggaggatgctgaggccgccgcctcctgcgggccgctagagagaggggcggggagcgaggcgcggccgctaggtggcgtgcgaggcgcgtaggccctggtggccgcagccacgtgaccctggggaccgcagccgcgagctcaggcacgtgcccgggggagccctgtggcgccacgcgcagattggccccgccggttcctcaccagttcgggggatgaggcggggccccagctatgcctcagttcctgctgcggaccggggggctaccccagccggggacagaagaatcggcaaggatgagcgagtccggccgctggggccgcccccgcgagctccctccccccgcgaggcaggtcccctccactctccccgcactgccggagccggcaggtttccatgggaaccgcagcggggtccgcgcgcccaggagcagcccccctcctagctcagtttccgatgacggaaaccgggaggaacacggggtggggaacagaccatcgcttggggcccctagcgcccgcagccaggtcgccccggcgagcccaagaggggccacccggggatctgcaccgccaccgcccctattgcgcgggccactgcgattggcctgccctttccaggcgtggcagcatcccctggtgcgcgcactcccattggctcgatctctagggcatcttccagtaactggttatctcaagggccgcccctgattgggcaaattaggctctcctcgctggtggcgctctctgacagtctggagcctaaagggcgtgcaggaacgaggattgggtggggactgccgctctccagttagggggtctgggctacctcgccggcagcgccctcgaccggactgtcggattgctgtctgtggtgctgaagcctcacgccctggcgaccccgccccagtgtgtgctagttcccgcgccccgacgtaaacatgcaccggcgcccgcgcaccaaaggaggctgcgccacccccaacgccttagagagaggccaggttccccctagcagagagcgagcatgactccacagtcaggaggaccaatcacgagcctagaaagccaggacatttatgtggcagatccacccaccccagttctgtggggtccaagaaggatccgtggtttcccagagctgcatggctccagcgatgattgtccagaacactgagccccaaaccttttcacccccttcggagcagtgcggagtttccttgcactggggagtgccagtccttaccttttgaaccctagaaggatccagctcactcaaaaccaacagcgtcccagtctccttctgcagaagactagggccacagtagccaccctcccccgtggtcttgaggtggtctacactggtgcctccaaatctggggacccaggcctctgcctactaaaatattggttcctgatcccctgtccagttccctcagtggacaacacctctggaaggtcgcatattcaggccactaatacctcctcgctctgttggctcctccagctctaggagctggacggaggaggggagcccgtctcctggcccgaaagccagcccaagaaggggtgccagggtaggaagcaagggcctcgagggaaggagggcccaaatctggcaacccgagcacctaggatgcgcttttgggggattcagagtcccgaccagtgcgcgctcacttccacctgccgcgccgtcgggagccgcgaggaggcggagctcggtcgccgcagccaatgagcgacgccggcgctggcagctgctgctataaagggctgggggcggcggcggcgcggtccagagcgcggagcgcgcagcgcgggccggagggagggagggagggtgggcgaggggagaggacttgaacacacgggaccggacaggaccgaccgaggggcggcggcgaaaggcagagcgccgcgatctctgtcgggaagcgcaacctccccgggccccgcggggccgcgcagggggcgtcctcaaccccgcgcccgctccctctttccatcccctgccgcccgcaggccaccccggggcccggccatccgcgcgcgcat

SEQ ID NO: 20777 - DNA, 2300 bp, Homo sapien
gtgcagcagatcccccccagccccacatcgtaggtaagtccgagagcatgggggcagccaagtctctaaccttacccaggccctgccaggttctcgctgggcctaggctgggctccctgggcctctgggccgagtcccttgcagggcacagggcatgtatgtctccacaccaggaatccagagtcccgatcagcaggccgccctggcccgccacaatccagcccggcctgtctttgttgagggccccttctccctgtggctccgcaacaagtgtgtgtattaccacatcctcagagctgacttgctgcccccggaggagagggtgagggcttaaagcaaagcatgtgttggggctggggagtgggctggcactaccctgagggtgcatgggagaggctggaggagggagaccgagagagccctggcctctgaccccgcctgcactccccaccttggagtaggaagtggaagagacgccggaggagtggaacctctactacccgatgcagctggacctggagtatgtgaggagtggctgggacaactacgagtttgacatcaatgaaggtaaaaactgggccaggtgcggtggctcacatgtgtgctcgtaatcccagccctcctacaggctgaggtgggaggatcacttgagcccaggagttgaggttgcagtgaactattatagagccactgcactccagcctacatgatagaccctgtgtcaaaaaaaaaaaaaaaaaaggcaaaaacctggacaggcaggacttccaaacattccaaacaccacccaggatgaggggcggcctctggggtcaaggggtaggcccaggctgagacgcagtccacttacaccctcgtcctccggccgcacacactcatttgccccaggggctccagacctgaggtcacccagccctgttggcccttgttcattccctccctcctacaactctgtgctggctactgggtgtcaccaggacaaacctagtccctcgagtcagcaagggaacaggcaaattacactttggggagcttaggagaggagcatgccttgagtggggggtcaggaggccttcctggcagaatacagaaaaaccaggagtcatcgcccgggtgaagtgtggagtgggcagcctaggcagcggggctagcttgtgcaaaggtttggaggcacaagaaagtggaaggaagccgggcacagtggctcacgcctgtaatcccagcactctgggaggctgaggcgggtagatcatttgaggtcaggaattcgagaccagcctggccaacatggtgaaaccccatctctactaaaaatttaaaaattagcccggcgtggtgctgtgcacctgtaatcccagctcctcgggaggccgaggcaggagaatcacttgaacctgggaggcggatgttgcagtgagccgagatctcgccactgcactccagcctgggtgacacagcgagactccgtctcaaaaaaaaaaaaaaaaaaaaaaaggaagtggaagggagtgtaaaatacctcaaaaaggtgtaggcatgggttagccgctgcagcccccactgtgcaaaccttaagggtgcatgtcttccaacagtggaggaaggccctgtcttcgccatgtgcatggcgggtgctcatgaccaggcgacgatggctaagtggatccagggcctgcaggagaccaacccaaccctggcccagatccccgtggtcttccgcctcgccgggtccacccgggagctccagacatcctctgcagggctggaggagccgcccctgcccgaggaccaccaggaagaagacgacaacctgcagcgacagcagcagggccagagctagtctgagccggcgcgagggcacgggctgtggcccgaggaggcggtggactgaaggcatgagatgccctttgagtgtacagcaaatcaatgttttcctgcttggggctctcttccctcatctctagcagtatggcatcccctccccaggatctcgggctgccagcgatgggcaggcgagacccctccagaatctgcaggcgcctctggttctccgaattcaaataaaaaggggcgggagcgctgttggttgtgcgcatgcgcagtttccattcttggtctccttttggcgccctggggcagcgagagaccgtgagaaatttctcggcggcgccgaagatgcgcgccacttccggtctggctcctaacaacgggggaggctggtaaccagggtgggggggatggcggagcgggcgctagagcccgaggcggaggcggaggctgaggcgggcgcgggcggggag

SEQ ID NO: 20778 - DNA, 2300 bp, Homo sapien
atcgtgccactgcactccagcctgggcgacagagcaagactctgtctcaaaaaataaataaataaataaataataataatgactgggcacggtggctaatgcctgtaattctgacactttgggaggctgaagcgggaggactgcttgagcccaggagttggagaccagcctaggcaacatggtgaaactccatctctactaaaaatacaaaaattagccgggtatggtggcatgcgcctgtagtcccagctactcgggaggctgaggcaggagaattgcttgaatgtgggaagcggaggttgcaattagctgagattgcaccactgcactgcaacctgggcgacagagccagactccgtctccaaaaataaaataaaataaaataaaataaaatattaaaagactagttctggaaggataaataagaaaacaaaagccatgaccacctcaagagaaggacaccaataactctgaaggccacagccaggtcagcgaccccatcatcttacccactccccagctaagcagagctgactctgcttgcttgtagctgcgggagcctggcagagggcagtagcgctcccagccgctgcccacgtgcctgtcaacttgccagagaggagtgctccagccaagcagctgattggctacaggttttctcagattgcccaatcacaagagttctgatgaggtggatgtcctgcggctgcgcagagtccttgaggcatcctaagggtaggttcttgcatcctagtctccatgccagctcactgcgccacagaggctgagggactgcagaaatgggcttatgagggcagatagccttccttcccgggggacactgttattgccaatagcccattttatgtgcttatccaccttagttattaacagcctaaatctggtgctttctgggggagaccaggagcccccattactcaatctcacctcgttttatcccatttcctccaaagactccactccgaccacacagagtctttgctgttgttcccagtgccaaaagcgttccccagatatccagatggctcactcacttcctccggcctttactcaaaggacacctcactgaggccttcctatttatttatttactgagacggagtctcactctgtcgcccaggctggagtgcagtggtgctatatcggctcgctgcaacctccacctcctgggttcaagcaattctcgtgcctcagcctcccgagtagctgggatcacaggagcacgccaccacgccccactaatttttatttatttatttattttttgagacagagtctcgctctgttgctgaggctggagtgcagtggtgttatcctggctcactgcaacctccgtctcccgggttcaagcgattctcctgcctcaacctcccgagaagctgggattacaggcacccaccaccatgccctgctaactttgtatttttagtagagacggggtttcatcatgttggccaggctggtctcgaactcctgacctcaggtgatccgcaggcctcggcctcccaaagtgttgggattacaggcgtgagccaccgcgccctgccctatttatttattattactatttttagaaacagggtctcactctgttgcccaggctggagtgcaggggtgcaatcatggctcgctgtagcctcgacctccagggctcaagcgatcctcccgtttcagcctcccgaatagctgggactatgagcatgcgccatcatgcccagttaatttttaaattttttgtagataagggggtctcgctatgttgcccaggctggtctcgaacttctggcctcccaaagtgctgggattacaggcatgagccaccgtaccggccccctttcactttttgtttttttttaattcattttctcatttcagccgctggggcctgcgactggattcatagactatgactcccaagtccagcctcccgggccatttcaaggttcccaggtctggagtgcgtcttgcctcattagaggctgggcctggctcgttatgaggcgggtcccagatccttccgccttcctattggcccacctcgcgttgtgggcgggacctattacaccagctttcttgatttgctacctccctggagctccctgacccggacgctctctgggccaatatggcagcgcccagcaacaagacagagctggcctggagtccgcggctggccgcgtgagtaggtaggtcgcgcgcgggtaggcgaacgcgaactgctgggctgcaggcgggcccttcaggacccggcagcgcgagagggcagccctggagggacc

SEQ ID NO: 20779 - DNA, 2300 bp, Homo sapien
attgccttagctcagtggttggcaaacaggggtgatctgcttccaccccgaccccaatcatgggacattggcaatgtgtgtagacatttcttcttttaatttttcttttttagagaccatggtcttgctatcttggccagatggttctcaaactcctgggctcaagggatcctcccacctcagcctccttagtagctgggactacagggtcctgccgcagtgcctcaacatttctgtttattaggactaagagagtgctactggcatgtagcaggtagaggccaggcatgctgcttgaagtcttacaatgaatgcccaaggcagccccccaaccatgaagaattatccagcctcagctgtcaacagtgtggaggttgagaaaccccaccttagcctcatagttgaggttcatggagcatggtctcaaattctcctctgcccctggcctgctgtgtgacgctgaaaaagtgattccaagcccccgtgcctcagtttccccacctgtaaagcaaagtacttgtattaataataacagtgtcagctgggcacggtggctcacgcctgtaatcccagcactttgcaaggccgaggtgggcagatcaactgaggtcaggagttcgagaccagcctggctaacatggcaaaaccccgtctctactaaaaatacaaaaaatagccagtcgtggtggcagacacctgtcatcccagctacttgggaggctgaggcaggagaatcgcttgaacccaggaggtggaggttgcagtgagccgagatagcatcactgcactccagcctggggaatagagactctgtctccaaataataataataataataataataataataataacagtgtccatctctgagggcgtcatgagaattgaatggatatatgtacagagttggaacatggcctgacataagggctgtagtctgtggcatattgcagccatgccattagcatgtgaccgataaactgcatatcctcaacatatcattagtgtgtggcaggttgcagacatgtcatccaagtgtcacaaacatggccttgccatgtggggcatgatgtgggcatagcatccacccctgtggtccaggggtgagatctggctgggtagggctgtttgacagggacacagttcacggcctgggacttgccaacaaagtcaccctgtagttcaggtgacacacaagtggatggggagggtgagacccaggatctcttctcccccaggtccttatgaggggctggaggagacagaactggggtgctggaccctcagcataaagaatgctataggctgggcatggtgactcatgcctgtaaatcccagcgttttgggaggccaaggcgggcagattgcttgagcccagaaatttgagaccagcctgggcaacatagcgagaccccgggcaacatagcgagaccccatctctaaaaaaataaaataaaattagccaggttggtggcacaagtctgcaattctaactacttggatgggctgagatgggaggatcacttgagcctgggaggtcaaggctgcagtgagctgtgattgtgccactgcactccagccgaggggacagagtgaaaccttgccttaaaaagactgctatggcccgagtccctctgctgtgccgggcactgtgctgggcatgtaacaggcatattcttctgatctttacaactctcccatgaggcaggcactatcgttagcccattttacagatgtggccatagaggcccagagaggagaaggggcttacctaaggctatagactgttggtatctggagataaacccgggatggtgctcactaaactaccttgggtgtcagtcctgcttcaagactccagagagataaagagagatgacctcagagacaaagagactcagacccagccagaggcccaatggacagtgggaggggtgggtggaagaaggctggtctctgtctgaccaagcccccccagaataacgcaggctgcccccctaggtggaaacaatgacacaatcagctcccaataccaagggcctgacatcacaaggggaggggaaggcagctgaggttgtggggggaggtgccccgccccttggcaggcccctacagccaatggaacggccctggaagagacccgggtcgcctccggagcttcaaaaacatgtgaggagggaagagtgtgcagacggaacttcagccgctgcctctgttctcagcgtcagtgccgccactgcccccgccagagcccaccggccagcatgtcctctgctcacttcaaccgaggccctgcctac

SEQ ID NO: 20780 - DNA, 2300 bp, Homo sapien
ttagccacgcgtggtagtgcatgcctgtactcccagctactcgggaggctgaggcaggagaatcatttgaagccgggaggtggaggttgcagtgggtcgagatcatgccactgcactccagcctgggcggcagagcaagactccatctcaaaaaaaaaagaaagagttgggggtattacataggaagtgatcagcagataatgaatgaaactccactgtttattctggaagacactggcaggctgctgacctccccgtcacagtggaacgatgctagaaccagcagtcgtgtgtgtgtgtgttggaggaggcgccataggaggctcagggatggcaaacacagtgccctgagcaccgtgcctcgcaggggagttgggctcagtggtaactgctgccgtttccccacccacctgcctcctggacatctgttcctagatatccctctgccacccaaccccatcattttctccaaaaccctgtccttcctatgtgttagacatcagagaatgatgccaccttgtccctctagccactatgtccccgccacaaccttgggagtcatcctggactttccttctctcgtcacactcactcactctgccgccatgtctcctctgtctctctcaccctctgccatctctaccccaacagccctgtcctggctgtgactttgtcttcatccagattatggctcacaccgcagttcctcaaaagcacagggtgactttgtcctttcactccttgtagctcccaggatccatccaaacacccagaaccctcccacctgtccctcctctctccctcacctgccaggggacggacagctgccctgagccttcacacagtgttcctctactcagaagtgcctgtccccacttctctgccctgcagtctgtcatctggatcgaggccatcagataacctgagtgtcactcctcctggatggtacttacatgtcctttgccaagaggagcagccagaataaaatcaccagttcctaggctcttaggctccacccggccctgaacagctggcttgtcttggagtctcttgtgccaccctccccaggaacagtggcttccttgtattggcgccagcgatgatgggccagctctgtgctaagtacttaacttaccattcctggtgtcagccccacaagtctcctctgagatagcaaccttatttcgactttttttttttttttttttttgagacggagtcttgctctgttgcccaggctggagtgcaatggtgcgatctcggctcactgcagtctccgcctcttgggttcaggtgagtctcctgcctcagcctcctgagtagctggggttacgggtgcctgccactatggccagctaatttttgtatttttagtagagatggggtttcaccgtgttggtcaggctggtctcgaactcctgacctcgtgatccgcccgcctcagcctcccaaagtcctgggattacaagtgtgagccaccacacctggccttttttttttctttttttttttttatgcagggtttcatcctgttgcctaggctggagtgcagtgcctggatcataactctggatcatcactgaaacctgaaactcctgggctcaagcgatcctcccatctcagcctcccaagtagctgggactacaggcctgcaccaccatgcctggctaatttttaattttttttttttagagatgaggcctcactatgttgcccaggctggtatccaggtcctggcatcaagtaatcctctcaccttagcttcccaaagtgctggctgggatcacaggtgtgagccaccatgcctggccttgtctctgttttatagacgaggaaactgtggcacaaagagcttaaataacctgcccaggtcacgcagtaagtgagagagatggggttagagcctcgtctcaccccttccatccagagtgggacagggaattgtcctcctgcatcaggactgagggcctcgtccctcaagggcagaggccccgggaccacggtgcaagtcccagaccctctttccggcctgctttctagagcattgagctggggcgctgcgtggtttcctcaaaccactgacatctgccactccccacaggctcatccacctgcagacatggggcgcagaaagtcaaaacgaaagccgcctcccaagaagaagatgacaggcaccctcgagacccagttcacctgccccttctgcaaccacgagaaatcctgtgatgtgaaaatgtgagtggggaacagggcaagggatccagcctccccactgcctcttccccgctgttctccatcct

SEQ ID NO: 20781 - DNA, 2300 bp, Homo sapien
ctggagtgcggtggcacaatctcagctcactgaaacctccgactcccaggttcaagcgattctcctgcctcagcctctctattagctgggattacaggcatgtgccaccacgcccagctaatttttgtatttttagtagaaatggggtttcaccatgttggccaggctggtctccaactcctaacctcaagtgatctgcccaccttggcctcccaaagtgctgggattataaacgtgagccacagcgcctggcccaaactcacgtgctctcttcattggagcaagttggcagagaggcaggagcataggagactagcaggagccaccagtgaggcagaggacagggagcacatggcatcctgagagccacatgtgctctcaggggaggaaggacctctggaatgggaggactgccattgggatttgcagtatggagccaccagtaacctaagtttggaggcaaggggtgcagagagatgggtgggaatgcagatggctgtacactaaaacagcctgcagagaaaaggatcatagctggaagaggatgaagagtttttttttccccctttttaaatgaggagagaggtaataacaagtgtgtgagagtgatccagtggagctggaaaatttgatgttgctcaaagaaaaggggatgggagccagggcagaatgaacaaattgtttttgcaggaacttacttccatagtaaaggaggcatgccgaagctgggcatggtggtgcacacctgttgtcccagctactgagcaggctgaggccagaggattgaggctttagcaagctgtgatcatgccactgcactccagcctgggcaacagagcaagacctcatctcttagataaataaagagggtgggtgaatggctgaatgagttggtcctaggagctgtctttggattgcttctatttactcagtgaactggaagcatcacagttaagagttgggggtgttggctgggcgtggtggctcacgcctgtaatcccagcactttgggaggccgagacaggcggatcacgaggtcaggagatcgagaccatcctggctaacacggtgaaaccccatctctactaaaaatacaaaaaattagccacgcgtggtagtgcatgcctgtactcccagctactcgggaggctgaggcaggagaatcatttgaagccgggaggtggaggttgcagtgggtcgagatcatgccactgcactccagcctgggcggcagagcaagactccatctcaaaaaaaaaagaaagagttgggggtattacataggaagtgatcagcagataatgaatgaaactccactgtttattctggaagacactggcaggctgctgacctccccgtcacagtggaacgatgctagaaccagcagtcgtgtgtgtgtgtgttggaggaggcgccataggaggctcagggatggcaaacacagtgccctgagcaccgtgcctcgcaggggagttgggctcagtggtaactgctgccgtttccccacccacctgcctcctggacatctgttcctagatatccctctgccacccaaccccatcattttctccaaaaccctgtccttcctatgtgttagacatcagagaatgatgccaccttgtccctctagccactatgtccccgccacaaccttgggagtcatcctggactttccttctctcgtcacactcactcactctgccgccatgtctcctctgtctctctcaccctctgccatctctaccccaacagccctgtcctggctgtgactttgtcttcatccagattatggctcacaccgcagttcctcaaaagcacagggtgactttgtcctttcactccttgtagctcccaggatccatccaaacacccagaaccctcccacctgtccctcctctctccctcacctgccaggggacggacagctgccctgagccttcacacagtgttcctctactcagaagtgcctgtccccacttctctgccctgcagtctgtcatctggatcgaggccatcagataacctgagtgtcactcctcctggatggtacttacatgtcctttgccaagaggagcagccagaataaaatcaccagttcctaggctcttaggctccacccggccctgaacagctggcttgtcttggagtctcttgtgccaccctccccaggaacagtggcttccttgtattggcgccagcgatgatgggccagctctgtgctaagtacttaacttaccattcctggtgtcagccccacaagtctcctctgagatagcaaccttatttcgactttttttttt

SEQ ID NO: 20782 - DNA, 2300 bp, Homo sapien
caaggtgggcagatcacttgaggttaggagttggagaccagcctggccaacatggtgaaaccccatttctactaaaaatacaaaaattagctgggcgtggtggcacatgcctgtaatcccagctaatagagaggctgaggcaggagaatcgcttgaacctgggagtcggaggtttcagtgagctgagattgtgccaccgcactccagcctgggcaacagagcaaaacttcatctaaaaaaaaaaaaaaaaaaggctgagtgcagtggttcacgcctgtaatcccagcactttgggaggccgaggtgggcagatcacgaggtcaggagttcgagaccagcctgaccaacatggtgaaaccccatctctactaaaaatacaaaaattagccaggcatggtggtgcacgcctgtaatcccagctactcgggaggctgaggcaggagaatcacttgaacctgggaggcggaggttgcagtgagccgaggcactccagcctgggcaacagagcaaaaagcccatgagtttaattgttggatcctctcctttctggctatactcaccacatgaagatttcacccagtcttagggcttcatgcctactctacactgaggccacctgcttctccagccttgagtctgaactgcagactctgatctatctgcctcagccacacctccacctgatgtctaacttccacctaagattaaacatatcatgtccaaaaccaagcccctgacattgcaacctgctcttccagtcttcctcatctcagctaacagcaattccatctttccggataatcaaatcagaaaccttggattcatcctcaatgtctttttccctcacacattccttatgcgatcctccccctgcccctctacctctgaaatataaattagccgcggcaccacgcccagctaatttttgtattttttgtagagacagggacccaccatgttgcccagcctggtctggaactcctgggctcaagagatactcccgcctcggcctcccaaagtgctggcgttacaagcatgagccaccgtgcccagcaataaccattactgaataaatcactcaatcagtttgcttgtaactctatcactttgggacgtcacgcccgtaatctcatcactttgggaggcccaggtgggaagatcgcttgaagccaggagttccagaccagcctgggaaacagagtgagacccttcatctctacaaaattacaaaaattagccttgagtctgtagtcccagctactcggcaagctgaagtgggaagcttgcgcccaggaggtcgaggctgcaatgagctatgatcgcgccactgcactccagcctcggcgacacagcaagactcactctcaaaaaaaaaaaaaaaagtccaaacaaaatctacggatgagccccagaagctcattttgcccagggactacagtctccccatcccatgaatggggtctggcttgcacaaggaatgcagaggcctcagcctgtcctgtgacaacgttaagtccaagagcgccaaaaggggatggcagaggagtcatcccccgaatctgctggtacccaagaggtggggggttggctgttcctccagactcactaaagcttcggcatcgcctcccgacggccgccgggaggagccaggcgtcccggtagtcgcgcttggaaggatggggtcggggggagtcagtctccccgaccggctttcccccaagctcgaggtcccaggagcctcctccaggaccccgtaaacgcacggagtagaggaacttccagtcctgcccacccccaacgcccactcgcacgagccgcaccagcactcaccttctccagctgcgaaagctccgttcacccgggagatagtgacttccgactcctgccggaagcggaaacccctctcctactttcaggtcccggccacccccatcccggacagcccagcaaataggccctgcctccttcgccgctcctctgagcgcacgcgtactcaaatagcagcgctccgacggagacgcagtgcgcctgcgcaagagccggtgcgtatttgcctgtacctacgcgcgatgccagtacttctggtcagtttccaggagcggcaagtgaggaatatgaaataaccttatggctgaatcagggtgaaggggaagcttgtaagcatggaagacgctctactcaaactaaaaagttcaagttctgatccagcagatgaagagggaggcctgagaggctgctgttctaactcgctcccaggtgacttccatgctgctgatccgcagaccacattttgagtgccc

SEQ ID NO: 20783 - DNA, 2300 bp, Homo sapien
cctgggccacagagcaagactctgtctcaaaaaaaaaaaaaaaaaagcaaaaacaaaaaagtgctgggattacaggtgtgagccaccatacccggccatcatttattgttttttattttattttattttatttttagagacaggatttcactatgttgcccatgctagcctcaaactcctgggctcaagcagtcctcccacctcggcctcccaaagtgctggggttactggggtgagacactgtactcacaaatgtcattttttgaaaactatgcttcactaaagatccagtcttaaggatactgattcagggacatttactgcatcatcacagtggcaaaactcaggaaagtccaggaattgtccatcagtaggataaccgttgattatactatggcagagttgcactatgaatcatgtagctactaaaaacaaaagttaggtatacgtgtatagatggttaagtggaaatagcaagttgcacggtaactgtatagtatgattccatcctgtgtgtattctagtttgctccagcactgaaaaagggtctcacaagagggcagttctactggttacacttgacggttaccagggtaacactgccccctaggggatatcctagagatccctctacagacagcccctgacttgattatgataggtttatcgggatgtaaccccatcgtaaatcaaagagcatctgtattcgaaatacatttcattacaaattatcttcctgaacactctaatgcaacagctcttatcaaggtccgcagggaccagacccttgccaaactcaactgtcaattctctttcctcatcttcttcaactcagggacacgtgacacagctaacccctctctctctccatcttgaaatatctttttcaggccaggtgtggtggctcatgcctgtaatcccaacaatttgagaggccgaggtggatggatcacttgaggtcaggagttcgagaccagcctgaccaacatggtgaaaccccatctctactaaaaatacaaaaattagccaggcatggtagtgcgcacctgtaatcacagctacttaagaggctgaggcaggaggatcgcttgaacccgggaggctaaggttgcagtgagcccatatggcgtcactgcactccagcctgggcgacggagcgaaaccctgtctcagaaaaaaacaaaaccaaaaataaaaaccaataaaagtccttggccgggcgcggtggctcacgcctgtaatcccagcactttgggagaccgaggcgggtggatcgcgcctgtaatcccagcactttgggaggccgaggcgggtggatcacgaggtcaggagttcaagaccagcctggccaagatggtgagaccccatccctactcaaaaaaaaaaaaaaaaaaaaaactacaaaaattagccgggcgcggtgaccggcgcctgtaatcccagctactcgggaggctgaggtaggagaatcacttgaacctgggaggcggaggttgcagtgggccgaaatcgagccactgcactccagcctgggcgacaaagtgagactccgtctcaaaaaaataaaataaaataaaacaaaaataaaaaataaaaatccttaacacggcccacgaggctccatggaatctggccccagcctgtccactcaacctcatctactacaatctgggcactcaaaatgtggtctgcggatcagcagcatggaagtcacctgggagcgagttagaacagcagcctctcaggcctccctcttcatctgctggatcagaacttgaactttttagtttgagtagagcgtcttccatgcttacaagcttccccttcaccctgattcagccataaggttatttcatattcctcacttgccgctcctggaaactgaccagaagtactggcatcgcgcgtaggtacaggcaaatacgcaccggctcttgcgcaggcgcactgcgtctccgtcggagcgctgctatttgagtacgcgtgcgctcagaggagcggcgaaggaggcagggcctatttgctgggctgtccgggatgggggtggccgggacctgaaagtaggagaggggtttccgcttccggcaggagtcggaagtcactatctcccgggtgaacggagctttcgcagctggagaaggtgagtgctggtgcggctcgtgcgagtgggcgttgggggtgggcaggactggaagttcctctactccgtgcgtttacggggtcctggaggaggctcctgggacctcgagcttgggggaaagccggtcggggagactgactccccccgaccccatccttcc

SEQ ID NO: 20784 - DNA, 2300 bp, Homo sapien
cacagctactagggaggctgaggcaggagaatcgcttgtacccgggaggcggaggttgcgtgagccaagattgcgccactgcactccagcctgggcaaccagaataaaactgtctcaaaaaaaaaaaaaacaaaaacaggccgggcgcggtggctcacgcctgtaatcccagcactttggaaggccaaggtgggtggatcacgaggtcaggagatcgaaaccatcctggctaacacggtgaaaccccgtctctactaaaaaatacaaaaaattagccgggcgcggtggcggcgcccgtagtcccagctactcgggggtgctgaggcaggagaatggcgagaacccgggaggcagagcttgcagtgagccgagatcgcgccactgcagtccggcctgggtgaaagagcgagactctgtctcaaaaaaaaaaaaaccaaacaaacaaacaaacaaaaaaacaaaacaacaggagaagatgatgacagacctcacaagagcttggccccagggctgaaaccccacccagtgctgtggttctgcggctgtgggcccatgggtgcccccaaagggtcccaggcagatggaggctcctggttggcgtggaggaaggaaaaggatgaaatcggctcccctggccaccccttctagcccagctgcagctgcagtccgtgggtctgagccgacccttggggttcatcggcccattttacagatgcggagcctacagccgggaggcgtggcggctctgggcggtgcagggttccggggcggggaggccgaggcgcccgccctccccgccggggctcacctgggtcagccctgagccctcgagcagggcggatcggccgctgcctgcttaaagctggggccgccaggagtgcgatcgcctgcggatctgcagctgggcaccggccgcaacgcccgccccgcgacggcaggtgagatgcgggcggccccgtgggaggggtctctgcctgtcctcgtcacccacttccttcccgtttgttgctgctgcagggctgggaatgggggggaccaagcacttcgcagggtgacccggggagatctgtgagccagtggcctcagcgttgaatgagagctctctcccgggtccgcgctcgcagggactgaagggactcctgaatgtccgcgggacgtgtcgcggcggcgcccagcacggaggaggcaggcagggaggtgaggagcaggtcagaccggccgcaggtgcagggcctcctgccctcccaggctgcggtcccgtggagggcctgcagacagctgctgagactatgagggtcagaggtctgtggtcacgcgcgctatcaccagctagctgcctcctgcctggttcctcctgcaggaatgggagtctggggggaggggagggtgtgggcaggacttcctggaaaagggaagcccgttggtgtttatgtgtgggatggagagagggcagggggaggacggggacacacgcggagtcccccacccagatgttgtcaaacacagctcccacaccagacacgcaacccatcctagagatgcaacccaggcacacacacatggacacacacaaaactccatccatagggattcccacccagtgccacgtgagaacacaggcgtgcatcgcagacaagccacacaggcctcgcaggctcagcatacatgtctgcagcaacaccatcaggtacagagccgaggcccaggtaggcatgctcagctgcacgcaggaagcaagacacacccagacacacacaggtaagcccttactcagagaaagaaggtgcaggagatgtgtcttgggtaatcacagccacagcctctcaagtgtgcacacacacacacactcacactgagatacacagacacacagagatacctggacgtgtcaagcctacagcacaaacaggcccctgcaggtccacccggaggctgtgtgggccgaggctgctgcacacgtgtgcccagatcctcccacccccaccccaatcccgtgtcctgctccagggaagtccagggctcacatgacccaaggggagggctcccgggacagccctcggagaaactgcatcatcctcactaatgatccacttcctcctcagggaataaaggctcagggaccggcagttctactctagagcccaccagcctctcagagcctccggtgactggcctgtgtctccccctgggtgagtgctgggcaggctaggtggaaggagggtgaaatgggcctgcagggccatcttggtacagctcgccctctcacagaccgcgccccccttccctaagccagcttgtgc

SEQ ID NO: 20785 - DNA, 2300 bp, Homo sapien
aaaatcagcagaagagagttctcctgggtgaatggagagagaagagcttattcagcaccctggaggagaccagagagagatagccaagaacgcacaggttttattacatgctctgtgcaagatcaggtttatttttttcattgtgctctctctctctctctctctctctctctgagacaagagtctagctgtgttgcccaggctgaaggtcagtggtgcattcgtagcttattgcagcctcaaactcccaggctcaagcgatcctccacctcagcttcctgagtagatggaaccacaggtgtgcaccaccatgcctggctaattttttttttttttttttttttttttgtagcaatgtggtctcgccacgatgcccaggctgttcctgaactcccgggctcaagcgatcctcccacattggctgggtttacaggcctgagccaccatgcttggccagctttttcaatttaaaaaatatagaaagtgttaatacaaattaaaaagttataaaatagtgccaatagtatcccatttttccgaagacaaacataggcagagaaaaattaatggatactgtctctctgggcaggggtattactggctattataatctttttcttcgtgcattccagaatttaccaacttttctacaaagatcatgtagcacaataagataataaacataattttgtgtgatctcaaaatacaggaagcatagaagcttccaaaacacgcctgtacccaccacgtgaagaaacagatgttaacatttggtcataattgcttcagatttctttctttttttttttttctgttttttttttgggggggacagagtcttgctctgtcgcccaggctggaatgtagtggcatgatattggctcagtgcaacctcctcctcctgggttggagtgcagtggcatgatctcagttcactgcaacctctgcctcctgggttcaagagagcacctccagctaatttttgtctttttagtagagacaaggttttgccatgttgcccaggctggtctggaacacctgacctcaagtgatccgctcacctcggcctcccaaagtgccaggattacaggtgtgagacaccacaccggctaaataataagtttttaaaaaaacaggagactggccaggcatggtgactcacgcctgtaatcgcagaactttgggaggctgaggtgggcagatcacctgagatcgggcattggagaccagcctggccaacatggagaaaccccgtctctactaaaaatacaaaattagccgggcgtggtggtgcgtgcctgtaatcacagctactagggaggctgaggcaggagaatcgcttgtacccgggaggcggaggttgcgtgagccaagattgcgccactgcactccagcctgggcaaccagaataaaactgtctcaaaaaaaaaaaaaacaaaaacaggccgggcgcggtggctcacgcctgtaatcccagcactttggaaggccaaggtgggtggatcacgaggtcaggagatcgaaaccatcctggctaacacggtgaaaccccgtctctactaaaaaatacaaaaaattagccgggcgcggtggcggcgcccgtagtcccagctactcgggggtgctgaggcaggagaatggcgagaacccgggaggcagagcttgcagtgagccgagatcgcgccactgcagtccggcctgggtgaaagagcgagactctgtctcaaaaaaaaaaaaaccaaacaaacaaacaaacaaaaaaacaaaacaacaggagaagatgatgacagacctcacaagagcttggccccagggctgaaaccccacccagtgctgtggttctgcggctgtgggcccatgggtgcccccaaagggtcccaggcagatggaggctcctggttggcgtggaggaaggaaaaggatgaaatcggctcccctggccaccccttctagcccagctgcagctgcagtccgtgggtctgagccgacccttggggttcatcggcccattttacagatgcggagcctacagccgggaggcgtggcggctctgggcggtgcagggttccggggcggggaggccgaggcgcccgccctccccgccggggctcacctgggtcagccctgagccctcgagcagggcggatcggccgctgcctgcttaaagctggggccgccaggagtgcgatcgcctgcggatctgcagctgggcaccggccgcaacgcccgccccgcgacggcaggtgagatgcgggcggccccgtgggaggggtctctgcctgtcctcgtcacccacttcc

SEQ ID NO: 20786 - DNA, 2300 bp, Homo sapien
tagagacggggtttcactatattggccaggctggtctcaaactcctgacctcgttatcctcctgcctcagcctcccaaagtgctgggattacaggcatgagccactgtgcccagcttaacctgcctttttttttgagacagtttctctcttgttgaccaggctaaagtgcaatggtgtgatcttggctcaccgcaacctccacctccccgattcaagcgattctcctgcctcagcctcccgagtagctgggattacaggcatgtgccaccaggcccggctaattttgtatttttatttatttatttattttattttatttatttatttatttttgagacggaatctcgctctctctcccagtctggagcgcagtggcgccatctcggctcactacaagttccgcctcccaggttcacgccattctcctgcctcagcctcccgagtagctgggactacaggcgcccactgccacgcccggctaattttttgtatttttagtagagatggggtttcaccgtgttagccaggatggtctcgatctccagacctcgtgatctgcccgcctcggcctcccaaagtgctgggattacaggcatgagccacggcgcctggcctaattttgtatttttagtagagatggggtttctccatgttccgaactcccgacctcaggtgatccgcctgcctcggcctcccaaagtgctagattacaggcgtgctccatcgcacccagcccaacctgccttttaatactaatacattactttgggtctcatcccacatcacttcatcagagagcatccttcctctcacctcagttatttctacttttttttccacgtatagatgttttttcagggaccggagggtatgggaggaagccttggcacgcctcatcccaaatgcccgtttcccggaacatcaggcccttcctcctcttcctgtcctccctggcctagcctgggctccctcccgttctgaggcaaggcgattgctccatgtcacagtgagtgtggagttccctgcacatactggtgaccttgtgtccggaaggaattagaaggaagagctcatggagtgccagaagaagacagtgcctactctggcaagctagaagcaagctctgcattaaatgcaaatattggccgggcacggtggctcacatttgtaatcccagcacctggggaggcctaggcaggaggatcacttgagcccaggaattcacgaccagcctggtcaacatagtgagaccccatctaacccaccccacccccgtcacacacacagcaccaacaacaaaataaaattagcagagtgtggtggggcgtgactttggtcccagctactagggaggctgaggcaggaggatcgtttgagcccgggagattggggctggagtgagccgagatcatgccactgcagtccagcctgggtgacagagcaagaccctgaaagaaaaaaaagaaaggagggagggagggaggatggaaggaaggaaggaaggaaggaaggaaggaaggaaggaaggaaggaaaccaaaacaaggccacgcgtggtggctcacgcctgtaatcccagcactttgggaggctgaggtgggcgtatcacttgaggtcaggagttagagaccagcctcggtaacatggcgaaaccccgtctctacgaaaaatacaaaaattagccaggcgtggtggcgggtgcctgtaattcagctactcgggaggctgaggcacgagaatcgcttgaacccgggaggcagagattgcagtgagctgagatcgcgccactgcactccagcctgggcgacaaaagcgaaactccgtctcaaaaaaaaaaaaaaaaaaaaaccaaaacaaaccctcaaatatccctcgggctgggtgcagggaggaaactcggcctgagaggcgcagtggctagaaccagtcaacactgctacgcacagccacgtttccatggcttcctacgtcactcaggccttagggggcggggtatgtcaccctatccaatcaggggcgctggggcggggccctgccaactgtccattcagatgggcccgggagaggagggcagggcctgcgcctccctacggagcctttgtttctggcgaccgtccccacccgggctcgcgtctccgtttctccgagaggcccaaggtgtctccgccgcagcctctgtcgcgccgtgacctgtacaggtcgcgggagtcgtagggaggacgccgggacacctggaagccgagaaatggtgcgtgtgaggggtcaggcgtccccagacctgggggaggggctggttggaa

SEQ ID NO: 20787 - DNA, 2300 bp, Homo sapien
ttttttccacagtaatattctgaataaggctgctatgaaattggtgtacatgtgtctctgtgtgttgtgcttttgattttttaggatatatacctaggagttgaatagtcacaggggaattctaaattcacctttttaaggaacagccatactgttttacacagtggctgcaatgttttacattctctacatcagtgcacaaggattcccgtttctccatgtcctcatccacacttattataatttttttttttttttttgagacggagtctcactctgtcgcccaggctggagtgcagtggcacaatcacagctcactgcagccttgacttccctggctcaagtgatcctcccacttgaggatcactgggaccataggtgctaagatgggactaccggtctgacccctgctttccatcgtggcctgaactagatttctagattttcaggtttactttgggatgcccttagccgagaggggaatccttcagtttgggagagaggggtgggctttgaattttatttttggtttacacatagaatagctggagtcggagtgtgatttgatatatgtagaaaatctgttaaggtcaagacccattggattaccttatggagaaaaggtttatgaatttgacaatttatgtcagtcagtaccttaaactgactccaggtgagtttcctgctggtgaaaatgaaggtctggggctgggcgcggtgtccttgtctctacaaaaataccaacattagccaggcatgatggcgggtgtctgtaatcccagctactctggaggctgaggcgggagaatcccttgaactcggaaggcggaggttgcagtgagcggagatcgcgctatcgcaccccagcctgggcgacagagcgagactctgtctcaaaaaaaaaaaaaaaaaaaaaaaaagagagaatatgatgaaggtctggaaggagagagtgttgccacactatgcagacaggacaggaaggcatgttgagagcctagagttaaatccttcagtgttcaggcctcatcaccaggttctgatcggttctggggctctgtttcagcagtcagaacctggctcccaagaatctgtttaacctcctgaatagggggtttcctgctgaacagtggctgaaaaactgcttctctgagctagttcatgtttttgcttttcttctcttttgattccttcatagaatattgctgccatataattccagtttttccacacatttaacaattttattccattgttgctgtgtttttattttcttggtgaaaacgagtagactccagggcgcggtagctcacgcctgtaatcccagcactttgggaggccgaggggggcggatcacgagtcaggagattgagaccatcctggccaacatggtgaaaccccgcctctactaaaaatacaaaaattagctgggggtggtggcgcgtgcctgtaatcccagctactcaggaggctgaggcacgagaatcgcttgaacccagaaggcggaggttgcagggagccgagatcgcgccactgcacttcagcctggcgacagagcgagactccgtcaaaaaataaaataaaaaataaaaaaataagactgagagatcaggtgggagaaaggcttggtcatgcagccagcagcttcatcccaaattcctgatccctggaggacatcagaccccctctcctactgcagtgtggcctgtgtggcctcggctccccttctgctccgaggccaggggatgtctccactggacagtgagtctgggattccctgcacacagttgtgaccccccagtcccggaggaagaagcaggaagggctcgcagactattggcaggaattcttcttaaatgcagatattccccgggaggggtcaggtcactgcccagggaggaaccccccctcccccgcccgccccatgccaagagctgtgtctgcaacctgttcatctggctccactcagcactgggagatcacttcttctgtcgctcagtgcctagggggcgggacctggagtactatccaatcagagccgctgggcggggccgtgagaactgtcaatcaggcgtccaggaggctggaggatgcgaggttgaaaaagcccgcggcgtcttctctgtcacccgcgctcggctccctgctcggtcgggctggaacctgtactggcagccggaggtgtaggtaggaaccggaatacctcggaagccgggaaatggtgagtgtccgaggccggggttcccgagacagggtacagctggttgtaaccgaccggaaccggctgtggcgggacccag

SEQ ID NO: 20788 - DNA, 2300 bp, Homo sapien
cagtctgggcaacaggagcaaaactccatctcagaaaaaaaaaaaagacaaactcagaaataaacatcctaactcagaaaagcatggtgttgccatagaactgactgtgaggaaactaacagcaatactttctatattgtgtttaaacttgcacatacaaattttgggctttctagcttctcttaggatttcttttatactttctctgggggagggggtgtgggtctcaccattgttgatttttccttcatcatggtaatgcgaacagctatttttgtctggaagcttttatatgtatttaaatcattgcagaaatcaactacttacttgttgccatttgtaaaaatatacagaatctgtatataaacccctgacaatcagttagtttgatacattgtgccctcttttaatatgtgtggaaacaaataaatagaacattgttccaggagcagttaatgtgaggagtgaggggtggagcatttcataaaatagtagtttatccttcagagagcagtttctagcataatagactgtgggagtgtgtgtgtgtgtgtctgtgtgtgtgcttattatttttttttaaggaaacagtatcatttatgcattaggttatactcagacgtcatttttttcattcattttctaaacgtgcccatttgtcctggcagaaaatgctatagtttctagaagttgattgaagatttcatttcatctattgacatctcatgttcagctcctttctatttagccatggctaccagcttctagttcataacgcttttttttttttttttttgagatggagtttttttttttcctcgctctgttgcccaggctggagtgcagtggtgtgatgtcggctcactgcaacctctgcctgccgggttcaagcgatactcctgcctcagcttcctgaggagccgggattacaggagcgtgccaccacacccggctaattttgcgtttttagtagaaacggggtttcatcatgtttgtcaggctggtctcaaactcccgacctcaggtgatccacccgcctcagcctcccaaagtgctgggattacaggcgtgagccaccgcgcccggccataacgcttttaagtctagtatttttacttcataaacatatggagaaaggctaatgttttcaaattcaaagtgtgatgtcttggcttttgattggagcgtttaattcattaacatttaatggcataaggagggagcatttccacgctgtgcagaggggacaggtattttgagacctcagagtaaaattcttaattgtccctcccttatcaccagcttctgatccaccccggagctccattttaggaatcattgcctggcttcccagcttggggatatgtttgacctcctgaaagggggtctgcttgtgaactgtgagtgcagtaggctgcttctctgagcttgttcaagtttttgcttttcttctcttttgattctttatgaaatattgctgccatataattccagtttttccacatactcaactattttattttgttgtcctgtttttatcttctgggctgaaaatgagtagattgagagataaggtgagggaaaggcttggcaacgtcgccaacagcctcatcccaaattcctgatccctggaggacatcaggccctccctcctgctgcagggtggcctgtgtgccccgggctcccctcctgctccgaggtccgggaatggctccactggacagggagcctggaattccctgcacacacttgtgagtccctgtccaggaggaaaaagcaggaagaacccactgaatacaatcaggaaattctaaaatgcaaacgtcacttcgggaggggtcaggtcactccgttgggaggaagcccgccttgccaagggtcgtgcctggaacctgttcatccggctccactcagcactgtgagatcgcttcttctgtcaatcagccaccaaggggcgggacctggagcactatccaatcagggatgagggggcggggattgtgagaactgtcaatcaggcacgctgcagggaggagggtgcgacgttcaaagagcccgcggagtcttctccacgcccctgcgctctgagtcctggctctggcgctgagagagagacgccctggaaggtctgtatcagcgtctgtcgcgctgggacccacactggcttttaaggaggacacccggacacctggaagctgggaaatggtgagtgtgcggggcccggcgtcccgaggcaaagaaggggcaggttggaaccggccggaaccgaccgtgaggggacccgggcctcgccctgggcg

SEQ ID NO: 20789 - DNA, 2300 bp, Homo sapien
cattctgaaccaggtcatttaattttgatataattgtatggtttggggagattttcttagtcttgatttctatttttattgcactgtggtctgagagtgcagttggtatgattttgtttgcttgtttttttaatttgctgagggttattttatgtctgattatgttactgattttagagtatgtgccatgtggtgaggagaagaatgtataatctgttggttttgggtggaaagttctgtagatgtcatatccatttggtcaggtgttggtggaaggctaaggaggagcaaaggcaaatgttacatggcggcaggcaagagagcatgtacagggaaactgccctttataaagccatcagatttcatgagacttattcactatcacgagaacagcatgggaaaaccgcctccatgattcaattacctcccactggatcactcccatgacatgtggggattatgggagctgcaattcaaaatgagatttgggtgagtaagtctcatgagatccgatggctttataaagggcagttcccctgcacacgctctcttgcctgccgccatgtaacatttgcttttgctcctcctttgccttccaccatgattgtgaggcctccccagccatgctgaactgtgagtcaattaaacctctttttcttcgtatcaccatgggtgccagctcccagttaataacgctttttttttgtttgtttttaaatagagatgggggtttcaccacattgcccaggccggtcttgagctcctgagctcaagcaatccacccacctcagcctcccaaagtggtgggattgcaggcatgagccacggtgcctggcctcataatgcttttatatctggtattcttcataaaaatatgaagatgaatgttttcaaattcaaagtctaatgtctcagcctttgattgaagcatttaattcaataacatttataggcttgatggaaggagcatttccacgctgtgtttaggagacaggagggcaaattgaactcccagagttaaatccattagtgcccctgactcatccccaggttctgatccaccctagggctccatttcaggaattatcgtctggcctccaagctttggaatatgtttggcctcctgaaagtggttgacttgtgaactgtgtgtggatgcagcaggctgcttatctgagctagttcaagtttttgctttataaaatattgccgccatataattccagtttttccacacatttaacaattttatttatttcttttttcttttttctttttttttttttttgagacggagtctccctctgtctcgcccactctctcactgcagcctctgccttccaggttcaagtgattcctctgtctcagcctcctgagtagctgggactacaggcgtgcgccaccacatccggctaatctttgtattttagagacgggatttcaccatgttggccagactggtctcgaatttctgacctcaggtgatccacctgcctcagcctcccaaagtgctgggattacaggtgtgagccaccacgcccggctttgttggggtgtttttatattctgcactgaaaattagtagattgagacataaggtgggagaaaggcttggcctgtgcagccaacagcctcatccaaaactcctgattcctggaggacatcagcccctcccttctgctgcagtgtggcctgggctcccttcctgctctcaaatcaggggatagctccactggacagtgagtctggaatttcctgcacagacttgtgggtccctgtccaagaggaaaaaggaggaaggtcaggacatactgcctaaatgcaaatgtcccctgggagggggtcaggtcacagcgcagggaggaagctagtcctctcaaggcctgtctggaatctgtttatcaggttccactccgctgcccgagatcgcttcttccgttactcagtgcccgggggagggacctggcgcactatccaatcagggccgcggggcggggtcgtgagaactgtcaatcaggcgcactgaccggaggagggtgcaaggttcaaagagcccgccgagtcttctccacgcccctgcactgggctccgggttctgtcactgagagacgccctggaacgtctgtggcagcttctgtctcgctgggacccgcactgacagcgggaggcagagggaggaacctggacgccggaagccgggaaatggtgagtgtgtgaggtctggtgtcccgacgcgtgagaggagagactggttggaaccggccggaaccggctgtggtggcaccaggtcttccccgccg

SEQ ID NO: 20790 - DNA, 2300 bp, Homo sapien
ttttcctagttccatggggtaccatgttaggttgttaatttgttacttttttgacagaggcatataattctataaacttccctcttagcatgacttttcctatatcccagaggttttgatatgttgtgttgccatttttgttcatttcaaacaaaatttttattttctgtttttatttcttctttgactcagagatcattcaggagcacattgtttaatttccatgtatttatacagttttcaaagttcctcttggtattgatttttagttttattcagcagtctgagaagatgcttgaaatgattttgactttaaaatttgtcgagactagttttgtggcctaacatatggtctaccttggagaatgtttcacgtactgatgagaagaatgtatattctgcagttgttgggttctgtaaacgtctgttagctccatttggtccaaagtccaacttaagtccaatttttttgttgattgtctgtcttgatgatatatctactactgtgtgtgaggtgctgaagtcccatactattattgtattgctatctatatctttctttaggtctagaaatatttgctttattaatttggcctctccaatgttggatgcatatatatttagtattactatattatcttgctgaattgattctgttatcagtatctcatgatcttctttgtctttttgtactgttttttatttaaagtctattttatctgatacaactatcacaactcttgctgaagcacagtggcgagatcataggtcactgaagcttcaaactcctgggctcaagatcttcccacctcagcctcccgagtagctgggactacaggttcaggacaccacgcactgctaatttttaaatttttagtacagacgaggtgtggctccgttttccaggatgatgaactcctgggttcaagcagtcctcccgcttcagcctccaaaagggttgggattataggcgtgagcccccgcaccctgcctgcaagtcttttaattcacttcaattatcttagaattttccttccccactttatacatacgtacagtggaactgagggtgtttgtctcaggtaaccgatcaatgaagtgaataacctgtagggggcagcagagcctaaggccagtgacaccctgctgaggccagtctggagccggcaaagggagggaaagggagctcccctgggtgtttcccgggcagcctgccctctactgcaggtggcctccagctgctcagaacagctgcggaaggaatgtggatcctgagaagctacagagccctggaaagcaggagactcacgtgcaggtgcactttgtgtaggggggttggggggaggttctgtccttactggggctgtacctagagcctagggacgttttgcgggggcagtgtttggtttttacgtgcaaagggtcccggcgacagactgtaatttgtacatacaaagataatctgtgaagatcaggctcagtaagatttgtctgacatgtcacctggagaaagggtttgtgaaggtaatagtttacttaggttagaagcttaaactgaccccaggtgagaacttctgctggtgaaaatgaagtctagggggaggaagcggttccatattcaggggtgggacggggggagtgtgaggaagtctcatccccaattcccgccctgtagaggacacctgcctctccctcctggtgcagtcttgcctggcctggcctggcctggatttccttcctgctatgaggcaaaggaatgactccattgaacaccgagtctggaattcccagcacacatttctgaaagatcgaggaagctaacagtgccccttctaacaataagtagcaagtttggctgaaatgcagatagccaacgaccagggcgcagggagtgagcttagccttagaaaggctgtagctaggattaatcagccgggctctgcagggctccgttacccagggcttaccctgtcactcagggctgaggggcggagcctggaaccccatccaatcaggggccctgggacggggccctgccaactgtcaatccggggaagcagaaggccgcactcagagtctctgcactcctttgttgctggggtccgttgcgttctgcatccagtccttgctgctccgagaggccccaggtgcctccgccacggctcctgtgacgctgtcacctgcgctgtgacctgctccggagtcataaagaggacgccgggacaccaagaagcagggaaatggtaaagtgcccggcctagcgtccagatacgtggaagaggggctgggtggaaccaaca

SEQ ID NO: 20791 - DNA, 2300 bp, Homo sapien
gtgtgagccaccacacctgtcctacctttatttctaataactgatatgccttacattaaaaagtcttttagaaaacacctttgagccattttccagataggggaagtcaatgaagctccctcttgtggtgagggcgactttaacatccacacatcctgtctgggggactggatttctgagttgtgctgagacttaagagtggaaaaaaagtctactctttttcctctgctctcacacaacacggaatacttctgtgaccaaatgcaaatatttgagaagtgtcccccacatgccaagcaaagcatcaattctgcaactgactccagctcgatgtcttctagttccaacactttctacctttacataaggtacaaaactgcctcagaaatcatctgaccatgtgtcccggtttgccagtgataatccttgatagtacctgttgtcccaacatagtttttcatagcacctcatcttgccatggttatctgtgtctgaacaatgaatatgtatgaatactttcacacataagcaaaattaggtttattaaatgaagtttccaggaatgttcaaatttcaacacctgatttaccttatcacaagttatggctgtgctaatttctccaggaaatattcacagaatattgaatttatcattgtaaggtgtggagcaatgaagatgcccaagaggccaggcgcacacctgtaatcccaacactttgggaggctgaggctggaggatcacttaagctcaggagtttgagatcaacctgaacaaccgaatgagacctcatctctaccaaaaataaaaaactagccaggcatggtggcaggcacttgtagtcccacctacttaggaggctgaggtgggaggattgcttgagtctgggaggttgaggctgcattgagtagccatcgcaccactgcactccagcttgggcgacagagtgagaccccgtctcaaaaaaagatggctaaaacataatttttttttttttgagatggagtctcactgtgtctcaggctggaatgcagtggcacgatcttggctcactgcaaactctgcctcccggttcaagcaattctcctgcctcagcctttcaagtagctgggattacaggcatgcgccaccattcctggctaatttttgtatttttagtagagataggatttcaccatgttggccaggctggtcttgaactcctgacctcgtgatccacctgcctcagcctctcaaagtgctgggattacaggcatgagccaccgcgcccggcctgcctaaatcataatttctatgacagaatttctcatttacagcttcccctgagaccatctttcatttcagttaaccctgctccttgggggttatatgtgagataaaagtgccatgctatatcatgttccctggctcagtcctacacagcatgtcctgaaaaatgggtcttcagtcactgtcaatgcaccagggatagatatacatagtactgagagcctctaaatctttaataagttctggcttggttagctcccttacaaggaaaaccttgctggagtccatagcagtgtgaggaagccttggccatgcctcatcccatttcccgcacgctggaagacatctgcctctctctcctggtgcagtcgtgccttgcctggtctgggctcccctcctgctctgaggcaagcgtatctctccattgaacactgagtctgaaatgccctgcacacacttgtgatcccgtgcagaaggaaggagcagggacagccccttgaatgaggaagctaacagtgcctcttctaacaataaggagcaagtcgccttgaaatgcaaatatctgatgaccagggctcaaggaaggcgctcgcttagagaggctgttcgcttagagaggctgctcgcttagagaggctgctcgctcagagacgctgtggccagaacaagtcagacatgatctgcaggacccggttacccagggcttctgctgtcactcagcacggaggaggcggggcctggcgccccatccaatcaggggtgctggggcggggccctgtcaactgtccatccggggaagggggaagggacagtcgccctccgtccattcctttagtgctgcgccgacagcggtcaggatctcggctttcttgcttcgagagggactaggtgcctccaccagagcttctgtcgctctgtaacctgcactgtgacctacactagtcgcgggagccacgcagaggacgccggaacaccctggaagccgagaaatggtgtgtgtgagggggctggcgtccgggcgactgggagaggg

SEQ ID NO: 20792 - DNA, 2300 bp, Homo sapien
gggatggtttcaccaggggccttttacattgacagcaaggaggtcatccgcctggtaaatcctcagtagtccaagcctcttacatggctagaatgatccagtccataaggaaacgtcaccaccctctgtgttttacaattagaccatccaagggggtcagggtttccccagggaatttggtgggatttttttttttttgagaccgtgtcttgctgaagtacagtagcctgatcaaagctcacagcagcctcaaactttggggctcgagtaatcctcctgcctcaggctcctgagtagctgagactaagggtacacaccacctctccaggctaataaaaaaaaaattatggagatgggagtgtctcacttcactgctcagggtggtcttcaacttcgggcttcaagtgatcctcccactttggcctcctaaaatgttgggattgcaggtgtaagccatggcacccggcctcccaggctgttgttgaaaggtctttgcaatctctaagagttctgcagcagtttattccctgacagtgagagtctcatcctttcaccccattttgcagcagtagttgggtgttcacttttctttccataaggaagcgagcttgccagtgaccctcatccccctcctcatcgatgacttctttgtcatcagagccttcctcttcataaattcccacggaatccaagttttcacgtcccaaattatgatagccacaggccctcaccagctgccatagcaccccatttcatggaagccacctgactcttctttgagcatcctgtcccaggagcccccatctgtgctctcccgggctccaggccctagagccgcgctgctgcagagcccagttcccagggctgctccctccacgtatccacatccatctccagctttccaccctttctctgaccagacaggcctggaggtgctgcagtgtcagtgaccgtgggtccctccgctgccacctccaccgcgatctggaagtcttttaaatgtacttaagttatcttagaattttccttccccactttatacataaacataggaggagagcagggactctgctggtgtcttattcacacaatgggattgagggtgtttgtgtcatggaactgatcaatggggtgagaagtagctgaataacctgcaggggcagcagagcccgaggccagtgactccacgctgaggccagtctggagcctgcaaaggaagggaaaggagcttttcctgggggcttcctgggcagcccgccctcccctacaggtggcctccagctgctcagagcagctccagaaggagtgtggattccgagaagctgtagggccctggaaagcagaagaccttcgtgcagacgcatttgtggggttctgtcctttctggtgttgtacctctggagcctggggctgtcttctgggcagggtttggggtttgacatacatggggtcgctggagtcagagttatttgtatatataaagaaaatgtgtgaaaatcaggctagagacacaattgtttggtggcgtcacctggataaaaggtttatgaggttgacagtttatttaggtccgaagcttaaccccaggtgagagtttcctgcaggtgaaaatgaagatctggaaggacggagcattttcatactgtgaggaggggatgggggtgtgtgagcaagtcttggccatgcctcatccccaattccggcccgctcgaggaaatatgcctctcctcctggtgcagtcttgcctggcctggtctcggttcccctgctgctctgaggcaggagatggctcctgtggacactgagtctgaaattccctgcacactcctgtgaccccgtgcagaacgaaggagcggggacagtcctttgagtgaggaagacgctagtgttctcttctaacaatagcaagtttggctgaaatgcaactatccaataacccgagtgcaggaagcagctcgtgtaagcttagagaagctgttgctagaatctgtcagtctggctccgcagggcctgatacccagggcttccgctgtcacttagacgtggggggcggggccgaacattccatccaatcagaggcactggctcggggccctgcccactgtgcatccaggcacggaggatgttgcattcctgccgtcacctttgtcgctgcgagggcggcggttgggatctggcctttccagccccgagagggacctagtgcctctacccagatttctgtcgctctgtcacctgcgctatgccctgctttactcacaggagctgtagagaggaccccggtacatctgaaagccggg

SEQ ID NO: 20793 - DNA, 2300 bp, Homo sapien
gcccaggctggtctcgaactgcggggctcaaatgatctgtccgccttgacctccggttttgcatttttaatacttgtctttatagtagatttttctatgttcctagtgcctctcttgcgatcatatggaatcttctcttgtatatttagtttattaagtgtttttaatcatgaggagatatcaacccatttatgctagaggttgcaattttttgaattgcagacgtgtgaaaaatcagactttggtaatgaccttgagcagtaggatacaaataactcccacatgcttagcgttccagaaatggaacagtgggctcaaatgggttaaggcttgtcacatgccttttctgcctctattaggacattcttctcattttttgtttgatttgagatggagtctcactctgtcgcccaggctagagtgcaatggtgggattttggctcactgcaacctctgcctcccgggttcaaaggattctcccacctcagccttccaagtaacagagaatacaggcactcgctgcacgcctggctaatttttgtgtttttagtagagatggagttccaccatgttagccaggctggtctcacactgctgacctcaagtgaaccacctaccttggcctcctaaagtgctgggattgcaggcataagccaacacgcctggctgctaccgtgatttgttatcaatacttactataaaacaaaacttaaaaattatcagcttaaggaattttacatgtacaattgagataggttgacaaatctatgtaagttctctaagatgaattctgttgtattttgccttttgcaattatcctgatgtttcatatatgtcgtagtatgggccaagatattgttttctttctttcttttttttttttgagatgcagtttcactcttgttgcccaggctggagtgcaatggcacaatattgactgaccccaacctcaagcaattttcctgcctcagcctcctgagtagctgggattacaggcatgcgccaccatgcccggctaattttgtatttttagtagagacaaggtttctctatgttggtcacactggtcttgaactcccaacctcaggtgatctgcccgcctccacctcccaaagtgctgggattacaggcatgagccaccgcaccaggccaagatgttattttctaagactaaataatattccattgtatgtatatgcttaccacattttgtttatccattcagccatcaatggatatgtgggtggctgcattgctcattactgccaccccaggaaggtcgtatagtggttaaatctgtgctcattacacctgggtatctcttaggagtttcttgtttgccctcttgtgtaattacggtcttgtttttttcagtaatgtcctgtttgcccttcttatcagcatctatctagctacattctgacaggataactgcaaactgaatgattcctgggcatcataatggatgtttctttctacttaggtgtctcccctcctctctgcttatatctagcatgcctgttttgggtggtccctggggttgtgggatttcccaggggctacccttcctgctcttggctagatatctgccttctctaacaatgtcatcaaagattacactttgggaacaggcattttcaaggatacacagcttcaggactgctaatgttaacttttttctgcatattaattcatagtactctgttatgacaggtgctacagacccacagtccaaggagacattagggacagcccaagcagctgacagagcgatacactatcacaaaaaaaaaaaaaaaaaaaaaaaaaaaattgctgtctgggtgtggtggctcatgcctgtaatcctagcactttgtgactctgaggcaggtggatcacctgaggttgggagttcgagaccagcctgaccaacatggagaaaccctgtctctactaaaaatacaaaattagccgggtatgctggtgcatgcctgtaatcccagctactcgggaggctgaggcagaagaagcacttgaaccccggcagtgagccgagattgcaccattgtactccagcctgggcaataagagtgaaattctgtctcaaaaaaataaaaaaaaaaattgctttatggaagaaagtaagtatagacagagagaaagggatctgatgaccaaagcagggaataaatgtttggagtccacggcatcctgagaacttcttgggaatagagtctaggcccccaatgctgtcactctcacccatcctcctctacacatgtgagatgtttcaggacccagtggcttttaaggatgtg

SEQ ID NO: 20794 - DNA, 2300 bp, Homo sapien
aatacttatttcttttacagtcgtaacaggtgtacttattcttgttaggcgttgtgtcataccatgcatccgtaggctaatacaaaggattgtacgaacagcatttactgaaacctcccttagttctcctccaccttattcaagtaagcttttccttttaaaagatcaaatcaaacagcaaagccaaaacacgttaaaaaagtttaaagagaaaaaatcataagaaaattaaaagggaggaattgtaacatacagtaaatttctctgagtttctttttttttttttttttgagacggagtctcactctgtcacccaggctggagtgcagtggcgtgatctcggctcactgcaagctctgcctcctgggttcatgccattctcctgcctcagcctcccgagtagctgggactacaggcgcccaccaccacgactggctaatttttcgtattttttagtagagacggggtttcaccatgttagccaggatggtctcgatctcctgacctcgtgatctacccgcctcagcctcccaaagtgctgcgattacaggcgtgagccaccgcgcctggcctctctgagtttctcttcaaagacttagcctgctaacttccttgtcttttgttctccagctcaactttcctgttcctccttgcccctagttactgtaaaacagcctacccccttcccgtcagctctaatcaataactcacatctgttcccttggttacctgtacccattgttcccccgaaactgcacgtctcacacgctccatctctgtacctcacgttcccctctccttctatatttagaaaaatacgtacaagtagccagtcgggtcagctcagattgtgtggtcgaaccccagcccatgaaggagtgacacagagatagggaccgcattaaggataaaaaaacccccggtgacctttgttctctgtgctcttgtgatcttgattgacacaagtggcacacttctgcagaagtaaattgccttgctaaacaaatgaaactttcccctaagtgctagttttacttcgtgggaccaagaatttattcctaaagcattttatatccgacagagatattcatatatataaagaaaatgtgggccaggcgcggtggctcacgcctgtaatcccagcactttgggtggccgaggcgggtggatcacttgaggtcaggagttcaagaccagtctggtcaacatggtgaaaccttgtctctactaaaaatacaaaaaattagccaggcgcggtggcatgtgcctgtaatcctagctgctggggaggctgaggcaggagaatcacttgaacccaggaggcggaggttgcagtgagtggagattgcaccactgcactccagcctggggggacagagcgaggctctgtctcaaaaaaaaaagaaaagaaaatgtgtgaagatcaggctagagacagaaatgtttgggagcgtcacctggataaagggttcatgaagttggcagtttatttaggtcaaaagcttaacttaacccctggagagagtttcctgctggtgaaaatgaagatctggaaggaggaagcattttcacactgtgaggaggggatgggggtgtgagagcaagtcttagccatgcctcatccccagttgcggcccgctccaagacatatgcctctcctcctggcgcagtcgtgtctggcctggtctcggttcccctgctgctctgaggcaggagatggctcctgtggacactgaatctgaaattccctgcacactcctgtgaccccatgcagaacgaaggagcagggacagtcccttgagtgaggaagacgctagtgttctcctctatcaatagcaagtttggctgaaatgcaaatatccaataaccagagtgcaggaaggagctcgcccttggaaaagctgtggtcagaatccgtctgtctggctctgcagggcccgatacccagggcttccgctgtcactcagacatggggggcggggcctagcattccatccaatcagaggcattgtggcgggtccctgcccactgttcctccagacactgagggggtcgcattccttacctcacctttgtccctgcgcgggctgcggctgggatccggtctttccagccccgagagggacctggttcctctgcccaggcttctgtcactctgtcacctacgctatgccctgctgtagtcacaggaggtgtagagaggaccccgggacatctgaaagccaggaaatggtgcgtgtctggggccgggtgtcgtgagacgggggaggggctgcctggaccgaccggaaccgactgtg

SEQ ID NO: 20795 - DNA, 2300 bp, Homo sapien
tctggccagggcaatcaggaaggacaaagaactaaagggtattcaagtaggaaaagaggaagtcaaattgtccctgtttgcagatgacatgattgtatatttagaaaaccctatcatctcagcccaaaatctccttaagctgataagcaacttcagcaaagtctcaggatacaaaatcaatgtgcaaaaatcacaagcattcctatacaccaacaacagacaaacagagagccaaatcatgagtgaactcccattcacaattgcttcaaagagaataaaatacctaggaatccaacttacaagggatgtgaaggacctcttcaaagagaactacaaaccactgctcaacgaaatcaaagaggacacaaacaaatggaagaacattccatgctcgtggataggaagaatcaatatcatgaaaatggccatactgcccaaggtaatttgtagattccatgccatccccatcaagctaccgatgactttcttcacagaattggaaaaaactactttaaagttcatatggaaccaaagaagagcccacattgccaagacaatcctaagccaaaagaacaaagctcaaggcattaggctacctgacttcaaactatactacaaggctacagtaaccaaaacagcatggtactggtaccaaacagagatatagaccaatggaacagaatagagccctcagaaataataccacacatctacaaccatctgatctttgacaaacctgataaaaacaagaaatggggaaaggattccctatttaataaatggtgctgggaaaactggctagccgtatgtagaaagctgaaactggatcccttccttacaccttatacaaaaattaaattccagatggattaaagacttaaatgttagacctaaaaccataaaaaccctagaagaaaacctaggcagtaacattcaggacataggcatgggcaaggacttcatgattaaaacaccaaaagcaatggcaacaaatgccaaaattgacaaatgggatctaattaaactaaggagcttctgcacagcaaaagaaactaccatcagagtgaacaggcaacctacagaatgggagaaaatttttacaatctacccatctgacaaagggctaatatccagaatctacaaagaacttaaacaaatttacaagaaaaaatcaaacaaccccgtcaaaaagtgggcaaaggatatgaacagacatttctcaaaagaagacatttatgcagccaacagacacatgaaaaaatgctcaccatcactggccatcagagaaatgcaaatcaaaaccacaatgaaataccatctcacaccagttagaatggcaatcattaaaaagtcaggaaacaacaggtgctagagaggatgtggagaaataggaacacttttacactgttggtgggactgtaaactagttcaaccattgtggaagacagtgtggtgattcctcaagaatctagacctagaaataccatttgacccagccatcccattactgggtatatacccaaaggattataaatcatgctgctataaagacacatgcacacgtatgtttattgtggcactattcacaatagcaaagacttggaaccaaaccaaatgtccatcaatgataggctagattaagaaaacgtggcacatatacaccatggaatactatgcagccataaaaaatgatgagttcatgtcctttgtagggacatggatgaagctggaaaccatcattctgagcaaactataacaaggacagaaaaccaacactgcatattctcactcataggagagaactgaacaatgagaacacttggacacagggagggaaacatcacacaccagggcctgtcatggggtagggggaggggagagatagcactgggagatatacctaatatgaatgacaagttaatgggtacagcacaccaacatggcacgtgtatacatatgtaacaaacctgcacattgtgcacatgtaccctagaacttaaagtataataataataataataaaagaatgcactctgtagaaagaccttataaatgtaagatatgtgggaaaggcttttattctgccaagtcatttcaaatacatgaaaaatcttacactggagagaaaccctatgagtgtaagcaatgtggtaaagcctttgtttctttcacttcctttccatatcatgaaaggactcacactggagagaaaccctatgagtgtaagcaatgtggaaaagccttcagatctacctcacacctttgaaaacatggtaggactcacactggagagaaaccct

SEQ ID NO: 20796 - DNA, 2300 bp, Homo sapien
aaatagatttatggagatgggagtgtctcacttcactgctcagggtggtcttcaacttcgggcttcaagtgatcctgccactttggcctcccaaaatgttgggattgcaggcatgagccatggcacctggcctcccaggctgttgttgaaaggtctttgcaatctctaagagttctgcagcagtttattccctgacagcgagagtctcatcctttgatcccattttgcagcagtagttgggtgttcacttttctttccataaggaagcaagcttgccagtgaccctcatccccctcctcatcgatgacttctttgtcatcagagccttcctcttcataaattcccacggaatccaagttttcacgtcccgattgggcttagttatgatagctactggctcacacaagctgcaacagcaccccgtcccatggaagccacccgactctctcctccctgagtttcctgtcctgggagcccccatctctgctctcccgggctccgggccctagagccgcactgctgcagagcccagttcccagggcagctccctccacctatccacatccatctccagctctccaccctctctcccaccagcctggcctggaggtgctgcagtgtcattgactgcgagtccctcagctgccacctccaccgcgatctggaagtctttcaaatgcccttaagttatcttagatttttcctcccccactttatacataagcataggaggagagcagggactctgctggtgtcttatttacacaatgggattgaaggtgtttgtctcgcgaaactaatcgatggggtgagaagtagctgaataacctgcagggggcagcagagcccaaggccagtgattccacgttgaggacagtctctgcagcctgcaaagggagggaaagagagtttccctgggggcttcgcgggcagcccacccccttctacaagtggcctccagctgctcagagcagctccagaaagggtgtggattccgagaagctgcagagccctggaaagcagaagacccatgtgcagacgcatttgtggcgtctctgtcctttctggtgttgtacctctggagctgtcttctgggcagggtttggggtttgacatgcatggggtcgttggggtcagagttatttgtatagataaagaaaatgtgtggccgggcgcggtggctcacgcctgtaatcccagcactttgcggggccgaggcgggcggatcaagaggtcagaagatcgagaccatcctggctaacacggtgaaaccccgtctccactgaaaatacaaaatattagccgggcgtggtggcgggcgcctttaatcccagctactccggaggccgaggtaagagaatggcgtgaactcgggaggcggagcttgcagtgagtcgagatcgcaccactgcactccagcctgggctacagagcaagactccgtctcaaaaaaaaaaaaaaaaaaagaaagaaagaaaagaaaatgtgtgaagatcaggctagagctagagacagaattgtttggtggcgtcacctggataaagggttcatgaagttgacagtttacttaggtcagaaacaaaacctggtgagagtttcctgctggtgaaaatgaagatctgaaaggaggaagcattttcacaaggggatgggggtgtgtgagcaaggcttggccacgcctcatccccaattccggcccgctcgaggacatatgcctctcctcctggtgcagtcgtgcctggcctggtctcggttcccctgctgctctgaggccagcagttggctcctatggacactgagtctgaaattccctgcacactcctgtgaccccgtgcagaacgaaggagcggggactgtcccttgagtgaggatgacgctagtgttctcttctatcaatagcaagtttggctgaaatgcaaatatccaataaccagagtgcagaaagcagctcgcccttagagaagctgtggctagaatccgtcagtctggctctgcggggcctgatacccagggcttcagctgtcactcagatgtggggggcgggacctagtatttcatccaatcagaggtgctggggcgtggcactgcccacagttcatccggaaatggagggggtcgctttcctcaccttcctcgctgcgcgggcggcggttggtaaccggtcagaccagcccgagagggacctggtgcctgtacccaggcttctgtcgctctgtcgcctgcgctatgccctgctgtagtcacaggagctgtagagaggaccccggtacatctgaaagccgggaaatggtgcgtgtgcg

SEQ ID NO: 20797 - DNA, 2300 bp, Homo sapien
aaatacttgttatcttcacattttggcatttctgtgaagtctacctgcagatcttcaaagggggctgctccataagcttgtatgccagccgggacggttggaccctgccttgcattgtgttgttggcaggtaatacatcgctgtgccactgtttcagcaagggctgataaatgtgagatgtagaagtaccggcttaacaacttttgaagtgactcctggcctagatgggtggttttatgcacagccagtatgactgtggctcccagcagctgtggcacagctactctcccatccagtaaccacatccatccttcttccatcacctgtcctccctctgcctggagaaagtccttttcttctttagaataagtgggtacaaggtaggccactggccttggccagggccccacagtctgggttagaactccaactgcctttttttctttttctgacacagtgtaaaaggctttgttagattaggtagccccagggctgggactgacataagtttttcctttaactcatgaaaggctcactgttgttgggattcccattcaaaaggttcccagcacccctctttgtgaccccatatagaggtttggccagtactgcaaagtttgggatccacagtctgcagaaccctactgctcctaagaattctctcacctgccttctggttttaggttgcaataggctgcagatgacctgctttctttctgagcttgattgaccaagcacaagtcctgtactggcctgtagttcttggtccctggcttgggaacaggcaggagggtagtgttccatggagactggcaaaggactataattccaaaggctctcaagtgcttgaggtggacctggattccttcaagagcttctctagggaaccgggtactgtttttgcctgaccggctgggccccaggcttaacttctgtaggtacgggggtttggttgactgccagccctggagggttgtcttctgcccacacctttgaccatcacttagccagagctggtcttatctcttgacctggctcggttaagaaaagtcttcattcctcctcctgggggacagtaagggccatgatgactccctttccgggtaactttagctgtaaaagagctgtgctctgtaagagagatggtggctctcagcttgctaagcaagtcccttcccagcaagggcaaggagaagtcgggcatgtacaagaactggtggattacttcatgtacccctatagtacaagtgcagggcaagcagaaagcttgttttgccgagactcgtgtggcttcgattatatcaatagtctttttggataagggggtgaccggggtggttactactgaatattcagcaccagtatcgacaagaaactctatgtccttgtccctgactgtcatcctgaccatgggctcgttaggggcacctgagcctggtcccccttagtccagtagcccttctgccagattaaacaaggccctttcatccttgcctgagacctctggcttggagccattttgtttcttctttaactgggggcacttgtctttccagtcttagatcgtaaatgagctgccaagggaggggtttctcccgcagcttcacattctctcttgtctgttctgggtggtctaggggtgtatctgtccagaggaggcacaggtgctgtgggctcaggagtggggagtctctcttctaggtaaggacggggggcattgctgtgccatttcctgccatgggtcctctgacattgggtcagatagaactttaggagctgacttcccttggcgggtggggagagatccctcattggctatctgtccctttgccactaacactgctgctgcctgtcctctcaaccactgtggggggtctaaaaccagctgtaactaagtgtctgtgtacaggaacttgtctggataccctggcttacaggtaatcttgtgccatacctttgaaataagggacctatccaggcttccttctgatggccaacccacctctaatgctggccagtctgtctcacacaaagttctaagttttcctggtgttatagtaactccatagtctcccttaaatccctttttgaaattttttataacatagttcctagtggggtgggcttactttgtgtctgacccatttttctttcgagacaagacaacactcacactacaagagggaaagggtaaaggtcactcacgcgtggtggtacatgcctataatcccagctactcgggaggctgaggcaggagaatcgcttgaaccccggtggtgagccaatatcacgccattgta

SEQ ID NO: 20798 - DNA, 2300 bp, Homo sapien
aaatccagtctctactaaaaatacaaaaattagccaggcatggtggtatgcgcctgtagtcccagctactcaggaggctgaggcaggagaatcacttgaacctgggaggcagaagttgcagtgagccaagattgagccattgcattccagcctgggcaacaagagtaaagctttgtctcaaaaaaaaaaaaaaaaaaaaaaaaatttttttgaaacaaactctatataagacaaatgatatttttctgaaatctgtctttatctgggctctgtgcaaaattttcttatctttccaattgtaatgaaaatgcaatttacaattcattaaaaaaaatctgaagctgcaataagtgaacaattttttttgttttttgttttttaacaaaggccctcactcaattacccaggctggagtgcaggggcacaatcacagctcactgcagcatcaacctcccaggctttggttctccttctgcctcagcctcctggatatggtatgtgccaccacatccagctaattttttgtattttttgtagagagagggaatcgtcatgttgctgtggctggtcttgagctcctgggctcaagtgatcctcctgccttggcctcccaaattgttgggattacagatgtgagccactgtgcccagcaatgaataattctttataaggagacaaaccttgtctgggcatggtggctcatgcctcgaatcccagcactttgggaggctgagctgggaggactgcttgagacaaacaattagagagcaacccaagcaacatagcataatcctgactctattacttaaaattctaaatgaaagtctgaatgaaaagcagaatttcccacctattctctctgagggagccttcatctgcataaaaaggtctgctttgctagccaagcttcttcctttcctcttgcagaatctgtcttgctattaaacttgacttacccatcaaacctgggattttttggccatgccacatctgcattctttcctaccctggaatggtatataagtttttgtcttattgttgggtgggtcttcattctgaaggctcccatatatacatgttaaataaatttgtataacttttctcctattaatctgcttaacttccttgatctgaaatttttttcctgttttttcaccttgttttataaaaaaagcacaaaagtaaaacatgcatacgtaaaaatgagcattttcatacctcataaatcaaggtattttccatatataaccagaaaatgctgttcatatttaataattccttaacatcaacacagagtaatattaaaaccttattaattgtgtaaagtggaattctgaaagcttacctttgaatacatttcattttctctgttacacattgaagaaagtgtgatgttatggtatgtatttgttttcatccagggtaatgttgggtgtgttaggcctctggggaaggcccctgacctgctgccctctttccactcaatgtttccccaccttttttattgtgggtcttaaaaccctcccatgagagggtcccactgactttgtgaagagttttagtcttggaaatactcatgatattccctatctgtagctgtttgtctcaagttagttcagaataaaccacgagtgtgtggattgctaaaataacttatttctaaatgctgcaagtcaaaaattgcagatttccttgtctaaccagatgcagaaaagcatatgttataaaggatcaggactccaacaggaaccaacatcactgccttctaaaattagtggccttcctggcatatgaacaccctttgggcctgtgctccagtgtctctttgggttgctccttgggctctttgtgaaggatcaagacacccccgtagtctaggccaatgtcaggctctccagtgtgtcctgttcatcaccctcaccctgcacttctattgttactgtctttggctattccaacactgtgcttgcatcctgtggaaagtcacatttggggtcaagtggatggtggtgtttctactctttggtgaaaagtatcagggtgcatttggccttcaaggcagaaggatgagacaggggttagatccaggtgcacccaactcttttttaattttttttgtgtgtgtgtgatggagtctcgctctgttgatcaggctagagagtgcagtggcgtgatctcagttcagtgtaacatctgcctcccaggctcaagtgattctcctgtctcagcctcctgagtagctgcgattacaggcacacaccacgatgcccagctaatttttgtatttttagtagagatgg

SEQ ID NO: 20799 - DNA, 2300 bp, Homo sapien
tcctcagtaggccaagcctcttatgtggcggaatgatccagtcgatgaggaaatatcaccacctgttatgttttacaattagaccatccaagggggtcagggtttccccaggtagtttggtgagagagagagagagtgtgtgtgtgtgtgtgtgtgtgtgtgtgttttgagacagtgtcttgctgaagtgcagtagcctgatcatagctcacagcagcctcaaactttgaggctcaagtgatcctcctgcctcagcctcctgactagctgagactataggtacacaccacctctccaggctaattctaaacaaagatgtatggagttgggagggtctcacttcactgctcagggtgatctccaacttctgtcttcaagtgctcctcccactttggcctcccaaaatgttgggattacaggcgtgagccatggtatccggcctcccaggctgttgttgaaaggtttttgcaatctctcagagttatgcagcagtttattccctcacagtgatactctcatcctttgaccccattttgcagcagtggttgagcgttcacttttctttccataagggggtgagcttgccggtgactctcttccccctcctcatcaatgacttctttgtcatcagagccttcctcttcataaattcccacggaatccaagttttcacgtcccaatcgggcttagttatgatagccacaggcccacaccagctgccacagcacccccgtcccatggaaaccgcccgactctcttctccccaagcgtcctgtcccgggagcccccatctctgctctcccgggctccgggccctagatccgcgctgctgtagagcccagttcccagagtagctccctccacctgtccacatccagctccagctctccaccctctctccaggcctggagttgctgcagtgtcactgatcaggggaccctcagctgccacctccaccgcgatctgaaagtcttttaaatgcacttaagttatcttagaattttcctcgcccattttatacataaacataggaggagagcaggggtttgagggtgtttgtctcatggaactgatcagtcgggtgagaagtagctgaataacctgcagggggcagcagagccccaggccagtgactccacgccgaggccagtgtggatcctgcaaaggaagagaaagagagattccctggggtcttcccgggcagcccgccctcccctacaagtggcctccagccgctcagagcagctccagaaggagtgtggattccgagaagctgcagagccctggaaagcagaagagacgtgcagacgcctttgtggggttctgtcctttctggtgttgtacctctggagcctggggctgtcttctgggcagggtttggggtttgacacgcatggggtcgctggaggcagagttgtttgtatatataaagagaatgtgtgaatatcaggctagagacagaattgtttgggggcgacacctggataaagggttcatgaagttgacagtttatttaggtcagaaggttaaattaaccccaggtgagagtttcctgctggtgaaaatgaagatctggaagcagggagcattttcacactgtgaggaggggatgggggtgtgtgagcaaggcttggccatgcctcattcccaattccggcccgctcaaggacatgtgcctctcctgatgcagtcgtgcctggcctggtctcggttcccctgctgctctgaggccagcagatggctcctatggacactgagtctgaaattccctgcacactcctgtgaccccgtgcagaacgaaggagcggggaaaatcccttgagtgaggaagacgctagtgttctcttatatctgtagcaagtctggctgaaatgcaaatatccaataatcagagtacaggaagcacctcgcccttagagaagctgtggctagaatccgtcaagtcagtctggctctgccgggcctgatacccaaggcttccgctgtcactcagaagtgaggggcggggcctagcattccatccaatcagaggtgccggggcagggccctgcccattgtttatccaggcacagagtgggtcgcattcctgtcctcacctttgtccttgcgcagccggtggttgatatccgctgtatccatccccgagagggacctggtacctctacccaggtttctatcgctctgtctcctgcgctgtgcccttctgtagtcacaggagctgtagagaggaccccaggacatctgaaagccaggaaatggtgcgtgtgcatagccggttgtcccgagacggggtagaggct

SEQ ID NO: 20800 - DNA, 2300 bp, Homo sapien
gagtttcctgctgaggaaaatgaagatctggaaggagagagcatttctacactgtgagggggcgcggagtgggggtgaggggagcgaagatgaggatgctttggctttgcctcatctgcatttctggctctctggaggacatctgcttctccctcctggtgtggtcattcttggcctggtctgggttcccttcctgctctgaggcaaagggggtggctttgtgggggcaataggcccttggtgtctgtcctaaaggtttgctgaaaactcattgacatgaggcagttggagtaactctgaaaaggcatacaaatttatttagtgtatacacacaagagccttcagaatgaagactccccagcaataacacagaaaagcttatataccatcctgaggacagcaaagaatgcagactcattatggtccaaaaatcacatgttatgttggcaaatcggatgtagtggcaagacatcttctgagagagggaaagaaaggggcttggctagcaaagatggactgttatataaatgaagcctctcacagagagaagagaaatgcttcttttccaactttttaacatttttctttttatttggatacttaaataatgaaggtgggagtctccctgtgttgaccaggccttcaactccttgctttaaggcagggatgtccaatcttttgccttccctgggccacactgaaagaagaattgtcttgggccacacataaaacaaagctgatgagctaaaaaaaaaaaaagaaaaaagaaaaaagaaaagaaagaaaaaaaatcgcaaaaaaactgtattttttttttttagccagagtctcactctgtcgcccacactggagtgtagtggtgtaatcttggctcactgcaacctccaccttcgggttcaagcgattctcctgcctcagcctcctgagtacctgggactacagacgcctgccaccacacctggctaatttttgtatttttagtagagatggggtttcacatattggccaggctggtcttgaactcctgaccttgtaatctgcctgcctcggcctcccaaagtgctgggattacaggcgtgagccacagtgcacggcagaaaatcgcaaaaaaaatttttaaatattttaagaaagtttactaatttgtgttgggctgtattcaaagccgtccttagcccgcaggccataggttggacaagcttgctttaagggatcctccagcctcggcctccggaattgctgggataggaggcgtgagtcacggcttcctacctgtgttcaggttttaaagacgtcagaccccgaatctctactagttccagtgaagggaaataagcagggaggaggccatggctttgttaacggagattctccgcagatgcgcattttcctcccaaaggcacctttgcaagaccacactgttggccaagcggccacgatttcaaaatatgtcaaaggagtaaccgggcgcggtggctcacgcctgtaatcctagcactgtgggaggctggggcggatcgcttgagctcaagagttcgagaccagcctggctgaaaccccgtctctactaaaaatacaaaaattaacaggggtggtggagcacacctgtagtcccagctactagggaggctgagacagtaaaatcgcttaaacccaggaggtggagattgtcgtgagccaggatagcgccactgcactccagcttgggtgacaaagtgagacccagtgtcaaaaaaaaaaaaaaaaaaaagtcaaatatattttggagtaaaaaaatttaatttccttcacctccgttggactcttgagtctggaattccctacacacatttgtgaccctgtgcaggacgaaggaccccattgagtgaaaaagacaacagtgtcccttatagcagttaggagcaagtttggctcaaatgccagtatccgaagagcagggagctgaaagtgagcccatttagggaacctgcggctggaatagcagcgaccggctctgcagcgccctgttacccggggcttctgctgtcactcagggctgagggggcggggtaggatgccctatccaatcggggtgctggggcggggccctgccaactgtttaatccgccggaaggagggcgcagcattgccggtcttctcattgcctggctgctagaggaaacccgaagtcgggattctttctttcctgctctgagagggaccaggtccctcctccgtagcttttgtctctctattgcctgcgccgtgtcctggactgctcacgggagttctgcaggagacgccggaatatctggaagctg

SEQ ID NO: 20801 - DNA, 2300 bp, Homo sapien
gttttcatctttgtacagtcttccataagggaagtaattgcttagccacatttggaggaggaaaaagtggcagtggaagtagtaacgtgcctggcaggacttcactgcagagaagaagcagagtgggaacttctttagatcacatatcattgctatactcagtctccatggctcaggaaatagtgctttcaggtaaattagtaaggagtgccacttccacctgatggagcagttagtaaatcctcaaccaattatcctgttccagtgatttagttgctgtataagagttccaacataaatgttgccaggagctaaaagtatgactctacatctgaaaacccttttgcaagaattataacagtgagaaaattatgacagtgaaagagatcagatctaagcgaactccatcttttctttagcctccaagctacccttgttcattcccgggtataggtcttactaatattggaaggagtttagtttagctttaaagcaaaagtcataactgccgcttccgtaaagaaattgtctccttgcttgggaaccagattgcctttgtaaaactaagaaattagccacaagattagaaattatggttcaggaaatatgcggccagagtacacaagattcccaaccttctcacttgctcctgtggataatattattgttgtaagacctaagattggtgtttgaggtatttttgagacccttcattctgataaatttgctggcatcacacagaccaataaactggctcacctgctccagtggcccctagccaagaactgactcagtgcaagaagacagctgagacttcctgtgatatccttttcgcgaccaatcagcattccccattttccagccttctgctcaccaaattatctttaaaaccctagcctcggccgggtgcgggggctcaggcctgtaatcccagcactttgggaggccgaggcgggtggatcatgaggtcaggagtttgagaccagcctgaccaacatggtaaaccccgtctctactaaaaatacaaaaattagccgggcatggtggcgcatgcctgtaatcccagctactcaggaggttgaggcaggagaatcgcttgaacccgggaggcggaggttgcactgagccgagattgcgccactgcactccagcatgggcgacagagagattccgtctcaaaaaaaaaccaaaaaaacaaaacctagcctcccattttttagggagacagaattgaataaaaataaaactcttctctttcatttagccggctctatgtatattaaactccactgcaattccctgtcttttttttttttttttttttcggagacagggtctcactctgacatccaggctggtaaaatcacagctcactgtggcctcgacctctctgggctcaggcgatcctctcatttcagccttccgagtagctgggactgcaaacatgtaccaccacgcccgactaatttttgtattttttgtagaggcggggttttgctatgttacccaggctgggcttaagttcctaggctcaagcaatctgcctgccttggcttcccaaagtggtggggttacaggcatgagctacccccacccccccagcccaccgccggacgagctaaagtttctattcaacagtactctatggcaggggtccccaacccccggtccatggcctgtaaggaaccagtccgcacagcaggaggtgagcggctggcgggcgagccagcgggcattatcgccagagatatgcttcctgtcagatcagcagaggcattagtctgtcataggagcccgaaccctattgtgagctgcacatgcgagggatctaggttgggttcgccttatgaggataaaatgcctgatctgaggtggaagtttcattccgaaactatctgcccccgtaggagaactgtcttccacgaaaccggttctggtgctaaaaaggttacagacctctggcttaaagaatctatcgctggatccggtcaaacccgttttcagagccccgttaccaagggcttctattgtcactcacggctgagggggcggggcccggcgcttcgtccaatcaggggcgctgggcggggcctgccgagtgtccatcggggagggcgaaggccctgctctcctcggttcccggctccaggcggcgagctgaggttgggagcctggctttcccctccgagagggttcaggtgcctctgccatagcttctgtcgcctgtgctgtgacccgcactggtcgtgggagtcacctgaaaggcaagaaatggtgagcgtgcgggccaggggtcccga

SEQ ID NO: 20802 - DNA, 2300 bp, Homo sapien
ccgccttggcctcccaaagtgctgggattacaggcgtgagccaccgtgcctggccataggtatcactttctttacggcccagaacaaatagccctcctaaacaaataatgtacataactcacaaatttcttgcttaccatcaaaaaccttgatttatcaaacatttcaggtgacaaaacaatgcaagttcccaagttgcattctataaaatctctagcaaacctttgtttctttgcagccggctcccttctgctggttctgcctgttgccttcttgcaaggtactttcatattttccttaataaatctgcctttttttttttttttttttttttttttacctacaactgtcttggtaaatccctttttttttttttttttttttttgagatggagtcttgctctgttgcccaggctggagtgcagtggcacaatctcgactcactgcagcctttgcctcccgattctccagcgattctcctgcctcagcctcctgggtagttgggattacaggcgcccaccaccaagcccggctaatttttgtatttttagtagagatggggtttcgccacattggccaggctggtttcaaactcctgacctcaggtgatccgcccgcctcggtctcccaaagtgctgggattacaggtgtgagccacatcgcccggccagtcttgataaattcttttacccttgcgccactggcccagatagtagccactcacccacaacatagatgaagactcccacagagagaatggatgcaaaatgcttcttttaagaatttctggccgggcacggttgctcacgcctgtaatcccagcactttgggaggccgagacgggcggatcacgaggtcaggagatcgagaccatcgtggctaacacggtgaaaccccgtctctactaaaagcacaaaaaattagccaggcatggtggcaggcgcctgtggtcccagctactcgggaggctgagacaggagaatggcgtgaacccgggaggcggagcttgcggtgagccgagatcgcgtcactcactccagcctgggcaacagagcaagacaccatctcaaaaaaaaaaaaaaaaaaaagcaaaaccagaatttcttacttattttgttttttggtctcactctgttgcccaggctggagtgtactggtgcaatcacagctcactgcagccctcgactcctgggccaaagtgattctcctgccctggcctcctaaagtgctggtattacaggccccagccaccttgcctggcctctttccagactttttttgtttttgttttttttgagacggagtttcattcttgttgcccaggctggagtccagtggcatgatctcggctcactgcaacctccgcctcccagcttcaagtgattctcctgcctcagcctcccacatagctaggattacaggcgtccgccaccacgactggctaatattttgtattttagtagagatgtggtttcaccatgttggccaggctggtctcgaactcccgaccacaggtgatatacccgcctcggcctcccaaagtgctgaaattacaggcgtgagccgccgcgcccggctttccagacttttaaaagtgtcagactctcaatttctcccggatcagggaaagggaaaaggggagagggggcatggcttcactaatggaaatactccatagacgcaaatttcaccccccagaagacagttgtgcaagggcaaagctgcagccattcgaaattgccaaataaatatattttggaataaaatattttaattgctttcacctctattaaacatagagtctggaactccctgcacacacttatgacactgtgcaggacgaagaagcagggacagaccattgacagagccacttctagtaattaagacgagcaagtttggccgaaatgcaaattttcaaagagcagggcgtagagagggaacttgaccttggactgtggcttgaagcggtcagtcctgctctgcttggccctgttacccaggacttctgctgtcactcaggatgcagggggcggggcctggcgctccacccaatcagagtcgccggggtggggcccggccaactgtttatccgcgggtcacattgccgttcgcctcagtctttggcccctcccgccgggtgaggttggcaccccgtttttcctgctctgagagggaccggttgccaccgccatacttctgtcgccctgtcgtctgtgttgtgactgctttggacgtgggagtcacctgaaagccaggaaatggtgagtgtgagcccccgctgggagtcccgagacttg

SEQ ID NO: 20803 - DNA, 2300 bp, Homo sapien
ttgtttgtttgtttgtttatagagacagggtctcactcttttgcccaggctggtcttgctctggtcaggctgtctccaactcccagcttcaagcgatccgctccccttggcctcccaaacttctgggattacagatgtgagccatggcaactggccttccaggtatttattgaaaggttttgcaacctctgattgttctgcagcagtatattacctgacaatgagagtcccctgcatcctttcaccccatgttgcagaagttgctgcgctttccccttttgtttgcatagtgggacaagcatgtcaatgatcctcatcctcctcttcatcaatgacttctttgtcatcagtcttcctcttcataaattgccaaggaatccaagttctcacatctcaatcgggcttacttatgatagtagcagctgtcataagtctgcatcagctcccacagctccaggctccatcaagcctgactcctttttcttccccacagtcatttcccagaagcccccagctctgcttgccaggtgccttaggctgtacagctgcactgctgctgagtccaggcagctatctgtccctgcagccccttccccaacccattcccagcccagccccactccaccactggtatctctagtgtccctgactgctagtgcctcagccaccgccgccactgcgatttggaagtcttttaatgcagttaaattatcttagttttttctctcccagtttatatgtacatacagaaggaaagcagggattctgctagtgtcttattcacacagtgagattgtagatgttggtctggtggacgtgatcagtgggggagagaagtaggtgaataacctgcagggggcagcagagcccaagaccagcctggagcctgcaaagggaaggaaaatgagctcccttgggtgtttctgagcagctccaggagtggattctgagaagctgcagagccctggaacacaggagacccaagtgcagatgcatttggggtggcggacagggggcatgcagagggggaggtgttctgtcatgtctgaggttggacctcaggagcctggggccatttggagggcagtgtttttggttttggcatgcatagggtcactgggttcaggcggtaatttgtatatatgaagaaaatctgtgaaggtcagtgtgcgagaattgtttggaacatcacctggtgaaagggtttacgaagttgacagtttatttaggttagaagcttaaactgactccaagggatagtctcctgctgttgaaaatgaagttctggaaggagggagtgttcccatactgtgaggagagatggtagatgtgtgaggaagctttgtccatgcctcatcccctactcctgtccccctggaggacatctgtctctctttcctggtctagtcgtgcctggcctggtctcggttcccctcctgctctgaggcaaacagatcgccccagcagacactgagtctggaatttcctgcatacacttgtgacctgatgcaggaggaaggagcagagaaagcccattgagtgaaggagaggtcagtgccctttctaaagttcaggaaagaggccaggcgcggcggctcacgtaatcccagcactttgggaggccgaggcgggcggatcacctgaggtcaggagttcgagaccagcctgactaacatggtgaaaccctgtctctactaaaaataacaaaaattagctgggcgtggtggcaggtgcctgtaatcccagctactcaggaggctgaggcaggaaaatcgcttgaacccgggagacagaggttgcagtgggccgagatcgcgccattgcaccttcagcctgggcgacaagagcgaaactccgtctcaattagttaatcaatcaaccaatcaatcatatatatatatgaagttcaagaaagtttggcggaaatgcagatatccaaggatcagggcacagggagggaggtgggccttaaagaggaagtgaatagaaccagtctggctctgcagggccccgttatcccgggcttctgctgtcactcagggctctgaaggcgaggcggggagcacggtccaatcaggagcgccggggcggggccctgccaacttttttcggggaaggagacggctgcaagcccgcggtctcttgttgctgtgctaacgaccgttggaaccctctttctggctcttggaacgctcggctctgagaggctccaggtttctccgccagagctcctgtcgctctgtcagttgcgctgtgttcctctctagtcacaagagccttggggaagacagttggaagct

SEQ ID NO: 20804 - DNA, 2300 bp, Homo sapien
ggccgggcgcggtggaccatgcttgtaatcccagcactttgggaggccgaggcttgcggatcacgaagtcaggagatcgagaccatccaggctaacacagtgaaaccccgtctctactaaaaatacaaaaaattagccgggcatggtggcatgcgcctgtagtccccgctactcaggaggctgaagcaggagaatcgcatgaccccaggagacgaaggttgcagtgagccgagatcacgccactgcactccaacctaggggacagagcgagattccatctcaaaaaaaaaaaaaaatttaaagagtttgagcaaacagcgattcatgagtgagaaacgcccagtcatgatttgtggttttggtaccagaaagttttaagaagaattgcattttgttaacggtggagggggtccaggttcttggcgtcttgaacaaagaattggacaaaacgcacaaagcaaggaaggaatgaagggatttaacactccacagtgtgcaagcggggctgagcacaggggctcaaaggccccgttacagaatttttgggagtttaaataccccctggaggattccattggttacttggggtatactctatgtaaaaggagaggatgaagtaaggttataaaatcatttacttggcttacgccctatggagtaggtatttcctttcatagctgaagtttgaataggccttatgttccctgcgtccagaccctattttcctgcctcaatttgagtttgattttggtgtccttaggtagtttcttatagcactaaacacacttcagtctaattgctgctgctttaaattttttcacactgtctatagggactggcttcctcctgcattttcctaatgtatgggtctcaaatcctccaccctgctaccccgccctaactcttcagcagtttgcagtaacatcttaaattttcaattacttttccgcatctccaaacattaactccccttctccaactcacagtattatcaactttcttttttttttgagacggagtttcgctcttgttgcccaggctggaatgcaatggcatgatcttggctcattgcaacctctgcctcccgggttcaagtgattctcctgcctcagcctcctgtatcaactttctttattgtagagtatatttcttcatcctttctttcacatagatgcagtattttagtggtttatcatcttttcacaaggtcatggataactttttttaaaatatttgtgttctgtttctgaacatttcacatagaatagagaataaccacttgatactccagtgaaaaacctctgttcctctcctcttatcttcgtaaggcacagacaccatctcagaatgtctttgggttgtttccttttttttttttttttttgagagaaagtctctctttgtaacccaggctgaattgaagtggcgtggtcttggctcactgcaacctccgcctcccaggttcaggtgattctcctgccctcagtctcccgagtagctgggtttacaggtatgcgccaccataccccatgtattttaagtagagatggggtttcaccatgttggtcaggctggtctcgaactcctgagctcaaatgatctgcctgcctcagcctcccaaagtgctggaattttacaggcgtgagccaccgtgcctggcctgtttcctttttgaaaactttacagggtgatgtgtcttcaggagtcccaatctatcttttcctggtcctgggtttcagaaccgcctggggctgaaccaaaatgcccacagctcccatctctcctggcctactgaatatcagcccctgtgtcagtcctcccagaggatagcctgaggcagggtgtgggatctcccaaaggagcaactgaatttcccaaatgggaggagactcctggtacactcttcatctagatagccaaccccttgggatgctcagtttttctcccccagtcccagcttccattatttggagacacatagctggtcagccagttggatgttgctattaagggaaaggtgtaggtgaagtgagccacagcagagtcatctcaacaaagccataaagccatgacataacagtgcattatcacatcccagacagatgagggcagcacaccttgcagggcaacacagagtggggggaacatccaggatgcacattcaaccagcaggtggggagaaagacagacagggacttttgggccagagtttttcttggggtccagggcaatgcccaaggaggtttctcttagggagttgtttctgatagatttggagcaagcaggtgctagttctgtga

SEQ ID NO: 20805 - DNA, 2300 bp, Homo sapien
gatgcacggaagaaaaagataccccagaagaaacataaacttaagagacaaacaaattcagccaaaagaaaatgcaaataaaagttcaaaacaaaacaaaacaaaaaaacctctaaaattcataaaacacaaaatgacaaactctattaaatatgcccctatgatatctcttagataaaagttggccgtaatagagaaaatgaagataggtgttggtgactggcagattctgggtctacgatgaatcagagaaggatggttttcactttgttttacatttttttaatgcttgatgttgacttggtagaaagatgataataaagagattcttctgtctatgtgtttcttttagattactcatgtggactgaagaaaaaaaattaaatttgttaaagaaagtgagtttgatttaggattgtgactgaggacaatagcctggaagcagttctgacagatggctgctatgtaatattttggttcacagtttataagagacatgtgggccctgtgctctatcttgttttttcttcaaagcataattctggagagctggagagtcccagagtcaggaatgttataaagtcaggctggaaaccagaaataagtaacatgactaaacatttgtgtgtttttttgttttgttttgagacagagtctcgctctattgcccaggctgtagtgcagtggtgcaatctcggctctctgcaacctcagcctctttgatacaaacgattcttctgcctcagtctcccgagtagctgggattacaggtgggctctaccacacccggctaatttttgtatttttagtagagacgggatttcaccatgttggtcacgctggtctccaactcctgatctcaggtgatccagccacctcgccctcccaaagtgctgggattacaggcttgagccacagcgcccagccactactgcctcactttcatgcagttaaataatcttggacacttcctcctcgactttatacatacacactggaggagagctttgctcgtgtgttattctcgcagtgggattgaggatgtttgtctcatggaaactgatgaatgatgtgagaagcaggtgaataacctgcagggggcagcagagaccgacgccagggacgggacgctgaggctagtatggatcctgccaaggagtgaagtggagttctgggtgcttcctgggcagccgccctcccctgcaggtggcttgcagctgctcagagcagatccagaaagagtgtgggttctgacatgctgcagcgccctggaaagcaggagacccacgtgcaggtgcacttcaggagttctgtcctttctgcggctgtacatctggaatctggggcggttttcgggagcagtgttttgggtttgacatgcatagagtccctggggtcagactgtaatttgcatatctgaagaaaatccgtaaagatcaagttcagggaaataactgtttgggacctctcctggagaaggggcttatgcagttgacagtttatttaggtcagaagcttaaaatcaccaagtgagagttttctgccgatgaagatgaaggtctggaaggagggagagtttccacactgtgaggtggggtgagatgtgtgaaagccttggccatgtctcatccctaattccgggcccctgaaggacaactgcctctccttcttggtgcagtcgtgcctggcctgatctgggctccccttcctgctctgaggtcagcacatcgctccattggacactcagtctggaattccctgcacacacttacaaccctgtgcaggacgaagaagcactgacagcccattgaatgaggaagaagatagtgccctgtgtaaaaatcaggagcaaatttggctgaaaagaaaatatccaatgaccagggctcagggaaggagttgtcccttagagagaagctgtggctagaaccgatcagtccggctttgcagggctcgttacccagggcttctgccgtcactcagttctgagggggcggggccttgtaccttgtccaatcagaagcgccggggcggagcccggccaacggtccgtccggaaggaggaggcccattccagcttctacttttgttgctatgcaggttgttgtcgggataccagatttcctactccgagaggccccgggtccctctgccacaacttctgtcgctctgccgcctgcaccgtgacccgcactattcacgggagccctagagaggacaccgggacacccagaagccgggaaatggtgagtgtatggggccggagtccccagacgggggaggggctgggtggaaccggc

SEQ ID NO: 20806 - DNA, 2300 bp, Homo sapien
gccaaggctttcacacatctcaccccacctcacagtgtggaaactctccctccttccagaccttcatcttcatcggcagaaaactctcacttggtgattttaagcttctgacctaaataaactgtcaactgcataagccccttctccaggagaggtcccaaacagttatttccctgaacttgatctttacggattttcttcagatatgcaaattacagtctgaccccagggactctatgcatgtcaaacccaaaacactgctcccgaaaaccgccccagattccagatgtacagccgcagaaaggacagaactcctgaagtgcacctgcacgtgggtctcctgctttccagggcgctgcagcatgtcagaacccacactctttctggatctgctctgagcagctgcaagccacctgcaggggagggcggctgcccaggaagcacccagaactccacttcactccttggcaggatccatactagcctcagcgtcccgtccctggcgtcggtctctgctgccccctgcaggttattcacctgcttctcacatcattcatcagtttccatgagacaaacatcctcaatcccactgcgagaataacacacgagcaaagctctcctccagtgtgtatgtataaagtcgaggaggaagtgtccaagattatttaactgcatgaaagtgaggcagtagtggctgggcgctgtggctcaagcctgtaatcccagcactttgggagggcgaggtggctggatcacctgagatcaggagttggagaccagcgtgaccaacatggtgaaatcccgtctctactaaaaatacaaaaattagccgggtgtggtagagcccacctgtaatcccagctactcgggagactgaggcagaagaatcgtttgtatcaaagaggctgaggttgcagagagccgagattgcaccactgcactacagcctgggcaatagagcgagactctgtctcaaaacaaaacaaaaaaacacacaaatgtttagtcatgttacttatttctggtttccagcctgactttataacattcctgactctgggactctccagctctccagaattatgctttgaagaaaaaacaagatagagcacagggcccacatgtctcttataaactgtgaaccaaaatattacatagcagccatctgtcagaactgcttccaggctattgtcctcagtcacaatcctaaatcaaactcactttctttaacaaatttaattttttttcttcagtccacatgagtaatctaaaagaaacacatagacagaagaatctctttattatcatctttctaccaagtcaacatcaagcattaaaaaaatgtaaaacaaagtgaaaaccatccttctctgattcatcgtagacccagaatctgccagtcaccaacacctatcttcattttctctattacggccaacttttatctaagagatatcataggggcatatttaatagagtttgtcattttgtgttttatgaattttagaggtttttttgttttgttttgttttgaacttttatttgcattttcttttggctgaatttgtttgtctcttaagtttatgtttcttctggggtatctttttcttccgtgcatcctccttttctgcttttggaacaaggtgtttcttttcactaagcatcatctggatgtggcaggggagtttgtggatgggttcatctgcccatgagttctgtaagtcaggtggtacattatgggtgccttttccctggatgtgctcaataaccagggaatctacatctatacccttaagttcagcataactctgcacttgtaagcaaatttcagtaccttttcggggccactgatggtgagtccagccccaatgtctgtcttgcgtacagcgaccaactccactttctaagactgaaatggtacacataatttctgtaaaagaaaatatttcagatacttggtggcttttcatataggcatacctgtgatggcctgagcaccttcacagtttacagtgaacatgagggtttcatccttctaacatgcacgacttcgtgggattttctgggtcatagtgaataatgttcatagatcaactcaggccacacaagaggacaggttttctttggtctttaaaaggaactgattaaagaaaaaaaaaaaaaaaaggtggaagccaggcacagcagctggtacctgtagtgacagctacttggcaggctgaggtagaaggattgtgagcccaggaatatgaagctctcatgcactaagatcacacttgtgaatatcactgcactccagc

SEQ ID NO: 20807 - DNA, 2300 bp, Homo sapien
tgagtagctgggattacaggcgtgtgccaccacgcccggctaatttttgtatttttagtagagacggggtttcaccatgttggtcaggctggtctcgaactcctgacttcgtgatccgcccgcctcggcctcccaaagtgctgggattacaggcgtgagccaccgcgcccagccggcagcaatattttataaaggaatcaaaagaaaagtaaagcaaacatttgaagtagttcagataagcagcctgcttcatgcacagttcacaaggaaaaccctctgtcagaaggtaaatgatatttccaagcttggaagccaaactgtgactgctgaaatggagccccccagggcgggtcagtcccagatgatgaggcagagaaaattaaggatttatctgggagtttgaaatgcccttctgtcccctcctcagtttagaaattattctctcctttaagaccttcattttcaccaacaggaagctctcgacttgagtcagtttaagctaaatttactgttaaattcataaacccgcagggcgcggtggctcacgcctgtaatcccagcactttgggaagccgaggcggacggatcacgaggtcaggagatcgagacaatcctggctaacacggtgaaaccccgtctctactaaaaatacaaaaaattagccgggcgtggtggcaggcgcctgtagtcccagctacttgggaggttgaggcaggagaatggcatgaacccgggcgggaggcggagcttgcagtgagccgagattgcgccactgcactccagcccggacgacagagcgagactccgtctcaaaaaaaatgataataaatacaataaaataaaataataaataaaaattcataaaccctttctccaggaggcatcccaaatgggtcttgctctaattctgaccttcacagattttctttttctttttctttcttttttttttttgagacagtctagccctgtcgcccaggctggagtgcagtggcgcaatctcggctcactgcaagctccgcctcccgggttcacgccattctcctgcctcagcctcccgagtagctgggactataggcgcccgccaccgcacccgactaattttttgtatttttagtagagacggggcttctccgtgttagccaggatggtcttgatttcctgacctcgtgatccgcccgcgtcggcctcccaaagtgctgggattataggcgtgagccaccgctcccggccgtaaagatttttaaataataaaaacaggggtctagggtggggggatgtgggagggataacattaggagatatacctaatgtaaatgacgagttaatgggtacagcacaccaacatggcgcatgtatacatatgtaacaaacctgcacattgtgcgcatgtaccctagaacttaaagtttaataaataaaaattaaaaaaaaaaaacaacaaaacaggggtattcttgtgttgaccaagttggtctttaactctttactttaagggatcctccagtcttggcctcccaaagtgctaggattacaggcgtgaaccaccgcaccctgcctgtgttcaggtcacaatctcttctagcttggataaagggaaagaaataaagggggagagggcatggtttcatcaatggagattctctgcagatgcaaattccccccctccaaagacagctttgccagtccacttttttttgcggccgagccacagccatttcaaaatctgtcaaataaatatattttggcgtaaaatattttaatttccttcacctccactggactctgagtctggaatttcctgtgcaagacaaaggagcagggacagcccattgagtgaggaagacaacggtaccccctctagcaattcggagcaaatttggctgaaatgcaaatacccaaagagcaagacgcagggagggagctcgcttagataatctgtggttggaacaggtcatttcggttctgccgggccttgttacccagggcttccgctgtcactcaggaccgatgggacggggactggagcctcatccaatcaggggcgctggggcggggtcctgccaactgtccatccggggaaggggaggccgcattcccgctttcctgactcccaggcgtcttgcaccaaagggaggtcgggatctcggttttccggccccgagagggaccaggtgcctccgccatagcttctgtcgctccatcgcccgcactgtgactggactgttagagggatccgtggagaggaggccaggacacctggaagccgggaaatggtgagtgtgcggggccgggggtcc

SEQ ID NO: 20808 - DNA, 2300 bp, Homo sapien
ctcttctactttacggtaaacacaggaggaaagcagggactctgctggattctctttcgaacactgggattgagggtgtttgcctcgtggaactgaacaatgtgggtgaaaagcaggtggaaaacttgcagggggcagcatagcctgaggccggtgatccacactgagactaatctggagcctgcaaagggagggaaagggagctcccccgattgcttcctgggcagcctgccttcccctgtaggtagtctccagctgctccgaacagctccagctccagctccaggagtgtggattctgagaagctgcagagccctggaaagcaggaacttcacaggcaaatgcacgtgcgggtttctctcctttctgaggttgtacctctagtttcccaaggtagttttccggaaaactttttgttttttgagacggagtcttgctctgtcacccaggctggagtgcagtggcgcgatctcggctcactggaacctctacctcccgggttcaagcgattcttgtgcctcagcctccccagaagctgggattataggcgcccggctaatttttgtaattttagtagagacggggtttcgccatcttggccaggctggttttgaactcctgacctcaagtgatccgcccgcctcggcctctcaaagtgttggggattacaggcatgaaccactgtgcccggccttgatttttctatgtatagagttgctgcagtcaggctgtaatttgtatatatgaagaaaatatgtaaagatcatatttagagactcatttaggtagcgttccagagaaatggtttatgagctagagaggttggaatttcaaggggcctaaattgaccacaggtgagagttttctgctggtgtaaattattaaggtattgaaggagggagcgttcccacattgtgatgctgtgacaggagggcatgttgagctcccagagttaaatccttaggtttcctgcctcatcatcagggtctaatgtactctgtggctccacttcagcagtcactgactcttaagcttgggaatatgttctaccttctgaattcatcttttcctttttaaatgttctgaagtgccctgcttatctgagctagttcaaattttcgctttacttcccttttgatttctttacagattacggaaatagaacttgtttttccatgtatttaataattttattcacttgttggcagttttttattttcttgggtgaaaatgagtagattgatttgggaggcgaaagtgggaggttcacttgaggctaggagttcaagaccagcctggacaacaaacgaaatcccgtctctacaaaaaattaaagaatttgccgggcttggtggcatgtacctgtagtctctactactcaggggactgaagcggaaggttcgcttgaacccaggagatggaggctgcagtgagctatgatcatgccattgcactctaacctgggtggcagagctagaccctgtctcaaataaataaataaagtaataaataagtaaataaagtaataaataagtaaataaagtaaaaaatagagagagataaagaggtatggtatgagaaagccttgggcacgcttcccatatcctcatcccaaatttccgatccctgggaatatcacgccctttcttctgttccagtcctgcctggaactccctgcgcacacctgtgactcctcatgcaagaggtagatgaagaaatgacccactgagtacaggaagtatctcctttggtaaacccggattaagttctgctaaaatgcaagtatctcccatctccccatcccccgcagaccaagtacagtgaaggggacgaggggaagaagtccaccctgcgtttgagggctggggccaagacccctcattcccgcttcactcatctatgcttcacatctcctgtcattcacatctgtcaagatgcagggggcagagcccgaagctgtacccaatcaggggcaccggggaggagctctgcgatcggtccaatcaggcgcgccgtcggggacgcagctgcagacgttcaaccttctcgcgggattttcatttctcgcgtctgccgtacttggtttcgcttcgctagtcccagaggcccagagtggctcgcctggagtctctgtggcgcggtttcctgtacctgccttgggatccggagggaggaagctgggacacccgggagtcaggaaatggtgagtgtgtcgggccctgcgtcccgagacagggaggaggggctggttggacgaccggaactggctgtggcgcggcccgggccttcccgtgggcgac

SEQ ID NO: 20809 - DNA, 2300 bp, Homo sapien
ctcacctcttgggacactcagcttgtttttctctagccccagttttcattctttggagacatgttagtggtcagctaattggatggcagtattgaggggaaagacagaaaatgattcttgccctctggattctctcagagtacttgaagggagaaaaatgatcccaaaagacaaggaaaacccacctctgccaggttatgcaagaacttgaaaagcaaaatgcacttaggcatgggggtgggggcacagtccactgtctctgggaagggtcggtgagcagcactttagtgacaggatgggggttggggggatgtcccatgtgataggatgacctgactgggcagttaagtcagatttctctgtgttccaggttagagtggccttccctgattttgtcaccttaagaagatttgtttacttacttcatcatgtaaaatgtattttaccattaaagcttgaaagataggctaaaatatttccaaagagatgagaggtgtatctcagaaaaataaatatctacccttatatttgttaaaaatttgtatttaatttttccccccagaacatatatgcagtaagtttctcaggtctgttcttttttgtgattttgttgttgttgttgttgttttgtttttttttggtttgtttgtttgagacacagtctggctccaggctggagttcagtggcacaatcacgtctcactgcaacctccacctccccggttcaagcaatcctcccacctcagcctcctgagcagctagaaccataggtgcaggctacacgactggctaattttttgtagagatagggtttcaccatgttgcccaggctggtctcaatctcctgagctcaagtgatcctcctaccttggcctcccgaagtgctgggattttaggcgtgagccaccactcccagctccttttttgtgatttcaaatagaatcctagagtgtagccttgagaaggctacagggagaaaaagctcagagaaatagggagaatcactcttcattatggcttcacataactgaatctatctatctatctatctatctatctatctatctatctatctatctatctatctatgtttatcttgagacagggtcttcctcttttgcccaggttggagtgcattggcacccatcatagcttgctgcattctcatactcctggtctcaagcagtcctctcacctcagcctcctgagtagctgggactacaggcgtgcaccaccactgctggctaatttttaaatttttctgtagagatggaggttctcactgtgttgcctaaactgatgttgaattcctgggctcaaacaatccttctgcctcaacctcccaatgtgatggaattacaggtgtgagccagttcacccggccactgatacattttgatgagaaagtaggtagataaattggtgaattcaccaatttattttcaccaatttagtgaagattcatcaagctgggtgtggtggctcacgcctgtaatcccagcacttcgggaggccaaggctggcagatacttgcggtcaggagtttgggtccagcctggccaacatggtgaaaccccatctctattaaacatacaaaaattagctgggtgtggtggcacgtgcctgtactcccacctcctcgggaggttgaggcgggataatcccttgagcctgggaggcagaggttgcagtgacccaagaccctgccactgcactccagcctgggcgacagagcaagactccatccaaaaaaaaaaagagggctgggtgtggtggctcacgcctgtaatcccagcactttgggaggccgaggtgggcagatcacgaggtcaggagattgagaccatcctggctaacatggtgaaaccctgtctgtactaaaaaatacaaaaaattagtcaggcgtggtggcaggtgcctgtagtcccagctactcaggaggctgaggcaggagaatggcatgaacccgggaagcggagcttgcagtgagccgagatcacgccgctccagcctgggcaacagagagccagactccgtctaaaaaaaaaaaaaaaaaggtaaaaaatccttcattagtctcatttagtacttaattatatttgatctgcaggataggtacaagcttgcaagtattctctcttagtataataacagaagatgggcttaattttcccagtaaccaattgtgagaacacatgcgaaatgcttcctggagtgtttctgggggctcatcaggtgggcactatgtgttgcgcgtgtaacaaattcccaaactctcagaaggtgggacgccagaaatt

SEQ ID NO: 20810 - DNA, 2300 bp, Homo sapien
cttcaaacccactaggatgggtagaatgaaaaagtgagataataacacatgtcaaggatatggagaacttggaaccctcatacactgctggtgagaatggaaaatagagcagccgctttgcttttttgtttgttttttaaatttttcttttttaagagatggggttttgctctgtagcccaggctgtcaaggctcactgcactctcaaacttctggattcaagaaatcctcccatctcagcctcctgagtagctgagaacacaggtgtgcaccaccatgcccaattaatttttctttttcttttagagatggggttttgctcttttgtcagggctggtcatgaacttttgggctcaagctatcctcctgccttggccttccaaaatgctgggattacaggcatgagccaccgtgccctgccaggagtttcttttttgaggtaatgaaaatgttctaggcctggcgcggtggctcatgcctgtaatcctagcactttgggaggctgaggcgggcggatcacgaggtcaggagatcgagaccatcctggctaacacggtgaaacccgtctctactaaaaaatacaaaaaattagctgggcgtggtggcaggccctgtagtcccagctactcgggaagctgaggcaggagagtggtgtgaacccgggaggcggagcttgcagtgagccgagatggcgccactgcactccagcctgggcgacagagcgagattccgtctcaaacaagaaaaaaagaaaatgttctaggccaggtgccgtggctcatgcctgtaatcccagcagtttgggagactgaggcaggtggatcacttgaggtcaggagttcaagaccagcctggccaacatggtgaaaccccgtctccactagaaatacaaaaatcagccaagcacagtggcgcgcgcctataatcccagctactctggaggctgaggcagaagaatcgcttgaacaccagaatcggaggctgtagtgacccgagatcgcgccattgcattctgcactccagcctgggcaacagagtgagactccatctcaaaaaaaaaaaaaaaagaaaatgttctataattgactgtggtgattatctgtttgcatctttgaatatactttactgaattgtacacttaaaagggatgcattgtgtagtgtgttttattctgatatagcttttcaaataaatatgacttcagatttttgattaatctgttaagcatactaagagtttccagatataccttaatttacatcactttttattgttcatttttgtatcagtgaaaatagggattcaattaccttaggtatatcatagtcgtttacatttcaaagttctctgcgaacacaatctgtaacctatttaaaataaattttcctgtagtgtgaaatgtacacttcagagtttaattgaacatatctcacagctgtggttagtctgataagcgtccttgcatccatgctagggatgtggggttcaaagagattgtgtgtaaaaggctctggaggccaagggattctttatttaaagtaaatgtgtggggattggggaaggaatgggtggaggtctcaatgccgttagccgtcaatgtcagaatggagctagactcattacacacggcgaagtcacttttaaagtgtctgtgtttgtgaacggagctcacagttccacgagtgccctctagactcaggccaagtccctggcccccggaggagtcagaccctcttgttccaatctggacttgcctgggtgaccctcttgctgtggatttgttccttaaagggtcactacatctggcaactgaggctggaattcgccgcgcacacttttgtccccgcgttcagaaacagctgcgacaggatgccagagtccatcgagaggctgggaacaagttcggcttctactcaactgcccctcgctgggactggtttccccccggactgaagcagggtttccccggcgacatgacctttcgcagctctgtcactccatgtgaagagggcggggcttcgtgaactgtccaatcagaggcgccacgtggaaggtgggtggggcaatgcggcataaaagaggtgggcgtcgtacgtcgttacgcagcgcggttgctgggcacctcgactatcacctgaccgtagtaatatctcccgctacgcgcgttgtgaccaatgctgcatacaggagatgagggaggacggccagacacctggaagccggaaaatggtgagtgtgcggggccggtgtcccgagacctgaggagggacaggttggaaccggccggaaccggctgtggc

SEQ ID NO: 20811 - DNA, 2300 bp, Homo sapien
ttcattgttgatgtgtttttattttctgggatgaaaatgaatagatcgcaaaaaaattatatcagtgagaaaattatggcagtggaagagatctgagccaacacccgttctgccccgccccgccccccgcccctgccaaccctctgtcttctctttcccttaatcctgggctcttaggcacagctaactttggaagatagcttaaatgataataagccttccccaaaactcaactgcctttgtaaaacgaatgaatggccatcaggctgagggatgaaaggaatcggaatgctgctaaagtgtagacatagattgccagctatttctgcagataacaccactattgtagattagcatttgtagacgtattttcagtttttgtttgtttgtttgttttttttttgcatgtctgacaccacctgcacctgccaactctgctcctgtggccccaaccagaagtgattcagcataacaggataggttttttttttttttgtcttttttttgtttttttttgagacggagtttcgctcttgttgcccaggctggagtgcaaaggcacgatctcggcttggcgcgatctcagctcaccgcaacctccacctcccgggttcaagtgattctcccgccttagcctcccaggtagctgggattacagacatgtgccaccacgcccagctaattttgtatttttagtagagacgagctttctccatgttggtcaggctggtctcaaactcccgacctcaggtgatccgcccgcctgggcctcccaaagttctgggattacaggtgtgagccaccgggcccggcctctttttttcttttttaaatatgtagcagtacaagccgcagacaagaacccctcagacaccgagttgtggaaggaaagggctttattcagctgggctgggagcatcggcggactcacgtctccaaaaaccgagctccccgagtgagcaattcttgtcccttttaagggcttacaactaggagtccgcgtgagagggtcgtgattgatggagcaaacagtgggtacgtgactgggggctgcatgcaccggtaaccagaactgaacagaacaggacagggattttcacagtgcttttccatacaatgtctggaatcatagataacacagttaggtcagaggttgatttttaactacccagcccagggcacaagccgggttatctgcctgtggatttcatttctgccttttagtttttacttcttctttggaggcagaaattgggcataagacaatatgaggggtggtctcctcccttatagtatagagacggagtttcactctatgtccaggctggtcttgaactactggcctcaagcgatcctcccacctaggcctcccaaagtattgggattacagcggtgagccaccacgcactgccaagaggacagattccatccccagtgatttcatccccaccccaaccagtcagtagcaagcctagctacctccaccctttctcccaaactgcccttgaaaaacccctaccagaggaccttggatgagaataatttgagtagtaactccgtctctcacgtatcgtagctggcctagtgtttattaaactttttttttaactgcaataccgtggtctttatttgcgtagcgcgcagaaagaacccatccagcgcttatagtggaagaaaggcttgaccttgcaggcgacagcctcatcccaaattcctggtccctggaggacatcagcaccacccccccacccacccaccccctgtcccccgctgctacagtgtggcctgtgtggcctcggctgccctcctgctctgaggccaagggatggctccactggacagtgagtctgggattccttgcacacaattgttcaggaggaagaagcaaaaagggcccactgcgtacaggtaggaaattccgctttaaggcaaacgtttcccgggacgggtcgggtcacaacgcagggaggaagcccgccctgccaggggccgggtctggaacctgttcatccggctgcactcagcactgtgagatcgcttcttctgtcactcagtgcccaggaggcgggacctggagggctacccaatcaaagtcgtgggcgggttcctgagaattgtcaatcaggcgcgaggcagagaggagggtgtgacgttccaggagctagtggcctcttcaccctggtgacctctgttccgtattctgtcactgagagacgccctgggacatctgtggtggcttttgtcgcgctgggacctaccctgactacgggagttgggaggacccgggacaccgcacagcc

SEQ ID NO: 20812 - DNA, 2300 bp, Homo sapien
gacagccgtgtagaaatgtgattagattgaaagagtatgatccaatgctaacagactgagtggggaaacccaacaaggcctgtgtgtctagattgttcttggcctttctgagcatgcattccttccttctcagtatgaggcaggacccactctgaaatggagggtcttatgacctacagcaagcttgtccaacccatggcccaggaaggctttggatgcagcccaacacaaattcatgatctttcttaaaacattaggaatttttgtttttgctatatatttttaagctcattagctattgttagtgttagtgtattttatatgtggcccaagacgattcatcttcttccaatgtggcccagggaagccccagggccaccctgacctgcagtcaaacaaagttggacagttaatttgcttatggccagtttttacacagaaaggacaatggaaagttagagtagtatgttttgattttatgcctggatttaggggaaaagggttctggattctacgacccactttggagaagagagattctagtttctaaggctagccttggatagaagagtaggactaagagtcccaagaatgggactaagtttttcctctgccctctgtggagaaaaaacttttgcttctgaggcttcttccaaggtcttctttttggggtattgttttctgagccccagccacctggagtgggcagcagagtttgaaccagtgactctacaccgagcccattctgaaggctgcaaagggagagaaatggagccccctttggtgcttcctcagcagcctgcgcacgcctccacgtagcacgaagctgcacatagaatcagaatttaccatttatgtgttaggaaaatctgggtaaagggtttatgaatttgacagtttatgtaggtcagtaccttaaagtaaccttttttttttttttttttttttttttgagaccaggtctcactctgtcacccaggctggaatgccgtggcacgatctcggctcactgcaacctccgcctcccaggttcaagtgattctcctgcctcagcctcccgagtagctgggattacaggtgcccgccaccatgcccagctaatttttgtatttttagtagagatgtggtttcaccatgttggccaggctggtctccaactggtgacctcaggtgattcacccgcctcggcctcccaaagtgctgggattgcaggcgtgagccaccgccccgggcccttaaactaactttacatgaaactttcctgttggtgaaaatgcacatcttgacggtgggggcatttccacactctgcagagggcacagggaagtatgttgagctcccagagtcaaatccttcagtgtcccagtctcatcaccaggttttggttcactctggggttccatttcaacagttaagagtggctgccaagtttgggcatatgtttagcctcctgaatgggacgtttgctgaagtatgagggcagcaggctgcttatctgcactagttcaagtttttgctttttttttcctgttgtatttttgttttgattcattcattcatttattgctgccgtgtgatttcagttcttccacacatttgatattttaataccgttcttgacttgtttttatttccttggctgaaaatgagcagattgagaggcaaggtgagagaggaaggcttaaccttgccgccaagagtctcatcctcaaatcctgatgcccggtggacatcaggccaccctcctgctgcagtgtggcctgtgtggccttgggctcccctctgctctgaggccaggggaatggctccactggactgtgagtctgggattccctgcaaaacacttgtgactccttctccaggaggaaaaggcagtaagggcctgctgagtacgggcaggtaattctgcataaatgcaaatgttccctgggagggatcaggacagcacagggaggaagcctgccctgtcaagggctgtgcctggaactcgttcatcccgctcgactcagcactgtgtgatcgcttcttctgtcactcagtgcccagggggcgggacctggagccctatccaatcagagctatggggcggggtcgtgagaactgtcaatcaggcgcacggctggcagtagggtgccaggttcaaagagcccgcggcgtcttcacgcccctgcgctcagctctagactcagtcgctcgctgagagacgccctggaacgtctgtgtagcctcagtcgctgagagacgccctggaacgtctgtggcagcctctgtcacagtgggacccgcactggcagcgggag

SEQ ID NO: 20813 - DNA, 2300 bp, Homo sapien
ttgtgccactgcactccagcctgggggacagagcgtgagactctgtctcaaaaaaatatatataataataataattgagaccctggggaaggaatgcattcctgggggtaggtctatagatggctgctctgcgagtatctgtcttaatgcagttgagataaggactgaaatacgccctggtctcctgcagtgccctcaggcttactaggattgggaagttccagcctggtaaattctagtcagactggttgtctgctctcgaaccctgtttcctgttaagatgtttatcaagacagtgcatgcacagcaggacacagaccctcatcagtaattctaattttgcctttgccttgtgatcttttattgccctttgaggcatgtgatctttgtgacttactccctgttcgtacaccccctcccctattagaatccctaataaaaacttgctggttttgcagcccaggtgggcatcatggaacctgccgatatgtgatgtcacccctggaggcccagctgtaaaattcttctctttgtactctttctcttaatttctcagatgggccgacacttagggaaaatagaacctacgttgaaatattgggggctggtttccccgatagtagtcactcttcagctgggtgtgggttctgtctttgaagtaatcttttgttggaaagagaattccagaggtgcctggtacctaacaagatccaacccctgaagcttctaaggaaatatatgaccaaataagagagcatggtgtgtgcttaataagtatttaggtaaataaatgtgcacaggccaggcgtggtggctcacgcctgtaatcctaacactttgggaggccgaggccggcggattgcctgagctcaggagttcacgaccagcctgggcaacatggtgaaaccctgtctctactaaaatacaaaaaaattagctgggcatggcagcgtgcacctgtagtccagtgtgctactcgggaggctgaggcaggagaattgcttcaacttgggaggcggaggttgcagtgagccaagattgagccactacagtctgtcctgggtgacagagtgagactccgtctccaaaaaaataaaataaaaataaatgtgcataaggcatggcagtgtagtatgggaaaggaaagggagtggaagttcacagcacattctgaggctgtattttaagatgagaggtaacatctatgcagtttatctcgaagttattatcttgagatcaggaggggaaagaggaaaagggaaagaagaagaaaaaaaaggtttaaaacgtggtttgagactcagctgctaagctgctggttacacactctgggactcaacttcaggagtcagaatctgccttctaagcttgaaaatatgtttaacctcctgaaagggggtttcctgctgaactgtggctgaaatttctctgaactaattcaggttttttcttttcccttcttttgattcctttatagaagattactgccatataattccagattttccatgcatttaacaattttatttcattgttgatgtgtttttattttctggtctgagaatgagtagattgggagataaggtgggagaaaggcttgaccatggagccagcagtctcatcctaaattcctgatccctggaggacaccaggccttccctcctgcttcagtgtggtttgtgtggcctgggcctcccctaccgctctgaggccaggggatggctccactgggcagtgagtctcgaattcccagcacacacttgtgggtccccgtccaggaagaaggagcaggaagagcccattgagtacaggcaggaaattccgcttaaatgcaaatgtcccctgggaggggtcaggtcacagcgaagggaggaagcccaccctatcaagggctgtgtctggaaccgcttcatctcgctccactcagccgtgtaagatccttcttctgtcaatcagttccctgggggggcggaatttggagctctacccaatcagtgttgggggcgagttcttgggaactgccagtcaggcgcgctgccgggaggagggtggagctttctacacccctctgagctcccgctcctggctctgtagctgagagaagccctggcaggtcagtggcaggcactgtcacgctgagtcctatgctggcagcggggaaccttggggagaacacgggacaccgcggaagccgggaaatggtgagtgtgcggggcccggcgtcctggggcagggcgaaggactggttggaaccggccagaaccggctgtggcgggacccgggcgtccccgcggcgactg

SEQ ID NO: 20814 - DNA, 2300 bp, Homo sapien
gccttagcctcccaaggtgctggaattacaggaatgacccaccgtgttcaggaacccaaaataattctttcaagaaaaagccatacattgctagctgaaaacaagatgacaaactagtgaaatatcgcctgggggccaaacagttcataccgttgctgtgaattaaggacagaaggttagcctggggaagtctctggaaaccaagagatttgctgccagccctaggaggagtcaggatgagagaacacagtggtggatttgagaccctgctaaccacatctttggaagactcagaggggaaacggtcgcccttggaaagaaagaagggactgaggaccacggagaccacagctcctcccacacacaaaccccacacacgagtctggattccacctggtgactcgtcgtcaccgtgcagcctcctcaccgggttcacaggaactgcgagccaggctggaggcgagattgcagttagatattaaccaggtgccctcagccccgctgcctcaaggggccgcctccctgagagtcaggtcacagcagacgctgaccgccggcttccccattgtgcctggggataagatctctgagaactgctcaagagtcgccggagttctcagatcctgaatcccagcaaaggctggcgccaatcaggttgaagtcccaacgagggagcccattcagcagaatgcggtttcttcacctcctgtcccaggattcacccctcacttccccaccaaccaacgaccctacacccagccgcccccgtccagaccccaaatccctcagggaggcggatctggggtgtcctcccctctctggctattaaactgtttctgctgcagccctcagcgtctcggtgcagtgagtcgggccgcgaacctgtgttgcttacagccgcacaatctcgggagacgcgaggctgcgggcgcggagctgcccagagagggcgccggggccgcagtcgccgcgcaggaacgggacaggacgcccggggtcccggctgcatgcccagccccaccctgcggccgagggccgacctacgccaggggaacccgggtccgtagatcccggagtagcccttggggaggcccgggtccagccacagccgattactgcaggttccacccagcccctcccccgcctcgggacgccggcccagcacacgcaccatttcccgacttccgcggtgtcccaggtcctccggacggctcccgctgccaatgcgggttcccgcgggacacaggctgccacggaacttccaggtcgtctcttagctacagagccgagcaccgagcgcccagcgcaggtgggtggagaagacgccgcgggctttttcaaccacacactcctctgggaagcgcgcctgattgacagttcccacgaacccgccccacggcccttactggatacggcgtcaggtgccgcccctcgtggactgattgacagaagaagcgatcttgcacagctgagtggagccagatgagcaagttcctgacacagcccttggcagggcgggcttcctccctgctctttgatctgaatcctcccgagggatatttgcacttaagcggaatttcctgcctgtactcaataggacctcctgcttcttcctcctgtacactgactgacaaaacaattatacttttttttttttttttttttttttttccgagagagagagagagagagagagagagagagggagtcttgctccgtggctcaggctagagtgcaatggtgcgaggctcactgcgacctccgcctcctaggtgggttcaaacaattctgcctcagcctcccgagtagctgggattacaggtgcgcgccaccacacccggctaatttttgtatgttttagtagaggccgggtttcaccatgttggccaggctggtctcgaactcctgacctcgtgatccgcccaccttggcctcccaaagttctgggattagagacgtgagccatcgcgcctggctccaattatactctttttcaatgaaatttttcaaaatatttcaatgtacaattaaattattttttactatagtcactctgttgtgctagcaaatactaggtcttattcattctttgtaactattttttatacctattaaccatccccacttcccccataactactcctcgctactacttttcccagcctgtggtaaccatccttctacacgtttttggttgtttgagatggggtcttgctctgttgcctaggctggagtgcagtggggccatcatggctcactgcaacctctacctcccaagctcaagcaatcctcccacctca

SEQ ID NO: 20815 - DNA, 2300 bp, Homo sapien
tgctagcaaagaaaaccccagaacccagtggcttcactgctgaattctactaacatttaaaaaagaactaataccaatcctactcaaactattccaaaacagaggagaaggcaatacttccaaacttattttacaaagccaatattactttgacaccaaaaccagacaaagacatgtcagaaaaagaaaactataggccagtgtcactgatgaatattgatgcaaaaatcctcaactcaatactagcaaactgaatttaacaatacaccaaaaagatcattcatcatgaccaagtgggctttatccctgggatgcaaggatggttcaatatatgcaaatcaatcaatgtgatgtatcatttcaacagaataaagggcaaacaccatataatcatttcaatgtgcactgaaaaagcttttgataatatttaacatcccttcatgataaaaaccctaaaaaaaaactgggtatagaagcagctaccttaacataataaaagccatatatggcagacccacagctagcatgataatgaatgaggaaaaactgaaagcctttcctgtaagatctggaacacaataagaatgcccacttttaccactgttgttcagcacagtactcgaagtcccagctagagcaataagtccaaaaaaaaaaaaaaaaagaaataaagggcatctatattgggaaggaaaggaagaagtcaaattatcctggtttgcatataatatgatcttatatctggaaatacctaaagactccaccaaaaaagtattagaactgagaaataaattcagtaaagttgcaggatacaatattaacatacaaaaatcagtaacatttttatatgccaacagtgaacaatctgaagctacttgagaggctgaggtgggaggattgcttgagcttgggaggtagaggttgcagtgagccatgatggccccactgcactccagcctaggcaacagagcaagaccccatctcaaacaaccaaaaacgtgtagaaggatggttaccacaggctgggaaaagtagtagcgaggagtagttatgggggaagtggggatggttaataggtataaaaaatagttacaaagaatgaataagacctagtatttgctagcacaacagagtgactatagtaaaaaataatttaattgtacattgaaatattttgaaaaatttcattgaaaaagagtataattggagccaggcgcgatggctcacgtctctaatcccagaactttgggaggccaaggtgggcggatcacgaggtcaggagttcgagaccagcctggccaacatggtgaaacccggcctctactaaaacatacaaaaattagccgggtgtggtggcgcgcacctgtaatcccagctactcgggaggctgaggcagaattgtttgaacccacctaggaggcggaggtcgcagtgagcctcgcaccattgcactctagcctgagccacggagcaagactccctctctctctctctctctctctctctctctcggaaaaaaaaaaaaaaaaaaaaaaaaaagtataattgttttgtcagtcagtgtacaggaggaagaagcaggaggtcctattgagtacaggcaggaaattccgcttaagtgcaaatatccctcgggaggattcagatcaaagagcagggaggaagcccgccctgccaagggctgtgtcaggaacttgctcatctggctccactcagctgtgcaagatcgcttcttctgtcaatcagtccacgaggggcggcacctgacgccgtatccagtaagggccgtggggcgggttcgtgggaactgtcaatcaggcgcgcttcccagaggagtgtgtggttgaaaaagcccgcggcgtcttctccacccacctgcgctgggcgctcggtgctcggctctgtagctaagagacgacctggaagttccgtggcagcctgtgtcccgcgggaacccgcattggcagcgggagccgtccggaggacctgggacaccgcggaagtcgggaaatggtgcgtgtgctgggccggcgtcccgaggcgggggaggggctgggtggaacctgcagtaatcggctgtggctggacccgggcctccccaagggctactccgggatctacggacccgggttcccctggcgtaggtcggccctcggccgcagggtggggctgggcatgcagccgggaccccgggcgtcctgtcccgttcctgcgcggcgactgcggccccggcgccctctctgggcagctccgcgcccgcagcctcgcgtctcccgagattgtgcggctgtaagcaacac

SEQ ID NO: 20816 - DNA, 2300 bp, Homo sapien
aacagaaaggcccaaataaataaaattagagatgaaaaaggagacattacagttgatactgcagaaattcaaaggatcattaatgcaactaagaacaactatatgccaataaattggaaaacctagaagaaattgataaattcctaggcagatagaacatagcaacattgaaccatgaagaaataaaaaacctgaacagaccaataacaaataatgagatcaaagccataataaaaagtctgctagcaaagaaaaccccagaacccagtggcttcactgctgaattctactaacatttaaaaaagaactaataccaatcctactcaaactattccaaaacagaggagaaggcaatacttccaaacttattttacaaagccaatattactttgacaccaaaaccagacaaagacatgtcagaaaaagaaaactataggccagtgtcactgatgaatattgatgcaaaaatcctcaactcaatactagcaaactgaatttaacaatacaccaaaaagatcattcatcatgaccaagtgggctttatccctgggatgcaaggatggttcaatatatgcaaatcaatcaatgtgatgtatcatttcaacagaataaagggcaaacaccatataatcatttcaatgtgcactgaaaaagcttttgataatatttaacatcccttcatgataaaaaccctaaaaaaaaactgggtatagaagcagctaccttaacataataaaagccatatatggcagacccacagctagcatgataatgaatgaggaaaaactgaaagcctttcctgtaagatctggaacacaataagaatgcccacttttaccactgttgttcagcacagtactcgaagtcccagctagagcaataagtccaaaaaaaaaaaaaaaaagaaataaagggcatctatattgggaaggaaaggaagaagtcaaattatcctggtttgcatataatatgatcttatatctggaaatacctaaagactccaccaaaaaagtattagaactgagaaataaattcagtaaagttgcaggatacaatattaacatacaaaaatcagtaacatttttatatgccaacagtgaacaatctgaagctacttgagaggctgaggtgggaggattgcttgagcttgggaggtagaggttgcagtgagccatgatggccccactgcactccagcctaggcaacagagcaagaccccatctcaaacaaccaaaaacgtgtagaaggatggttaccacaggctgggaaaagtagtagcgaggagtagttatgggggaagtggggatggttaataggtataaaaaatagttacaaagaatgaataagacctagtatttgctagcacaacagagtgactatagtaaaaaataatttaattgtacattgaaatattttgaaaaatttcattgaaaaagagtataattggagccaggcgcgatggctcacgtctctaatcccagaactttgggaggccaaggtgggcggatcacgaggtcaggagttcgagaccagcctggccaacatggtgaaacccggcctctactaaaacatacaaaaattagccgggtgtggtggcgcgcacctgtaatcccagctactcgggaggctgaggcagaattgtttgaacccacctaggaggcggaggtcgcagtgagcctcgcaccattgcactctagcctgagccacggagcaagactccctctctctctctctctctctctctctctctcggaaaaaaaaaaaaaaaaaaaaaaaaaagtataattgttttgtcagtcagtgtacaggaggaagaagcaggaggtcctattgagtacaggcaggaaattccgcttaagtgcaaatatccctcgggaggattcagatcaaagagcagggaggaagcccgccctgccaagggctgtgtcaggaacttgctcatctggctccactcagctgtgcaagatcgcttcttctgtcaatcagtccacgaggggcggcacctgacgccgtatccagtaagggccgtggggcgggttcgtgggaactgtcaatcaggcgcgcttcccagaggagtgtgtggttgaaaaagcccgcggcgtcttctccacccacctgcgctgggcgctcggtgctcggctctgtagctaagagacgacctggaagttccgtggcagcctgtgtcccgcgggaacccgcattggcagcgggagccgtccggaggacctgggacaccgcggaagtcgggaaatggtgcgtgtgctgggccggcgtcccgaggcgggggaggggctgggtgg

SEQ ID NO: 20817 - DNA, 2300 bp, Homo sapien
gcccaaataaatacaattagaggtgaaaaaggagacattacagttgatactgcagaaattcaaaggatcattaatgcaactaagaacaactatatgccaataaactggaaaacctagaagaaactgataaattcctaggcagatagaacatagcaacattgaaccatgaagaaataaaaaacctgaacagaccaataacaaataatgagatcaaagccataataaaaagtctcctagcaaagaaaaccccagaacccagtggctccactgctgaattctaccaacatttaaaaaagaactaataccaatcttactcaaactattccaaaaaacagaggagaaggcaatacttccaaatttattttacaaagccaatattactttgacaccaaaaccagacaaagacatgtcagaaaaagaaaactataggccagtgtcactgatgaatattgatgcaaaaatcctcaactcaatactagcaaactgaatttaacaatacaccaaaaagatcattcatcatgaccaagtgggctttatccctgggatgcaaggatggttcaatatatgcaaatcaatcaatgtgatgtatcatttcaacagaataaagggcaaacaccatataatcatttcaatgtgcactgaaaaagcttttgataatatttaacatcccttcatgataaaaaccctaaaaaaaagtgggtaaagaaggagcataccttaacataataaaagctatatatggcagacccacagctagcatgataatgaatggggaaaaactgaaagcccttcctgtaagatctggaacacaataagaatgcccacttttaccactgttgttcaacacagtacttgaagtcccagctagagcaataagacaaaaaaaaaaaaaagaaaaaaaaagaaataaagggcatccatattgggaaggaagaagtcaaattatccttgtttgcatataatatgatcttatatctggaaatacctaaagactccaccaaaaaagtattagaactgagaaataaattcagtaaagttgcagtatacaatatcaacacacaaaaatcaataacatttttatatgccaacagtgaacaatctgaagctacttgagaggctgaggtgggaggattgcttgagcttaggaggtagaggttgcagtgagccatgatggccccactgcactccagcctaggtaacagagcaagaccccatctcaaacaaccaaaaatgtgtagaaggatggttaccagaggctgcgaaaagtagtagcgaggagtagttatgggggaagtggggatggttaataggtataaaaaatagttacaaagaatgaataagacctagtatttgctagcacaacagagtgactatagtaaaaaataatttaattgtacattgaaaaatcttgaaaaatttcattgaaaaagagcataattggagccaggcgcagttgctcacgcctctaatcccagaactttgggaggccaaggtaggcggatcacgaggtcacgagtttgagaccagcctggccaacatggtgaaacccagcctctactgaaaaatacaaaaattagccgggtggtggcgcgtgcctgtaatcctagctactcgggaggctgaggcaggagaattgcttgaacccacccaggaggcgaaggttgcagtgagcctcgcaccattgcactctagcctgggcgacagagcaagactccctctcgaggaaaaaaaaaaaaaaagatataattagtttgtcagtccgtgtccaggaggaagaagcaggaggtcctattgagtacgggcaggaaattccgcttaagtgcaaatataacccgggaggattcagatcaaagagcagggaggaagccccccctgccaagggctgtgtcaggaacttgctcatccggctccactcagctgtgcaagatcgcttcttctgtcaatcagccctcagggggcgggacctgacgccctatccaatcaggggcgtggggcgggttcgtgggaactgtcaatcaggcactgcccagagaagtgtgtgtggttgaaaaagcccgcggcgtctgctccacccacctgcgctcggctctgggttctgtagctgagagacgacctggaagttctgaggcagcctttgtctggctggaacacgcattggcagcgggagctgtcggtaggacctgggacaccgcggaagtcgggaaatggtgcgtgtgctgggccggcgtcccgaggcgggggaggggttaggtggaaccggccgtaatcggctgtggctggacccgggcctccccaagggc

SEQ ID NO: 20818 - DNA, 2300 bp, Homo sapien
aaaacttgtacatggatgtttatagcaaccttattaataacaactaaaaggtggatacaaaccaaatgcctattaatggatgaatggataaacaaaatgggctatattggtacaatgaaatattgttttactgtaaacaacaaatgaagtattgatacaaacttcaatgtaaatgtcccttgaaacagttatgctaagtgaatgaagttaatctcacaaagaacacatagtatatgattccattccaagtctacaatgggaaagctatatagcaactgaaagtaaattaatggttgcttaggacagaggcttggaggaggaagatgggaagataggacagtgacagccaaaggctacaggggtttcctttttttttccttccttccttccttctttccttccttccctccttccctccttccctccttccctccttccctccttccctccttccttccttccctccctcccttccttccttccttccttctgacagggtctcactctgtcacccaggctggaatgcaggatcacagttgactgtagccttgacctcctgggttcaaacaatcctcgggcctcagcctccccagtagctgggactacaggtgtgcaccaccatgccctgctaatttttaaaaaattttcttagagatgggggaggggggggcctcactatgttgcccaggctgatctcaaactcctgggctcaagcagccctcccacctaagtttcctaaagtgctggaactacaggtgtgagccatcatgccctgcccattagtaggtttgatccaatatcttaagtatattgagtttcctagtacatgccaaatttacataatcttttgtggttttttaaataatctcagtgaaaatggaattaattgccttatcgatatcatagccatttacatttcaaaattctctaggggctgggtgcagtggctcatgcctgtaatcctaacactttgggaggctgaggccagcagatcacttgagcccaggagttcaagatcagcctgggtgagatagtgagatgctgtttctacaaaataaaaataaaaagaaagaaagaaattagtcaagcatggtggcacgtgcctgaggttccagctactcaggtggctgaggtgggaggattgcttgagcccagaaggtcgaggctgcagggggctctgattgcaccactgcattccagcctgagggacaaagaagggccctgtctcaaaaacaaaaaccacaaaccaaacaaacataaaggatccacaaaagttctctagggacatagtcaaaaactggtccgaaataaatatccttccagtgttcagttttactgaacacatctcatggctttgggtttaactgaataattcctcactgggcacggtggttcatgcctgtaatcccaacactttgggaagccaaggagcatcacctgagcccaggagttcgagactagcctgtgcaacatagtgagaccaccccaccaccgccatctctaccgaaaaaaaaaaaaaaaggaactccttctctcagactagggctgtggggtccaaacttcccactagagcaaagtgtggggggagggaagggatgggtgacggcctaaaccctgtcagttgtcaaagattaaaacgtagtcactctttgttaggtatgatgaggtcactctgtcactctaagtgtctgtatttgtaaacaagagtcagaaatccatgaatggcctcgcagccttatgctaagtctgggagcgtctgacccttccgttctagtctggcatggcccgggcgtcctttttcgctgtggacaaagagcctttttctggaaactgagcctggaatttcctgcgctgtgcacgcttgtgtctccgcgctcagaaggagctgcaggaagacaccagtgcccgaccccgggtacgttaacaaattctgcttagacgcaaatatccgtggcaggggaacagattcctgaccccggacgaatgcaggttgcttagagacgcgacttccctactagctgtcactcaggcaacgaaggcgggtccaagagtgcaatgtccaatcaggggcgccgccgggaaggcgggcggaggggcgctgcgcaaacggcgagggcgtggctaccagccgctgcgctccgctctggggtctcctcaccccagaaggccctcaggtggaggaagggcctcaggtggaggtaggacctgtgctggccgcgggagaggtaaacagaacaccaggacatcccagagtctgggaaatggtaagtgtgcggggctgggggtcttgagatgggaga

SEQ ID NO: 20819 - DNA, 2300 bp, Homo sapien
gaaagggacagttatttatacaatgcttaatgtttagctacagaaataattgggtgggtcaatggtggtggggtggggttgagagagattcagatggataaactggacatgaacatccccagccacagagcacctggtgacaaccatgtactgtgaaggtcaggtggccactgaaacagagaaaaaagggaagagctcacatttgattagttcttttcataagtgttaatgtgaaaataatagttcgctagcatctttgttttctaaaaggaatgcttatttgccaattttaaaatatatttatttaaatctttttagagacagagtctaactctgttgcccaggctggagtgcagtggcacaatcttggctcgctgcagtgctgacctcttaggctcaagtgatcctcctgcctcagcctcctgagtagctgggaccatggatgcgcatcaccatgcactgctaagtttttaaatttttttctagaggtgaaaatctatgctgcccaagctggtcttgaattcctgggctcaagcgatcctcccactgcagcctcccaaagtgctgggattacaggcacaagccattacttacgcccactccagtgttttaatccatataaaatattttaagattttcttcctctgatttgtatgtaaacacaggaggaaacgtaggactttgctggtttctttctcatacagtacgatagagagtctttgtctcatgtagctgatcagtgctggtgagaagcaggtgaagaacctgcagtgggcagcagcgcctgcagccagtgactccaacctgaggccagtctggagcctgcaaagggagggaaatggagctcctcatgtggctttctgggcagcctgttgtctccgtaggtggcctctggttgctcagaacagctacaggagtgcagattctgagaagcagagccctggaaagcaaaagattcatgtgaagacatgcttggggtgttctgtcctttctcaggctaactattttctgggcaatgtgtttgttttggcatacatagggtcattgtggtccaactgtaatttgtatatgtgaagtaaatctggcatggtcaggctcagataaagactcattttggagaaaggatttatgtagctgatagtttatgtaggttagaatgttaaactgactccaggtaagagtctcctgcaggtgtaaatgaaggtcttgaaggaggcagcttttccacactgtgtggagggtacataagggcatgttgagctcccagagttaaatccttaggtttccctacctcatcaggagggtctgatcgacctgggcatccatttcagtagtcaagagtctgactcccaagattaagaatatgttaaacctgaatgcaggtgttccttgtgaactgtgggtgaagcctgcttgcctgagctagttcaaatgtttgctttccttttgattcctttatggaataatgctgccatataactatgcatttaataatttttccatgcctttattaattttattcccacgttggcatggtttttgttgttgttgtttttttttctgggctgaaaatgagtagactaagagataaggtgagaaaatggcttggccatggcaccaactgccccatcccaaattcctgatctctggaggacatcaggccctccctgctgttccagtgtggcctggtttggactcggcttccttttgctttgagggaaggagatgtctccattggacactgagtctggaattccttctgctcatctgtgacctggaagagggagaaagggcccaccgagtacaggaagaggccagtagtagtagctctggaaagcctgtggacaattgtgttgatgcctccagcggagcctgatttggttgcctggaggaagctgggcctgctattggctgcggttacagcctatccctgcagccacctattagatgacttctgtgacgcagggggtggagcccgaatctacccaatcgggggcgctggggcgagctctgaacagtccaatggggtgtgccgccaggatgcctgggcaacggtcaacaggtcagcggggcaggtcctttctgcagaggacgccacaggtggcgccgctgcagtccctgtctgctgtgaccagctctgaccaaaggaggcgtagtaaggaagccaggacacctggaacccgggatacggtgcgtgtgcggggcttggagtccctagacttggaggaggggctggttggaatccagcaggatccagctgtggagggacccgggcctccccgcggcgacttcgggatctg

SEQ ID NO: 20820 - DNA, 2300 bp, Homo sapien
gttttctcaaaggaatcattacttgccagttttaaaatccatataaagtattttagaattttttgtcttccagcttatacataaccacagaaggaaagcaggaactctgctagtttcttaaaaacaaacaaacagcaaaggggattgaaggtcttttttcttacctaagtggatcagtgttggtgagaagcaagtgaataaactgcagtgggcaggagagcctgagaccagtctggagcctgcaaagagagggaaagggtgcttcttgggcagcctgcccgcccttgcaggtggcctccagctgctcaggagtgcagattctttttttaattttaattttattttttacttttattatttttttgaggcagagtctcactgttttggcacccaggctggagtgcagtggcgcagtctgggcttactgcaacctctgcctcccgggttcaagcggttctcctgcctcagcctcccgagtggctgggattacaggcacgcgccaccacgcccggctaatttttgtatttttactatagacgaggtttcaccatttggccaggctggtctcgaactcctgacctcaggtgatccgcccgcctgggcctctcaaagtgctggcgtgagccaccgcgcctggccaggaatgtggattctgagaagctgcagagctgtgaaaagcaggagacccatgtgcagatgtggttgggttgggggtggagggttctgtcttttctgaggttgtacctttggcgcctggggccatttcctggacagtgttttggttttagcattcatggggtcgctgagtcaggctgtaatttgtatacatgaagaaaatctgtgagggtcagactcagtgaaaaacttgtttgcattgtcccctggagaaaaggtttgggaacatgacaatttatttaggtcacgactttacattgactccgggtgagagtttcctgctggtacaaatgaaggttttgaaggaaagagtgtttccacactgtgaggagaggactggagggcaccttgagctcccaaagttgaattcttaagtgtccctgtctcatcaccaggttctgatccacactggggttccatttcagcagttagagtctgggtcccaagcttgggattattttattttatatttcatttcttcatttcattatttcatttcatttcatatttcattttttagtctcgctctgtcgcccaggctggagtgcaatggcgctatctcggctcactgcaacttccccctcccaggttcaagcgattctcgtacctcagcttcccgagttgctgggattacaggcacctgccaccacgcctggctaatttttgtatttttagtagagatggggtttcaccatgttggttaggctggtcttgaactcctgaccttaagcaattttctcaccttggccttccaaagttctgggattacaggcgtgagccaccgcgcccggcgcttgggaatatttttaacgttatgattgtgggttttccttgtgaactgcgggtgaagcaggctgcttgtctgagctagttcaaatgtttgcttacttctcttggtttctttatagatgatcgctgtcataaaaactccagtttttcctatacatttaatacttttatttctttgtccgttttaattttcttgcctgaaagaagcaagccctcctccctcctgttacactgtggtctggcctggcctgggcgcgcctcctactccgaggccaggggatggctccactggacgccgagtctgtcattccctgtgcacacttgtgactctgtgtccgggaggaaaaggcaggaagggcaccctgagtgcagaaacacgccagtgtcacctctgcagagcctgaaacactttctgcttaaatgcaaatatcctccccggcacagaaggttacagaaggaggaagcccggcccgcgaagggcagtggccaagaccctgtcaatctgtctttactcagccacataccgcattgcttctcctgtcactcagtaccaagggggcaggacttgaatcatcacccaatcaggggcactggggcgggaacctgcaaaccatccaatcaggaactctgcaagggggacaggggcaatgttcaacaactccgcggggtcttcctgtttcgtgtccgctgcgtttgggttccggtctccgcttctccagtggccccggtggctccaccgcagcgtctggcgcgctgggacctgcacaggccggagagagccgtaggcaggaccccgggacaccctggaagccaggaaatggtgcgtgtgcggggcc

SEQ ID NO: 20821 - DNA, 2300 bp, Homo sapien
actcctgaactcaagcaatcctcctacctcagtctcccaaagtgccaggattacaggcatgagccactgcacccagcccaaatgtgatattccaaaggatgcaggtggctgtgttgggatggccaatgaaggtaagggacaatggaagtacagggtgagggcaatgaacaggacatacctgagagcctggttattggccttgactatgggagtgccttcacaaagacccgaaagacccccccacaaagaggtcatagaaggacagacccaaatggtcattataaacaaggaaggtagccacgctgacaggtagcgatctcacttacagtttgagtcttgatgctttgtccatggtgttcactgttctgcatctaattagaaacaagaggatgcattttgtgagtttcagcaatttagaactaaacatgacctttgacagccttggaagcattgttccccctgcatctacctgtacacacagagctaccagaagggtggatcatgggagttttcaagattacactgtctcctctataatgggaaaaatgaaatatgtttctactttaaaaaaaaaatttagagacagtctctctctctcccaggctggaatgcagtggcacaatcttggctcactgtaacctcaaactcttagccttgagatccttctgcctcagcctccgaaggagctaggactacaggtgaacaccatacccagctaatttttaaaaattttttgagaaatggggtctcgctatgttgcccaggctggttttgggctcttggtctttccaagttctgtagggacactttagaaaacttatttgagataaatttccttccactttacagcaacacggatggaactggaggccattatcctaagtgcgatgatgcaaaaacagaaagtcaaaaactgcatcttcttacatataagtgggagctaaacaatgggtaaacatggacatacagaatggaataatagacactggagatgccaataggttggacagagaggggggatgagggatgaaatattacctattgggtacaatatacactctttgggtgatgggtgcactaaaagccagacttcgccactatgaaatatatccacgtaacacaagtgcatttgtaaccataaatctacaaaaataaaaataaaaatgaaaagcaataaaaacatgcttaaactaaaaacaaacaaacaaaaaaacaacgaaaacaaaccatttccttccagagtaaaacgcagtttactgagcacgtctcatagatcgtgattggtctgaagagtccctgtgcccaggttagggttgcaatttaccacccgagccaagtgctcgggtgtcctacggattgttttttctttctttcctttttttttttttcttgggatgggttctggccatgttgcccagactgaactcaaactcctggagtcaagcgatccacccgcctcagcccacccaccccccgacctcccccaccgcccccaccacgcagtagctgggactacgggtgtgcgccaccaagccctgccttggggttccttttctaaagtgccaaatgtgtggaggtggggaaaagaaaggtggacgcctcaacgctgttatggtcaaagattaaaatgcaaccacactttttattacacatgatggggtaaccgtctgtttataaacaagggtcactattccacgagaggccttacaacattatgccaagcccctggtacctggaggacatcagaccctcctgttcctgtgcggccttgactagacgaccacttgctctggacttgctcctcgaggggtcgctccatctggaaactgagactggaattcctgcgcatccctgtccccgcatccagaaacactgcaggaagacttccgtgtccgacccgagatccggaacaatttctgcttcaacacaattgtccacggagggcaccagttccgtcccaccggcggaagcgagatctgcctagctactagacctgctgcctagctgtcattcggacaaaaaggggcggggctgtataattgtccaatcaggggcggcgccggaaaggagggtacggctacgctgcgcaaatgcgtgctacgtcactgtgcgatcgggttgtgcttagcttggggtctcctggccccttgacgcgtcaggttgctgtacccctgcatcggatgcgctgtaccctgcgctggctccgtgaaccttagggacaacaccgggacacccgcgaggccggaaaatggtgagtgtgcagggccggactagttggaaccggccgtgatcgcgggacc

SEQ ID NO: 20822 - DNA, 2300 bp, Homo sapien
agtgcggaggttgcagtaagccaaaattgtgccactgcactccagcctgggcaaaagagcaagacttggtctttaaaaaaaaaaaaaaaaaaaaaaatccagcagaattacttaaacacagtgtttacgtataaaggaagcaaaaggcctggcgtggtggctcatgcctgtaatcccagcattttgggaggccaaggcgggaggatcatgaggtcaggagatcaggagattgagaccatcctgggaaacatagtgaaacactctctactaaaaaaaaaaaaaaaaaatacaaaaattagctgggcgtggtagcttgtgcctgtaatcccagctacttgggaggttgaggcaggagaatcgcttgaacccgagaggcagaggttgcagtgagctgagatcgtgtcactgcactccagcctggcgagaaagctagactccgtctcaaaaaaaaaagtaaataaataataaataaataaataaataaataaataaaggaaggaagcaagaaaattttaagccatttaacaagaaaacccactattgctttcagaaaatgagaatgttgggccggtaatagtagctcatgcctggaatcctagcactttgggatgctgagggtggaggatcgcttgagcccaggagttcaagatcagcctgagcaacacagccagaccccatctgttaaaaaaaaaaaaaagaaaataataatgtcagttaattatttccatggcaataaatagtttacaaaagtattacttctatctgaatgcttctagatgttgcaagtttaagtcctggaataccatctgaaacatcaaactaaaagaacagacctgagaaacatattccatgtgctcagggaaagaacaaagaatttttaacaaatgtaatattgggatgttttttgttttctgagattcatttcttttttgccctttggaaatattttgtactgtctctcaagttcttctgataacatatattttatatttattggaaaaatgacattcgagtgaataaatcttttcaaggtcataaacccaaggcgggacagtgccaatctgaaactgtgctgaaaagatagattacccaggaaagtttacaaaaaggaacctcaacgcaaaggagttcccataggatgtctgtgccctggaaaggtaccaggatgagggccacagcattttatgcagattagttccaagtgaataatttttctgatttttctctgatgtaaaatatccacaaacaagaaataaatcgtttaaaagaggcatctattggaaaaaagattattaaaatactgcgtgtgtttgaaatgcaccacacaggacaaagagttggtgacgatgttttccactggcgagcggaagtaggcgtttgggaattcggggagggatccggaaatctagggattaatggcccgccgtgggaggagctaggctggggggacagggtagtggatttgagactctgcttccaacatctttggaagactcagggggaaacagcctttgggaagaaagaagggactgggaaccccagactgtagctcctcccacacaaaccaaacacacaaggcgggattctccccaggaccctcccgtggtccctgcacgatctgggaaagacgcggggctgcgggcgcggagttgtccagagagggctccggggctgggaccgcagtcgccgcgcagggacgggacaggacgcttggagttccagctgccagcccagccccacactgcggccggaggtgaccgtggggaggcccgggtcccgcgatcacggccggttccaactagtccggccctgcacactcaccattttccggcctcgcgggtgtcccggtgttgtccctaaggttcacggagccagcgcagggtacagcgcatccgatgcaggggtacagcaacctgacgcgtcaaggggccaggagaccccaagctaagcacaacccgatcgcacagtgacgtagcacgcatttgcgcagcgtagccgtaccctcctttccggcgccgcccctgattggacaattatacagccccgcccctttttgtccgaatgacagctaggcagcaggtctagtagctaggcagatctcgcttccgccggtgggacggaactggtgccctccgtggacaattgtgttgaagcagaaattgttccggatctcgggtcggacacggaagtcttcctgcagtgtttctggatgcggggacagggatgcgcaggaattccagtctcagtttccagatggagcgacccctcgaggagcaagtccagagcaagtggtcgtctag

SEQ ID NO: 20823 - DNA, 2300 bp, Homo sapien
agagggcggggtttgactgggcgagggaggagccagagtgagtgaagaagtgggcccaagagaggtcccgggtcgcacctgcgcaaacagcgaggcctgctcccgagagtggccgaaggggtcaatgtgccaggccacacggggtcgcccatcattgccaaatgtgtcctccagaaagcgcagcccaagtgtcatctggtccacgatggcaccgtagtgggtggctgcctcatcgttcatcacccagccaccattggcgaactccaggcgccctgtgccaggacaggcaaggtcagggtcagcggtcagagccaggagtgggagtagggtgggtgatactgggaatgtgaaagcctgcctgtgtacacatttctggcggaaggacaagaggggtcgctcccaggccatagttcccagatatgggaaagaggccccctgcatggcaggcttcccagaggatgcacagcaggtggggctttgtgggatgtataggaggtctccaaatggagagtccaggcaggcggagcgacacgcatgttatacagcttgcacgtggcatgacaaatctcagaaaccagagatgcagaagcagaagctgggctgggcttcctcttttcacttccttggggtaggctcaccctggcgcacaaggtctcgcacgacttcctgtgtggcatttgtctgctggtgccaccaacgggagaagaaggcaatctccacgtaaatgaagcgacgggtgggatctgccagcaaggcagagatgaccgagtccaggatgtactgcacaccggcgtgctggatgtcattcttgactgtggataacagggataaggctctcagggaacagcagagccaagggggttattcctagacagaggagcccaaaccctggatattagggtagcactggccccaccctaatgtccaggacccagagggattacagggaccatggggatcccagggaccagtccccatcctctactcacttccataaaagtactggtccacggttttgagccagcccacgtcatcatgtgtgtgaggcagcaggtgcacgttcagcatgttcggctgcactgtggggcatgtctgcacagggaccccaaacacacataccttgtcaataacccccgaggtcgggggctgcagagtaagtcttgatctagaggtgagtgactcagagaggcctgatctcgcctatgtgcagaggaggccaggccctcccaggcaggacacacacatacatagttgtgctcatagatacaactccactttgcacaaccccacagggcagctctcattcacactccgggaaaataataatagaagtagctgatgtttgttcagcatttgccgacagcagacggccaccgtgggaggtggggtgatgttatccccagtttccagatgaaggcactgaggcttagagaggataggtgacttgcccaacgtcacacactcaggaagtgtaagagctaggctggaatttcaggcagactccagagtcccagctctcagccagcacctccccccacacatacactgctcaccccctgccacctcctgcccctccaatcccacagttaagtgcagacaaagtctaggcaagcatcccggagacacggaggcaggtacaatcagacacagtcctatactcagatgcgcacagccagacctcgcaatgacacaaagcacgcactcagaccacactgtcatatcatcagccattcactagacacccacaggacagacccacccacacctctagactgtattctgggtttcactctgcctcctgtacgtttcagctcggaggccccactcacctcgtatcccccggcccgagcaccggcagccgccagcaacaaaaggaaaaagcagagaggcgggagcggtggccgcagggcgcgggacatggtccaggggcctgctgagtccaggcagccgcgagcgcagacccccgaagcccgcgcgtaggcgcccatggctcagcagcttcctcctggggttccccggccctggaaaggccgggcaaacgccccgcccccagacccggccgggccaatcggggtggggggcggggccagggcgcggtctggaggctcacgggagagaggctgtagccctgggcaatcccgggggtcgttacaggaaggtaggaaaatgccaccctcagggcactggttgggctaaaggtgacactggcgtctcacgggctatgaagacggaatgcctcttaatgccggaattccaagacggaatgcctcttaatgccggtaggagcagaagtgcttttc

SEQ ID NO: 20824 - DNA, 2300 bp, Homo sapien
agcttctatgggtgtagttggacctgagaacgaggcccgggggcgggtttggaatgaagcggggtgtcttgtcattgctgatggggcgggacctgagatcggccgggagtggggctgcgatgacgctgggccgagaaagccccagtctttggtgaagtcaaggattcgagtcaggttggggatgtggcagattggtctgcgagtggggccaggctttgaagcaacttggagaggagttgtggaaaaagggcagggtcttaagcatgtgggatgtcagagtctctcttggtcctgagagacgcaggccagacagtaggactagaaaccacgtatctagagtatgccatgagcaggtgggactgaggaattccgggtggggcaaggtcccagctgcatcagatggaatcagtgggcatgatctggtgtctggaaaggtggcttcggggactcattgttgtgcctttcactaacctgcccacccacttacctttccctagctgaagtggtgtgcttgggtcgctgtctactgctccttcatcagctttgccaactctcggagctcggaggacacgaagcaaatgatgagtagcttcatgtgagacttgccctacagaacaagtgactcttgagtaaggggtggggggaccccagcctggccatcctagactgacacctctctcctgtctcaggctgtccatctctgccgtggtgatgtcctatctgcagaatcctcagcccatgacgcccccatggtgataccagcctagaagggtcacattttggaccctgtctatccactaggcctgggctttggctgctaaacctgctgccttcagctgccatcctggacttccctgaatgaggccgtctcggtgcccccagctggatagagggaacctggccctttcctagggaacaccctaggcttacccctcctgcctcccttcccctgcctgctgctgggggagatgctgtccatgtttctaggggtattcatttgctttctcgttgaaacctgttgttaataaagtttttcactctggctgtcagcctcttctgttcagtggggtgttcctcctacctggcgggaagggctctagccccataggcctggtgtggggccccagtctggaggcttctggctgttcatttgcttacttcataaaccttgtgtcttaagtcaggtgctagggacaagacagtgacttctgccctctggcaactcaccagatggccctgctgacctagataatctaggctttggtttccttttttttttttcctttttaagaaagaaaatggtcttgatctgtcatgcaggctgagtgcagtggcacaatctatgttcactgcagcctcaaactcctgggctcaagcaatcctcccacctcagcctgccacgtaactgggaccacaaatgcgtgctaccatgcccagttaattcttgttttttttgagacagagttttgctcttgttgcccaggctggagggcaatggcatgatcttgatctcggctcactgcaacctccgcctcccaggttcaagtgattctcctgcctcagtctcccaagtagctgggattacaggcatgtgccaccatgcccagctaatttttgtatttttacattttgtgtaaaattacaaattttgtgttttcaaacccgtctctacaaaacaacccatgttgcccaggctggtctcaaactcccaggcccaagtgattcaccagcctggccctcccaaagtgctgggattgcaggcttgagccactgcgcctgccctgggctttgttttcttatcagagaatgaactggtaggaattgggaaaggcatgaaagactcggggtccttccccacttgtcagaccctcttttctctccggaacacccagggatccttctcaaccaggctggatcccatccctggtactccaggggtatttacccaacgtcccaatccccacagtataggactcttcatcagatcctcctcttaggcaagctaggtccttccaggaccctagcgctgaaggtccatgggacggacaccctggattcccatggacacactacaccggctaggaaaacccggcccccttaggaaaagcacttctgctcctaccggcattaagaggcattccgtcttggaattccggcattaagaggcattccgtcttcatagcccgtgagacgccagtgtcacctttagcccaaccagtgccctgagggtggcattttcctaccttcctgtaacgacccccgggattgcccagggctacagcctctctcccgtgagcctc

SEQ ID NO: 20825 - DNA, 2300 bp, Homo sapien
ctgtctcaaaaaaaacaagaattaactgggcatggtagcacgcatttgtggtcccagttacgtggcaggctgaggtgggaggattgcttgagcccaggagtttgaggctgcagtgaacatagattgtgccactgcactcagcctgcatgacagatcaagaccattttctttcttaaaaaggaaaaaaaaaaaaggaaaccaaagcctagattatctaggtcagcagggccatctggtgagttgccagagggcagaagtcactgtcttgtccctagcacctgacttaagacacaaggtttatgaagtaagcaaatgaacagccagaagcctccagactggggccccacaccaggcctatggggctagagcccttcccgccaggtaggaggaacaccccactgaacagaagaggctgacagccagagtgaaaaactttattaacaacaggtttcaacgagaaagcaaatgaatacccctagaaacatggacagcatctcccccagcagcaggcaggggaagggaggcaggaggggtaagcctagggtgttccctaggaaagggccaggttccctctatccagctgggggcaccgagacggcctcattcagggaagtccaggatggcagctgaaggcagcaggtttagcagccaaagcccaggcctagtggatagacagggtccaaaatgtgacccttctaggctggtatcaccatgggggcgtcatgggctgaggattctgcagataggacatcaccacggcagagatggacagcctgagacaggagagaggtgtcagtctaggatggccaggctggggtccccccaccccttactcaagagtcacttgttctgtagggcaagtctcacatgaagctactcatcatttgcttcgtgtcctccgagctccgagagttggcaaagctgatgaaggagcagtagacagcgacccaagcacaccacttcagctagggaaaggtaagtgggtgggcaggttagtgaaaggcacaacaatgagtccccgaagccacctttccagacaccagatcatgcccactgattccatctgatgcagctgggaccttgccccacccggaattcctcagtcccacctgctcatggcatactctagatacgtggtttctagtcctactgtctggcctgcgtctctcaggaccaagagagactctgacatcccacatgcttaagaccctgccctttttccacaactcctctccaagttgcttcaaagcctggccccactcgcagaccaatctgccacatccccaacctgactcgaatccttgacttcaccaaagactggggctttctcggcccagcgtcatcgcagccccactcccggccgatctcaggtcccgccccatcagcaatgacaagacaccccgcttcattccaaacccgcccccgggcctcgttctcaggtccaactacacccatagaagctcaaccccgcccaccttaagcatgaggccgcacatgctgaagatcatgcccagcaggttcatgtagtccggcgtcgggtcgtccaaggccgggttacattcgctcggcgggggcttgtacctgcgacaggctcgagggtcaggggcgctcaggtcctgcccccgggatagacaggcgcttcccagggccccgatccacacccacaacccgaacccgtgcccacgacgctggggtcctcacctcagcactttgttcggcctccgtgggtccgacatattgttagtggacatagcgagtcgaaggccagatcacgcctcttccgctgcaggaatcgcagcttccggcgtgcaagctgagggcggattttagagtaacacccgaggccctcgcatttccgttcctcatgacagaggcttggactccccttacccagagaacggagatttaggagaagccagaagtcttcctttcaaagggaaaatggggaaaagaacctgaaagcgggcttcaatagttccaacccgatcaccgaaatgccaaaatgatgaacccggaagtgataaacaggaagtaggtcaggaagaacaataataaggttacacccaagcgtgggtttctaaggcgcggaattttccgtacagaccgatttaaggctgcaaggaaggagtcctgggagcatggctttccctgagccaaagccgcggcctccagagctgccgcagaaacggttgaagacgctggactgcgggcagggggcagtgcgagccgtacgatttaatggtgagcgccttcgtcttcattccgggtcctcctcccgcctcctgagatcgacggcccag

SEQ ID NO: 20826 - DNA, 2300 bp, Homo sapien
cagagcgagactgcgtctcaaaaaaaacaaaaattcttccttatgattatttttatgtatttatttatttaatttatttacttattttgagacggagtcttgctctatcgcccaggagtgtagtggtgcgatgtcggctcacagcaagctctgcctcctgggttcactccattctcctgcctcagcctcctgagtagctgggactacaggcgcctgccactatgcccggctaattttttgtatttttagtagagacggggtttcaccgtgttagccagaatgatctcgatctcctgacctcatgatccgcctgcctctgcctcccaaagtgctgggattacaggcatgagccacagcgcccggcctatttttatttatttttagaaatcattttatctttttttttttgagatggagtctcactttgtcgcccaggctggagtgcagtggcacaatctcggctcactgcaacctccaactcccgggttcaggcgattctcctgcctccgcctcccgagtggctgggattacaggctcccgtcaccacacctggctaatttttgcatttttagtagagacggggtttcaccatgttggccaggctgatctcaacctcctgacctcaagtgatctgcccaccttggcctcccaaagtgctgggattacaggtgtgagccaccgtgcccggccagattattattattttgtagacagtctgtctttcacccagcatggagtgcaatggtgcctcgaactcttggactcaagtgatccttccacttcagcctcccaagtagctgggattacagctgtgtgccactgtgcccagctgagagtaggttttaatctgagcatgggggcagctatgattccccgtagcacctggggtgagaccaggtcctggctccactcaccctgccaggatctcgtggtctgacaccttcacactggacacgccatctctggcctcatccagcgtctgcactggctcaggcctccgtgagcggcaatcccaacagcggatactggaatcaatagagcctgtgaggccagcatgatggtgaggtcaggtttggagggggagggcagcaccctgggcccccgtgcttaggccccagactcaccggacaggataactgtggcctcttcattaaactgcaccgtgttcaccttctgagaaagttattgccactcagaggaggctggactttggaggactgggataaaggcagggttcccagtgtcggttaaagcaagggcgaaggggaggtgaaaggttttgggggaacagcaaggacaggggttggtgactgcctagcctggcatgcggagtgggggatcgtcatctggggaagggatccttacggtgtaatgggggtggccgtgtcaccacctatgcgctaatacgggtcccctccactcaaatgagggtctccaggctttcactcacccctgcgtggccccggaatttgcgcacgacctgccctgatgccacatcccacagaaccaccgccttgtccccgccgccggagcagagactactgttgtcaaaggagctggagtaaaggaggaggaggatcagcatcgacctcggatcccagcctcagcgctcccatcccagcctggtccccggctcacccggccgcatccagcacctcgtagccgtggccgctgtacgtccgcagcagcgtcccccgaagcgggttccacagcttcagcgtcttgtcactgccgcacgtcaggcagtaattgccatccactggggaacaccaggcgggggttactgggccgtcgatctcaggaggcgggaggaggacccggaatgaagacgaaggcgctcaccattaaatcgtacggctcgcactgccccctgcccgcagtccagcgtcttcaaccgtttctgcggcagctctggaggccgcggctttggctcagggaaagccatgctcccaggactccttccttgcagccttaaatcggtctgtacggaaaattccgcgccttagaaacccacgcttgggtgtaaccttattattgttcttcctgacctacttcctgtttatcacttccgggttcatcattttggcatttcggtgatcgggttggaactattgaagcccgctttcaggttcttttccccattttccctttgaaaggaagacttctggcttctcctaaatctccgttctctgggtaaggggagtccaagcctctgtcatgaggaacggaaatgcgagggcctcgggtgttactctaaaatccgccctcagcttgcacgccggaagctgcgattcctgcag

SEQ ID NO: 20827 - DNA, 2300 bp, Homo sapien
gacagagcaagacttgtctcaaaaaaaaaaaaaaaaaaaaaaaaaagatcctagccttcaggccctggagtgactgaggtaaggacagggctgagatggggcaggcatctaggtatgaagtagggctgggggcacctcacctccaccaggtcccagaagaacaccttcccgtcctcagaacagctgaccacatgtgtgtcacgctcgctcaggcagcagtccagcttgtattcctggttcttatggcccttgtacctaagggtggacaggatcggggggcttggtcctctccaggggtgggagaggagggaaggggatccccacgaccacaaggactcactcgcccagcagctcccctgtgtctttgtccaggagccgcaatgtggagtccaggctggacaccagggtgcactgcccatcccggctgaagcaggtgcaggtgatggggccttgggggaagggtgggtaggtgagtgagggtggggtgcccctggttggccccccatcttccctgcctgtcccacatccccagccacactcactgcccacgtagtctgagaagagctgccccatccttaggtcatagcgtctcacgcggccatccacggagctgcaggagagggtagatccagcgggaaccttgactacactcacatggctccaggcagccctgtgccttcccagcccagtgggcctgctcttccagtgcacaggagtggaattctgaagctctggccttgagactcaggcccagggccaattacgtcctactccatcatttccaagacccacaccccctttccaagcccttggagtccttctgattcccccttttcttccttttgtttgagacagagttttgctcttgttgctcaggctggagtgcaatggcatgatcttggctcaccggaacctctgcctcccgggttcaagagattctccttcctcagcctcccgagtagatgggaatacaggcatgcaccaccacgccctgctaattttgtatttttagtagagacggggtttctccatgttggtcaggctggtctcgaactcccaacctcaggtgatccgcccacctcagcctcccaaagtgctgggattacaggtgtgagccaccccacctggcccaattcccccttttcctgcattctccagctcctcctcctcagtactcagtcccaccactttccccactacccagcaccagcatctagactgttctggtctccctgcaccccccacagccaccagagggagcacttttcaaagtacagttgacccatgaacaacacggtttgaactgaacgcgtccacttatatgtggattttcttctgcctctatcagctgtgagacaccaagatcaatccctcctcttcctcctcctctgctttctcaacacgaagatctttatgacgatctcttcacttccacttaatgaatagaaaatatattttttccaccaggcgcggtggctcacgcctgtgattccagctctttgggaggccagggcaggtggatcacgaggtcaagagatggagaccctcctggccaacatggcgaaaccccgtctctactaaaaatacaaaaattagctgggcgtggtggcacgcgactgtagtcccagctactagggaggctgaggcaggagaatcgcctgaacctagaagttagaggttgcagtgagccgagatcacgtcactgcactccagcctggcaacagagcgagactgcgtctcaaaaaaaacaaaaattcttccttatgattatttttatgtatttatttatttaatttatttacttattttgagacggagtcttgctctatcgcccaggagtgtagtggtgcgatgtcggctcacagcaagctctgcctcctgggttcactccattctcctgcctcagcctcctgagtagctgggactacaggcgcctgccactatgcccggctaattttttgtatttttagtagagacggggtttcaccgtgttagccagaatgatctcgatctcctgacctcatgatccgcctgcctctgcctcccaaagtgctgggattacaggcatgagccacagcgcccggcctatttttatttatttttagaaatcattttatctttttttttttgagatggagtctcactttgtcgcccaggctggagtgcagtggcacaatctcggctcactgcaacctccaactcccgggttcaggcgattctcctgcctccgcctcccgagtggctgggattacaggctcccgtcaccacacctggctaatttttgcatttttagtagagac

SEQ ID NO: 20828 - DNA, 2300 bp, Homo sapien
ctggggaggctgaggcagaagaatggcgtgaacctgggaggcggaggttgcagtgagccgagatcgtgccactgcactccagcctgggagacagcgcaagactctagctcaaacaaacaaacaaacaaaacagcaacaacaacaacaaaaccatcctcccctcccgaggggacagaacagaaacgaatgggcgagtgccgggccaagcagtgggtctccagcaggtggcattaaaataggaattttggctggggacggtggctcacacctgtaatctcagcactttggaaagcccaggcgggcggtcacctgagggcagaaccagcctcgccaacatggtgaaatgccatctctactaaaaataaaaaattagccaggcctggtggtgggtgtctgtaatcccagcaactcgggaggctgaggcaggagaatcgcttgaaccaggggggcagaggttgcaatgagtcaagattgcaccaccgcactccagcctgcgtaacaagagcgtgtaactcttgtctcaaaaataaattaaataaataaataataaaaataaaaaagaatcttcattcatgggaagtcgagaacacatgaaaacaagtaaaggccgaagcgcagtggctcacgcctgtaatcccagcactttgggaggctgaggcgggcggataacctgaggtcggaagttcgagaccagcctgaccaacagggagaaaccccgcctctactaaaaatacaaaattagccgggcatggcggtgcatgccagtagtcccagctactcgggaggctgaggcaggagaatcgcttgaacccggaatgtggaggttgtggtgagctgagatcgggcaattgcactccagcctgggcaacaagagcgaaaccctgtatcaaaaaaaaaaaaaagaaaaaaaaaggaagaaaaggcctaaaggcgccgggcgcggtgggtcacgcctgtaatcccagcactttgggaggccgaggcgggcgaatcacgaggtcaggagatcgagaccaggtgaaaccccgtctctactaaaaatacaaaaaaattagccgggcgtggtggtgggcgcctgtagtcccagctactcgggaggctgaggcaggagaacagcgtgaacccggaaagcggagctggcagtgagctgagatcgcgccactgcactccagcctgggtgacagagcgagactccgtctcaaaaaaaaaaaaaaaaaaaaaaagaaagaaagggcctaaaggctcctcgcggcttccgtattacggaacacacgcacaaaaatggcggcgacctggtttacaggggctaaaaatggtcacgtgataaaccaacttccggtctttcgcccaaagcacgttccctacttcctgtgctcttgcggagacgcgcgcgtcggggtttaacgcgtttctgggccgccgtaagcccggcctaggggcagctttgactcgagagccggctataggcgcatggaaggttccctggaacgggaggcgccagcgggggcgctggccgccgtgctaaagcacagctcgacgttgccgcccgaaagcacccaggtccggggctacgacttcaaccgcggtgtgaattaccgcgcactgctggaggccttcggcaccaccggcttccaagcaaccaacttcgggcgcgctgtacagcaagtcaatgccatggtgaggaccgggcggaatttctagggacgcggaggggcgtggcttgtagaaccaacgcggtactagacgggggcagcgtttccagtggaggggatatgtcttttatttgagttgcccaatagttggaggaaggcgggacctattctgggcgggagtttctgtcctgggaaggggattttgcactctggtagttacatgctggtacggtaacctgaggaggcgaggactgattcttggtgtgggggcgggttctaggtacatttaaagctttctggaatgggcggagcctggggcaagacaaattaagggaggatatgggaggaggagcctaagtctgggcggttcttgaatttagatttgcttttcccagcggggaagggaccggatctgaaaggagatgctctctgattcctaaaagggtgggggctggctgggcgcggtggcgcatgcctataatcccagcattttgggaagccgaggcgggtggatcaagagaagaggagttcgagacaagcctggccaacatggtgaaaccctgtctctactaaaatgcaaaaaattagccgggcatggtgttgcgcgcctgtagtcccagctactcgggaggctgaggcaggagaatc

SEQ ID NO: 20829 - DNA, 2300 bp, Homo sapien
cttgtgagggcacgaaccgggctcactatcccattagacaaaagtggctgaggaaggatgaaactgtgtctaactctgcctggtgaccgaaatcttgtccatgggtgacgcttaagaagtgaccctcggccgggcgcagtggctcacgcctgtaatcctggcactttgggaggccaaggcgggcgggtcacgagttcaggagatcgagaccatcctggctaacacggtgaaaccccatctctactaaaaacagaaaaaattagccgggtgtggtggcgggcacctgtagtcccagttactcgggaggctgaggcaggagaatggcatgaacctgggaggcagagcttgcagtgagccgagattgcgccactgcactccagcctgggcgacagagcgagactctgtctcaaaaaaaaaaaaaaaaaaaaaagtgaccctcataaaaaaattagctgggcacgatggtgcacactagtcggaatgctggggtgggaggatgacctgagtccgggagtcagaggttgcagtgggccgagatcgcgtcacagcactccagcctggcgacagagtgagaccctatcaaaaaatagcagcaggccaggcgcggtggctcatgcctgtaatcccagcactttgggaggctgaggcgggcggatcacgaggtcaggagatcgagactaccctggctaacacggtgaaaccccgtctctactaaaaatacaaaatattagccgggcgtggtggccggcgcctgtagtcccagttactggggaggctgaggcagaagaatggcgtgaacctgggaggcggaggttgcagtgagccgagatcgtgccactgcactccagcctgggagacagcgcaagactctagctcaaacaaacaaacaaacaaaacagcaacaacaacaacaaaaccatcctcccctcccgaggggacagaacagaaacgaatgggcgagtgccgggccaagcagtgggtctccagcaggtggcattaaaataggaattttggctggggacggtggctcacacctgtaatctcagcactttggaaagcccaggcgggcggtcacctgagggcagaaccagcctcgccaacatggtgaaatgccatctctactaaaaataaaaaattagccaggcctggtggtgggtgtctgtaatcccagcaactcgggaggctgaggcaggagaatcgcttgaaccaggggggcagaggttgcaatgagtcaagattgcaccaccgcactccagcctgcgtaacaagagcgtgtaactcttgtctcaaaaataaattaaataaataaataataaaaataaaaaagaatcttcattcatgggaagtcgagaacacatgaaaacaagtaaaggccgaagcgcagtggctcacgcctgtaatcccagcactttgggaggctgaggcgggcggataacctgaggtcggaagttcgagaccagcctgaccaacagggagaaaccccgcctctactaaaaatacaaaattagccgggcatggcggtgcatgccagtagtcccagctactcgggaggctgaggcaggagaatcgcttgaacccggaatgtggaggttgtggtgagctgagatcgggcaattgcactccagcctgggcaacaagagcgaaaccctgtatcaaaaaaaaaaaaaagaaaaaaaaaggaagaaaaggcctaaaggcgccgggcgcggtgggtcacgcctgtaatcccagcactttgggaggccgaggcgggcgaatcacgaggtcaggagatcgagaccaggtgaaaccccgtctctactaaaaatacaaaaaaattagccgggcgtggtggtgggcgcctgtagtcccagctactcgggaggctgaggcaggagaacagcgtgaacccggaaagcggagctggcagtgagctgagatcgcgccactgcactccagcctgggtgacagagcgagactccgtctcaaaaaaaaaaaaaaaaaaaaaaagaaagaaagggcctaaaggctcctcgcggcttccgtattacggaacacacgcacaaaaatggcggcgacctggtttacaggggctaaaaatggtcacgtgataaaccaacttccggtctttcgcccaaagcacgttccctacttcctgtgctcttgcggagacgcgcgcgtcggggtttaacgcgtttctgggccgccgtaagcccggcctaggggcagctttgactcgagagccggctataggcgcatggaaggttccctggaacgggaggcgccagcgggggcgctggccgccgtgctaaagcacagct

SEQ ID NO: 20830 - DNA, 2300 bp, Homo sapien
ctaatcaggaggctgagttgagaggatcacttgagcccaggagtttgaagttacagtgagctatgattgtaccactgcactccagcctggacgacagagcgagaacctgggcttaaaaaaagaaaagaaggccaggcacgatggctcacacctgtaatcccagcactttgggaggccgaagcaggtggatcacttgaggtcaggagttcgagaccagcctggccaacatggtgaaaccccttctctactaaaaatacaaaaattagccaggtgtggccgggcgcagtggctcatgcctgtaatcccagcactttgggaggctgaggcaagtggatcacctgagatcaggagttcaagaccagcctgaccaacatggtgaaacctcatctctactaaaaatacaaaaaattagccgagcatggtggcacatgcctgtaatcccagctactcgagaggctgaggcagaagaatcgcttgaacccagaaggcggaggttgcagtgagccgaaatcacgctattgcactctagcctgggcaacaagagcgaaataccatctcaaaaaaaaaaaaaaaaaaaaaattagccgggtgtggtagcatacgcctgtaatcccagctactcaggaggctgaggcaggagaatcacttgagcccgggaggtggaggttgaaagtgagctgagatcgcaccactgcactccaacatgggtgatagagcaagactctctctcaaaaaaaaaaaaaaaaaaaaaaaaaagaacgaaggcattggagatttgagcctgagcagtggcgacaacaggaggagaggcaaggctgcatgttggagatggcagaggctgacaaagcagatgtgttgggaacagttagcaggagatccagcaggccagggggaggccagggcctcctcactcccccagccaaggcacctagcccacagggacccaggtgacacatgacaccagaggagccacagggcctcctggggcagggaccccctcagccgaggcagcagctgctgctgcagctggtgacatttcactccatgagagccctggcttcaaagtctttgcaggggtagccgagggagaaaagggggttgaagaggacaggctgggttggggagggagccacagcagggtggccaccagaggaccaggcagccagaggtgacttgggccggagcccttagccgaggtgtgtgggcctgatgggtccaggagcagccaccctcatcctgcagcccccaaggaacatagaaggaggtgtgggaaccctcgggcagccctaggctccccctaggggactgaggttgggcctgctgcccacggcctgcccactttacccagatgtccagcaaggtggccatcaacagtgacattgggcaggccctctgggcagtggagcagctccagatggaggcaggcatcgaccaagtgaaggtgagggtcggggccagtgcaggaggcgggaagaggtgggaacacatgggccaggggacaggtgcatgcctgggtctggtctggctgaaccagttggtctgcaggtgtccaaagatggccgccgatctgctgaagttctgcacggagcaggccaagaatgaccccttccttgtgggcatcccggccgccaccaactccttcaaggagaagaagccctatgccatcctatgaacccagggcaatgccaccctgtggcctgggcaaaccagggggcctcaataaacatgaagtgaatacttctcagggcatggctgagctgggctgagatgggagaccagagggactttgggcttgcaggggccaggtgcgtacctggcccagcctccctccctgcctgcccccggggtcacagccacagcagcacacacacaccctggagccccagacggagagcacgccatccctcttgccctcgccagcacccatgggatagcctgagcaggtaccctttcccaccgtgcagacaaatggccaggatttgagtcataatctatacaccacacgcgtcacacatcacacacacacgtgacatcatagacacagatgcccacgatcctcaggactctccctcttcaaatgcacagcaacagctgacatgcacccccagcccagacttgctatctctcccagtcactcccatgcaggcccgcagccccacagccccaagcaggcacaggcagaaccccagcaggcaaaccacactcacactccaggcccaagcaccaacatgtcaggtttatttctccttcgctctcaactgagagcggggcatccaaatcataacaaaaccagggcccaa

SEQ ID NO: 20831 - DNA, 2300 bp, Homo sapien
ggcgcaatcatggctcagtgcaacctcaacctccctggctcaaccagtcctcccacctcagccacccaagtagctgggactacaggtgcatgccaccatgctggctaatttttgtattttttgtagagggggttttcgctatgttgctgaggctggtcttgaactcctgggctcaagcaatccacctactttagcctcccaaagtgctgggattacaggtgtgggccaccgcccccagccaaaataaaatcttactgcaaccttggtgtggcccaaagaccaacgtgggaaaatttaaaaatactgacacacatccaatattcaacaaataagtcctgcattctagtgagaggatagagtataaaaagtggaactgtgctaagtcctatagagaaaaacaggaaggcagagagaatggtgggggaaacggttgaaatcttatgtagggtgacctgcaaaggccacactgagaagacgatgtttgaacagagccatggagagaagagtgtcaagtagagcaaacagcaaggactgcgcagatgacctacgtggattggttagctgcctggctcaaaagaggcttgcagtaaatacctgcagtttttttgtttgagacggagttttgctcttgttgcccaagctggagtgcaatgatgccatctcggctcactgcaacctccgcctcccaggctcaagtgattctcctgcctcagcctctgagcagctgagattacaggtgcctgccaccacacccggccaattctttgtatttttagtaggaaggggtttcaccttgttggccaggctggtcttgaactcctgacctcaagtgattaacccaccttgcctctcgaagtggtgggattacaggcctgagccaccgcacccggccaacatgctgttttagtaagtgtgatgttaggccgggcgcagtggctcacgcctgtcatcccatcacttcgggaggctgaggcgggcggatcacgaggtcaggagtttgagaccagcctggccaacatagtgcgaccccgtctctactgaaaaatacaaaaattagccaggagtggtggcgcgtgcctgtattcccagctactctagaggctgaggcaggagaatcgcttgaacccgggaggcggaggttgcagccagccgagatcgcgccactgcacaccagcctgggtgacagagtgagactccgtctcagaaaaaagaaaaaggtagctttccaccaggcgcgatggttcacgcctgtaatcctggtactttgggagaccaagttgggggcggatggcttgagctcaggagttccagaccagcctggacaacgtagtgaaaccctgtctttacaaaagaatacaaaaattagccgggtgtggtggtgcgcgcctgtagtcccagctacctggggggccgaggtggaggatcacttgagtccagaaagcggaggttgcaatgagccaagcactccgcttggaggactgaactgctgtcctccaaggttgggttggggaatggggtctggagaggtagttctgaggccccagttcctttctcaaaaaaaaaaaaaaaaaaaaaaaaagtcacttaactgatgcctctgcagtgtaactgcatatttctggctctgggaaaagaggcaagagttccaatctctactccttgaactcggaaaggggcctttgggtttctaagctcagtgtcacatataacagatgccttcgttaaagcagtgtttattttatgtctaatttaaagagacagggtctcactatgttgcgcaggttggagtacagtggcacaaccatggctcactgcagtctcgaactcctggactcaagggatcctaccccttcaccttcctgagtatctggaactacaggcgcgcgccaccccgcctggcttgagtttcgtttttagctagagttggctggctctcggtatcggctagtttaaaaagcgcagaaacaggaacctgcattttccagcctaaggccgacgcagttgcaagagaccctgtaagcggggcgatgttctgtattaagccagtgtctgacttcgtcgcttccggtgggcgcataaacgtcatcagacagcgccggaagtgccctcgtgctgcctaggagacaagacgcgaggccggcagcgcccacccggtcgcaatggagcttcccctagggcggtgcgatgattcccgcacctgggacgatgactcggacccagagtcagagacagacccagacgcgcaggccaaggcctacgtggcccgcgttctcagtccgccaaaatccgggctggcgttc

SEQ ID NO: 20832 - DNA, 2300 bp, Homo sapien
ggattgcttgcctctctccaaatcatttttttcttttttattttgagacaaggttttgctctgtcatccacgctggagtggagtgtcaaaatcatggctcactgcagccttgacctcccagctgaagcaatcctcctacctcagcctcccaagtagctgggattacaggcacatcccaccacacctagctaatcttttctaagttttagtagagatgaggtcttgctaagttgctctggctggtctcggatccctggcctcaagcagtcctcctgtcttggtctcctaaagtgttgagattacaggtgcgagccactgtacccagcccccagatcattattattattattttgaaatttctgtttttgagacggagtctcactctgctgcccaggctggagggcagtggcacaatctcggctcactgcaacctccgcccctcgggttcaagcgattctcttgcctcagcttcctgaccttgtgttctgcccactttggcctcccaaagtgctaggattacaggcgtgagtcaccacgcccagcatattgtatgtttatttatttatttatttatttatttatttatttatcattcattagaggtgaggtctcactatattgtcccaattggtctcaaacttatgggctcaggcaatcctcctgcattggtctcccaaagtgctataatgacaggtgtgagcccctgtgcccggccccaaattattgataacagtctagggctgggcagacggctcctggggagtgatgagacctagatgagcaggtgatgaaggctctgtcacttacaactctgggctgcagctgaggggctggctgcctagtctgtttgctcccctactctggctagtctctgccctatctcaggaaagtggccaggaataggaccgcatgtccctgccttaatgttgtgctagggaccaggcactgtaccaagattttcagtgtattcaggggtctataatccactgagtggccaggcctgggtcaagagctttcctgcaggctgagtgccatggctcacgcctataatcctagcactttgggaggctgaggcaggaggattgcatgagcccaggagcatgaggctgtggtgagctgtgatcgcaccagtgcactccagcctgggtgatagggttacgtagggaccagccccacagggtcggtgggtctcttcctgtgtgcggcgatgagagagtgtagaaataaagacacaagacaaagagataatagaaaaggcagctgggcccgggggaccactaccaccaatgcgcggagaccggtagtgaccccaaatgtctggctgcgctgttatttattgcatacaaggcagaaggggcagggtaaagaatgtgagtcacctccaatgataggtaaggtcacatgggtcacgtgtccactggacagggggcccttccctgcctggcagccgaggcagagagggagagtagacaaagagaaagacagcgtatgccattatttctgcatatcagggactattagtattttcactaatttactactgctatctggaaggcagagccaggtgtacaggatggaacatgaaggcagactaggagtgtgaccactgaagcacagcatctcagggagacggttaggcctccggataactgcgggcaaacctgactgatgtcaggccctccacaagaggtggaggagcagagtcttctctaaactcccccggggaaagggagactcccccactttcctggtctgctaagtagcgggtgttgttccttgacaccttttgctaccgctggaccatgatccgcctggtaacgggcgtcttcccagatgctggcgtcaccgctagaccaaggagccctctggtggccctgtccgggcataacagaaggctcgcactcttgtcttctggtcacacctcactatgtcccctcagctcctatctctgtatggcctggtttttcctaggctatgattatagagcgaggattatcataatattggaataaaaagtaattgctacaaactaatgattaatgatattcatatataatcatatctaagatctatatctggtataactattcttgttttatattttattatactggaacagctcgtgtcctctgtctcttgcctcggtgcctgggtggcttgccgcccacagggttagaccctgcttcttaagaaaaaaaaaaaaaaacctttctctggaggcaggagtggtatcatttatatcctaatcatagcggcagagactagattccgataattccccagagggaaatggatcaatt

SEQ ID NO: 20833 - DNA, 2300 bp, Homo sapien
ccacacatgcagcaggggctactttgttctgccccaaggcttgcggagggccgctgaaaatttgccatattatatgaagggggtgaaccttaacaaattgtctcctgcatcccaaactcgctccccatctgatctttatctggggcagcccccaaatttgaccagaaagctcttatcgttcacactcgctccaggaacccccaaatccagccccagctccccagtctcactcttctgctccccatgcacctcggttggtctagagaccctcctgccaatttgagtctcagccaaaaccccaaagcgcggcgaccctggcgcatggcaggacgggatttgtagttccagggcttatcggagggtgggggagagggaggcctttacgcatgccttggtggcggctttctgcacgtgtttctcagcccaggtttcagtccagcggaactggctacctcggaatcccaactgctcctttagggtgtcttccgcgattctccgagtggagttaggcgcctgccgacacttccctaaccttggaggcccgggacttgattttcatgaatgaacggagccgggactgactttgcctacggcaagtgggttgagatagctgttcccctccttcaggcaggggcaaaaattgacctctgcctctctcgagggtcaaaaagttcctcagggcagggtgggttgttctttgggattagagctggtgaattcattaaatatcggcttagggaggggctgaatacagtaaaagaacagccttgagccttggagggtaaagccacgtttttaaggaacaattcagagctggccaggtcatgcttaacttggatgatctctaatcgcgcgaactgctcttatacccatttgacaagtggggaaactgaggcttcaagtggcaggaggtctcccactttgttatcggcagggcagggaggggaaaccaagacgctacagggtctccagctttttaccatctgctcctctctcaagagaaggaaaaacggtgccctactgtcttcagacgtcgcaaggatcaagaagatttctttcttcatgaccctgcccttgccagaatttcctgcgctgttccacctcattcaacttcaggtagggaaagggattaggcgtggttcaaagtttattttattagttcatttcgttttattcaaaaatttatatccttgtggctttttcatctccttgtaaaaactatcaaacagtactggaaaataatgcaaaaagtggcagaggcttctgtaggaacccggcttgtctcaggcacttactttgtcctgctttctttcctttgtctctggggtataaagagcacgctcagctctttccttgcgcacacacagcgtactcctcccaagtacctctggatgggggaagggaggcacatttcaatttttagtggaggaaggtgacaaggagggtgctggctctggccgaggggttcctggatccatcacacacaaagtccccacgcgctaccaaactcctggctccagctaaagagcttgcggtcaggtcagtgaaagatgctgggaaaacgagacactgggaggaccggctggctagagaggccaaagaaacggcaactctttggtcacgtgaccggaccttgtctcagcccgggtttcccaagtgccagggcacgtgtgaaggttgaaccttccgattggctcggcgggaccagtttgaacggagtacgggagccgcggcggctcacctacggccgcgtttttcttttttttttttctttctttcttttttttttttttttttttttttaattctctctctttggctccctccttccgcgcgagtctctggagaagccgcagcgcgagttgccgccgctgctgcccggggccgggtaagtgggcctcactcagagcccgaccctcttggccccggcttgcgtcgacccccgccgggcaccgagcctgcgccgcgcgcggcccgggcgtcggggccgcgcccgaccgggaaaggccgggaagccggttgggcccgatcctcctggcagctagaacgggccgggcgggggaggggggaaccgagcagagcttagggggtggggcctcggagccaggccatgtcggggctcctcaagaagagggccagtgggactgctggggtcgggctggaggggatctgattgggggaagcgtctggggactgcttggggcctgattgggggacgtcgcgaggatcgggtgtgtgtaggggcctgtttcggtggggcttggttgggtctgattgggggaggccgcactgaaaagttg

SEQ ID NO: 20834 - DNA, 2300 bp, Homo sapien
cgggcgtggtggcgcatgcctgtaatcccagctactcgggaggctgaggcaggagaatcgcttgaacccgggaggcggaggttacaatgagctgagatcgcgccactgcacttcagccttgtaacagagcgagactccgtctcaaaaacaaaacaaaacaaaacaaagaaatagaaaaacaaaaacaacaaaacaacaaaaacccaaaaccttgtcctgattcaacactcaaattcaccagctggagaggaagaaaaaattccgtgaccacacaagggccaacaatgtggaccacacatgcagcaggggctactttgttctgccccaaggcttgcggagggccgctgaaaatttgccatattatatgaagggggtgaaccttaacaaattgtctcctgcatcccaaactcgctccccatctgatctttatctggggcagcccccaaatttgaccagaaagctcttatcgttcacactcgctccaggaacccccaaatccagccccagctccccagtctcactcttctgctccccatgcacctcggttggtctagagaccctcctgccaatttgagtctcagccaaaaccccaaagcgcggcgaccctggcgcatggcaggacgggatttgtagttccagggcttatcggagggtgggggagagggaggcctttacgcatgccttggtggcggctttctgcacgtgtttctcagcccaggtttcagtccagcggaactggctacctcggaatcccaactgctcctttagggtgtcttccgcgattctccgagtggagttaggcgcctgccgacacttccctaaccttggaggcccgggacttgattttcatgaatgaacggagccgggactgactttgcctacggcaagtgggttgagatagctgttcccctccttcaggcaggggcaaaaattgacctctgcctctctcgagggtcaaaaagttcctcagggcagggtgggttgttctttgggattagagctggtgaattcattaaatatcggcttagggaggggctgaatacagtaaaagaacagccttgagccttggagggtaaagccacgtttttaaggaacaattcagagctggccaggtcatgcttaacttggatgatctctaatcgcgcgaactgctcttatacccatttgacaagtggggaaactgaggcttcaagtggcaggaggtctcccactttgttatcggcagggcagggaggggaaaccaagacgctacagggtctccagctttttaccatctgctcctctctcaagagaaggaaaaacggtgccctactgtcttcagacgtcgcaaggatcaagaagatttctttcttcatgaccctgcccttgccagaatttcctgcgctgttccacctcattcaacttcaggtagggaaagggattaggcgtggttcaaagtttattttattagttcatttcgttttattcaaaaatttatatccttgtggctttttcatctccttgtaaaaactatcaaacagtactggaaaataatgcaaaaagtggcagaggcttctgtaggaacccggcttgtctcaggcacttactttgtcctgctttctttcctttgtctctggggtataaagagcacgctcagctctttccttgcgcacacacagcgtactcctcccaagtacctctggatgggggaagggaggcacatttcaatttttagtggaggaaggtgacaaggagggtgctggctctggccgaggggttcctggatccatcacacacaaagtccccacgcgctaccaaactcctggctccagctaaagagcttgcggtcaggtcagtgaaagatgctgggaaaacgagacactgggaggaccggctggctagagaggccaaagaaacggcaactctttggtcacgtgaccggaccttgtctcagcccgggtttcccaagtgccagggcacgtgtgaaggttgaaccttccgattggctcggcgggaccagtttgaacggagtacgggagccgcggcggctcacctacggccgcgtttttcttttttttttttctttctttcttttttttttttttttttttttttaattctctctctttggctccctccttccgcgcgagtctctggagaagccgcagcgcgagttgccgccgctgctgcccggggccgggtaagtgggcctcactcagagcccgaccctcttggccccggcttgcgtcgacccccgccgggcaccgagcctgcgccgcgcgcggcccgggcgtcggggccgcgcccgaccgggaaaggcc

SEQ ID NO: 20835 - DNA, 2300 bp, Homo sapien
tgatcttggctcactgcaacctccgcctcccgtgttcaagcgattctcctgcctcagcctcctgagtagctgggattataagcgcaggccaccactcctggctaatttttttgtatttttagtagagacagggtttcactgtgttagccagaagatggtctcaatctcctgacctcgtgatctgccctcggcctcccaaagtgctgagattacaggcatgagccaccacatccggtattaatgagataacatttggaaaccacttgacatgcagtaggtgcttaagaaataggaaaaaaggccaggcatggtggctcatgcctgtaataccagcacttggggaggccaaggcaggtggatcacctgaggtcgggaattcgagaccagcctgaccaacatggagaaacccggtctctactaaaaatacaaaattagcagggcgtggtagcacatgcctgtaatcccagctactcgcgaggctgaggcaggagaatcacttgaacccgggaggcagaggttgtggtgagccgaaattgcaccattgcactccagcctgggcaacaagagcaaaactccacctcaaaataaaaaaaaaaaaaaaaaaggaaaaaaggccaggcacggtggctcacacctgtaatcccagcactttttgggaggccaaggcgggcagatcacaaggtcaggagttcaagatcagcctcgccaatatggtgaaaccctgtttctactaaaaatacaaaaattagctgggtgtggtggcgggtgcctgtagtcccaggtactcgggaggctgaggcagaatagcttgaatcccggaggcggaggttgcaatgagctgagatcccaccattgcactccagcctgggcgacagggcaagacagtgtctcaaaaaaaaaaaaaaaaaaaaaaaaaaaaaaaaaaaaagaaagaaagaaagaaataggaaaactgggccgggcacagtaatcccagcactttgggaggtcgaggcaggtggatcacctgaggtcaggagttcaagaccagcctggccaacatggcaaaaccccatctctattaaaaatgcaaaaaattagcctggcgtggtggcaggcgcctgtaattccagctactcggaaggctgaggcaggagaatcgcttgaatccgggggcggaggttgcagtgagccgagattgagccattgcacttcagccgggacaatgagagcaagacaccatctcaaaaaacaaaaaaacaaaaaaagccaggcgcggtggctcacgcctgtaatcccaacactttgggaggccaaggcaggcagatcatgaggtcaagaaatcaagaccatcctggtcaacattgtgaaaccccatctctattaaaaaaaattagccgggcgtggtggcgcatgcctgtaatcccagctactcgggaggctgaggcaggagaatcgcttgaacccgggaggcggaggttacaatgagctgagatcgcgccactgcacttcagccttgtaacagagcgagactccgtctcaaaaacaaaacaaaacaaaacaaagaaatagaaaaacaaaaacaacaaaacaacaaaaacccaaaaccttgtcctgattcaacactcaaattcaccagctggagaggaagaaaaaattccgtgaccacacaagggccaacaatgtggaccacacatgcagcaggggctactttgttctgccccaaggcttgcggagggccgctgaaaatttgccatattatatgaagggggtgaaccttaacaaattgtctcctgcatcccaaactcgctccccatctgatctttatctggggcagcccccaaatttgaccagaaagctcttatcgttcacactcgctccaggaacccccaaatccagccccagctccccagtctcactcttctgctccccatgcacctcggttggtctagagaccctcctgccaatttgagtctcagccaaaaccccaaagcgcggcgaccctggcgcatggcaggacgggatttgtagttccagggcttatcggagggtgggggagagggaggcctttacgcatgccttggtggcggctttctgcacgtgtttctcagcccaggtttcagtccagcggaactggctacctcggaatcccaactgctcctttagggtgtcttccgcgattctccgagtggagttaggcgcctgccgacacttccctaaccttggaggcccgggacttgattttcatgaatgaacggagccgggactgactttgcctacggcaagtgggttgagatagctgttcccctccttcaggcagg

SEQ ID NO: 20836 - DNA, 2300 bp, Homo sapien
gtacgccctgatctcccatgcctagcagacaccattcctgcaattgcgctccgtttcgtagaaggaattcctaaaagtctccttgtatttcaagagaagactccagtataccatatttcatgtttgaacctctgtcttagagcaggaacagaagctgggttccaggcccttgatggagaccccagcccatgacactcttaactttagagggagactacagactagaaataaccccgacttcatctgaatactacagctcataaaataagctgattctcgggccgggcgcggtggctcacgcctgtaatcctaccactttgggaggttgaggcgggtggatcacctgaggtcaagagttcgggaccagcctggccaagatggtgaaaacctgtctctactaaaaatacaaaaattagccgggcgtggtggcacgcgcctgtaatcccagctacttaggaggctgaagcaggagaatcgcttgaacccggagggcagaggttgcagcgagccgagattgcgccacttcactccactccagcctgggtgaaagagtgaaactccgtctctaaataaataaataaaataggctgggcgcgttggctcacgcctgtaatcccagcactttgggaggccgaggcaggcagatcacgaggtcaggaatcgagaccaggttgaggcagaagaatcgcttgaactcgggaggcggaggttgcagtgagccgagatcacgccactgcactccagcctgggcgacagagagagactccgtctcaaaaaataaaataaaacaaaataaaataaagtaataataacaataataaaataaaaaagtaagctgattctcagacggggacttcagctccacagagccagctatgtccccaacaaatgtgagctttatcccagagatggttacccaacccaaagatacccctatttctacttggggggcccagactagacatgctctctattccccagttagggattcaagttcccaggtgtcagctgagcacacagccccagatgaggtccttccactcatagagattattcttggtgtcgtcagacggggattctagccctggaaagcgaatctgttcctagccccaagtgaaaccaactccagagagcaagctacagccccagtctcagacgacagtctcattctccgggagcccctgtatggggaactccagcctgagtactgctgaattttgaaaacccgagaggcagggctcggtggctcacgcctgtaatcccagcactttgggaggctgaggtaagaggactgctggagcctaggagtttgagaacagcctgggcaacatgacaaaaccccgtctccacaaatataaataaataaataaatgaataaataaaattagccaggcgtagtggcgcatgcctgtgtttccagctactcgggaggctgtggtgggaggatcgcctcagccctgagaggtcgaggctgaagtgagccctgatcatgcctttgcactccagcctcggagacggagtgtgactctgtctccaaaacaagacaaaaaaccaaaaaccaaaacagcaagactgggcccgatggctcacgcctgtaatcccaacactttgggaggggaggccaaggcaggaggatcgcttgaggccaggagttcgagaccagcctgggcaatatagccaggcgcccgtctctaatttttaaaaaacaaggccaggcgcggtggctcatgcctgtaatcccagcagtttgggaggccgaggcgggcggatcacctgaggtcgggagattaccagcctgaccaacatggagaaatcccgtctctactaaaaatacaaaattagctgggcgtggtggcgcatgtctgtaatcccagctactcgggaggctgaggcaggagaatcgcttgaacctgggaggtggaggttgtggtgagccgagatcgcgccactgcactccagcctgggaaacaagagggaaactccgtctgaaaaaaaaagaaaaaaaaaaaacgaaacaaaaaaacccgcgagacgggggctcctccccctagccccgccccttcgggttggttccctcattcgccccgcccccgctgcgggcgctggagggcctgaccgctcttcccggcatgcattgttcgggacgaggcgagtcgggcgccaagcgcggggccggagcggccttcccggagtcctttgcgcggcacctggcgacaaaatggctgcccgagggagacgggcggagcctcagggccgggaggctccgggccccgcgggcggtggcggtggcgggagccgtt

SEQ ID NO: 20837 - DNA, 2300 bp, Homo sapien
gggctcacttcagcctcgacctctcagggctgaggcgatcctcccaccacagcctcccgagtagctggaaacacaggcatgcgccactacgcctggctaattttatttattcatttatttatttatttatatttgtggagacggggttttgtcatgttgcccaggctgttctcaaactcctaggctccagcagtcctcttacctcagcctcccaaagtgctgggattacaggcgtgagccaccgagccctgcctctcgggttttcaaaattcagcagtactcaggctggagttccccatacaggggctcccggagaatgagactgtcgtctgagactggggctgtagcttgctctctggagttggtttcacttggggctaggaacagattcgctttccagggctagaatccccgtctgacgacaccaagaataatctctatgagtggaaggacctcatctggggctgtgtgctcagctgacacctgggaacttgaatccctaactggggaatagagagcatgtctagtctgggccccccaagtagaaataggggtatctttgggttgggtaaccatctctgggataaagctcacatttgttggggacatagctggctctgtggagctgaagtccccgtctgagaatcagcttacttttttattttattattgttattattactttattttattttgttttattttattttttgagacggagtctctctctgtcgcccaggctggagtgcagtggcgtgatctcggctcactgcaacctccgcctcccgagttcaagcgattcttctgcctcaacctggtctcgattcctgacctcgtgatctgcctgcctcggcctcccaaagtgctgggattacaggcgtgagccaacgcgcccagcctattttatttatttatttagagacggagtttcactctttcacccaggctggagtggagtgaagtggcgcaatctcggctcgctgcaacctctgccctccgggttcaagcgattctcctgcttcagcctcctaagtagctgggattacaggcgcgtgccaccacgcccggctaatttttgtatttttagtagagacaggttttcaccatcttggccaggctggtcccgaactcttgacctcaggtgatccacccgcctcaacctcccaaagtggtaggattacaggcgtgagccaccgcgcccggcccgagaatcagcttattttatgagctgtagtattcagatgaagtcggggttatttctagtctgtagtctccctctaaagttaagagtgtcatgggctggggtctccatcaagggcctggaacccagcttctgttcctgctctaagacagaggttcaaacatgaaatatggtatactggagtcttctcttgaaatacaaggagacttttaggaattccttctacgaaacggagcgcaattgcaggaatggtgtctgctaggcatgggagatcagggcgtacaggacaagactctgtggactcgcccactctaagccactatcagcccggggacctatcgccaaccgagtcaattcgtctatgattggtttgcggcaagagccaagaggctcacagcctattgaataacagagggggcggacctgaggtgaggttgggacctaccgtgaagaatagagggaaaatgatggacataaagttgagcctatggagtcaggccaaggaggaccgggaatctaacttcaccgaaagggcatggactgggtgtttggctggttgctaaggtgaggttggcgctaccggaacataagagtgattggtgtaagtaagaaaagacatagccaatgaaaggagagctgcaagacctagggcccaatcagtgaaagggagtagcctagaccgtaccgatgtgttcattaggtagggggaacccttggaaaattatagaccagaggttgacaaagtgaaccctggaagcaaagaatagtgaaaatataatttatatttctcctaaaaggcaagtaatgaggaaattaactcatgctcctagcttcgctaggaatgtgatagagaatttcccctgtaggttcttcgtatggtgcgctccgctggatcacgtgagccagttccaaaatggcggcaggggtggccgggtggggggttgaggcagaggagttcgaagatgctcctgatgtggagccgctggagcctacacttagcaacatcatcgagcagcgcagcctgaagtggatcttcgtcgggggcaagggtggtgtgggcaagaccacctgcaggtaaggaggctgcggcgggggccag

SEQ ID NO: 20838 - DNA, 2300 bp, Homo sapien
gcccctcccacaccaatctgtgtgttaatgttcttcaggctgggcaatggagggggagtgggtactgtttgtaccaggctgggagtgtcccctttagaggtgtgtctgtgaagaatgaacatctgcccagaatccatgccaaatgcaggacaaggttttgtgtccccaagcttgtgtgttcatggcaatgctgagagtatctgagacctgtgggtgtgggtgtgggcctgccgccgggagggagcgttggaaagggggttgccttcacatattggtgtacaaatgctggtgaatttcaccagcggtgatagctaggggacccttgagggaggggtggctgttgtgtgtgtctttgcaagattggtgaacctcaggccccgctctgagcctgggattgtgtgccaccgcactgaggaaagggtttttgcatttggtgtgtgatcatggctgcatctttgcacagggaagatcgggagtaaaacctccttgcagtggagtatgactgtgtgtgtgaaggcattctgaggtctgggtggggtctggcacttggctggttgtgtgggtgtctttgttacatggcgtgatcatgacggaattcagaccgttgggagagccgtgtgtatgaaagaggagagcctagtatgtcagggtccacctgccttatatatgcgtgatggaggcaggaggggtcgaggtaggtgtgtcttgtgtgaccctggaaggttctgtgacagtgtgtactgctcctctgggtaaccatagttatgtgaggctgtctttttgttttttcaatagagatggggatctccctatgttgcccaggctggtctcgaactcctggctcaagtgatcctcccacctaagcctcccaaagtgctaaaattacaagtgtgagccatcgtgcctggctgaggctgtcttaagagcagctagatttgcttctgggactatgatgtgtgtttctgcgtgcatctctgtgacactgtgtgattacaggtgactgtgaagtgacccagcctcactgagcagtgtgtgtgtttctgggactgggaaaaagaccatccctgcctcctcccccaacctctgggttccagatccctaggacctgccagtgagcgactgggaggggaacagggaggggcgagggaggacaaggcggatttctccccccgtaccaggtaacaaacttgtgggactccaaacaaaattctgaagctacagcctagccgagggaggaggaccaggaaagggaggcacgcccactccccagccccacccaacgccaaagccacccgcccattccatccctgtccctgtgggtccttgcaccggccaccttcaacacaggtgagatgagcccaggcttggggaaatagggggccctgagggaagagggaacctgcgggcaggaatgcatccggagtcctcccggggcggggagtggagggcttggaaggctggaggggaacggagagaggaaaggtcaaggcggatccgggaggaaaagggagtggggggagccagggcaattaagcagaaggtgcacaggctggggcaggggggctaggggacctggaggcttagggacagggcttcagagggagtgcagggagcagaatgggtcaagactgggagctggggaagtggagaagggggagccagaaataggggctgagggagagaatttgggagaggtggagccttgagaacctagaaactcaggtgctggggacttgcggaatggggcatgctacaggtggcctctgggtgaaggggatcgggcagagggtgactcgggagctgactgcagggactcaagggtcttggtggtgggggacggcagttaccagagcccacggccaggagtccagggaaggggacagcctgagatgaaggtcagggaggggcactgggggctggactagactgagtaaagctgggaggagaaggcaactcaggcaagggtcaggactgaaggggtggcgggccggaacatgggtggaatccctgtgctcagttatccccgcacctctccacccacacccgcagcccccacccgggccacccactctcccttggccacacctgccgggtgccacgatgaccgtcacctacacagcccgagtggcgaacgcccgcttcggtggcttctcccagctgctgctactgtggcgtgggagcatctacaaactcctgtggcgagagctgctctgcttccttgggttctacatggcgctgagtgctgcctaccggtgaggctgccctgaggtgctcatgttctagcggagggggggcagcta

SEQ ID NO: 20839 - DNA, 2300 bp, Homo sapien
ggaatatcgtggaagacggatccaggctgggcaagggtgcctatccatcagccaggacatgtgtgtctaactgacctcttctcgacctaggaccatacccgtgtccccttatctactgctggagtcaataatgcagggaggatccattcatttatttatttcttgaaacagggtctcccccctgacgtccaggctggagtgcagtggcgcgaccacggctcactgcagcgttgacctcccggactcaagcgatcctcccacctcagcctctggagtagctgggaataggcgcgtgccaccacgcccagctacttttattttttattttatttttgtagagacggagtctcgctgtgttgccagggctgttctcgaactcctgggttcaagcagtcctccctcctcgacctcccaaagtgctgggattacagatgtgaaccatcgcgccaggcattttattttattttattttattttatttattttttttgagacagtctcactctgtcgcccaggctggagtgcagtggcgcgatctcggctcactgcaacctccgcctcttgggttcaagctattctcctgcctcaacctcccgagtagctgggactacaggcgcgtgccaccatgcccggctaattttttgtatttttagtagagaaggggtttcaccgtgttagccaggatggtctcgatctcctgacctcgtgatccgcctgcctaggcctcccaaagtgctgggatacagacgtgagccgccgcgcccggccctatttttaaatttttactgtttttttttgagacagagtcttgctctgtcacccagactggagtgtagtggccctatcacggctcactgcagtctcgacctcctgggctcaagctatcctcccacctcagcctctgtagagctaggagctaggaccacagaaacacgccaacatgtctggctaatttttttttttttttttttgaggagtcttgcactgttgccccctggagtgcagtggtacgatctcggctgactgcaacctccgcctccagggttcaagcgattctcctgcctcagcctcccgagtagctgaaatcaggcgtgcgccaccacgcccagctaatttttagtatttttagtagagacggggtttcaccatgttggccaggctggtctcgaacacctgacctcgtgatccgcccgcctcggcctcccaaagtgctgggattacaggcgtgagccaccgctacctgggtaatttttaaattttttgaagagaggctggtctccaacttctatccaaattaattctccctcctaggcctcccaaaatactgggattacagtcgagagccaccgcgtccggcgggaaaacccctttagcatcccctctcccagtccatagaaagtgccagggctcgcccctccccgcacaacggctccgattataaagtggttagacacaagaatttacttaaggccgggcgcggtggctcacgcctgtaatcccagcactttgggaggccgaggcgggcggatcacgaggtcaggagatcgagaccatcctggctaacacggtgaaaccccgtctctactaaaaatacaaaaaattagccgggcgaggtggcgggcgcctgtagtcccagctactcgggaggctgaggcaggagaatggcgtgaaccccagggggcggagcctgcagtgagccgagattgcgccactgcactccagcctgggcgacagcgagactccgtctcaaaaaaaaaaaaaaaaaaaaaaagaatttacttaagttgcagggaaaagacgtgaatgcgcttgtgtaacagggtggagcacctccgtctcaaaaggatcttgaggacctcccaccccaaaaagggccagggcgaggatgggaggtgggaccaccctcggatgcacaaggctgggccaggctgacccctagcggcagggcgggcgcccgaacggtgcccggatccaagatggcggggctggaggcaagagcgggcgtagggaggagattacgttccgaggcggagcctgggcttgggggcggggcggggcctgcgcctaggggggcggggcggggcggcgctctaggccgagcgggaggtcggggctgcgggcgctcgctggtggcggacccggaggctgctgcggcgccggggctccgtggcctggattgaatccgatcgggagccatgagcgtggacaaagctgagctatgcgggtctctgctcacctgggtaggtcgtggggcggggctaggggaaggtgagcgcccgctcctcttgcccgggatccct

SEQ ID NO: 20840 - DNA, 2300 bp, Homo sapien
ccccttagattttcaggtcttctctgactcggggagggaagctctcagatgacagagctactctagggaaggaggggggctccctctaggtattctggatgatagtaggatgggacctgcagactaaaacgagagtggggcccctgactcacatgagtgagtggggggtgttggggacggagctccagatctcctggcagaagggaagggcaccccacccgagggaggaggcagccgccgttccagcccgcccaggcgccgggggcgcctcgaggcatcggcccgccctctccgcgccccgtcgggccgggggcgaagtccgacccaggcccgcgggcaggcggggacctgccgggctgggttgggccaggccgggcctggcaggacgcagccccaaagcggcggggtggggcggggccgggccaggcggccgtgggggccccgggggcggcggtcggggctggtcgggactagcagtctgggggcccaggcgcgccctgggacctggcagatagtcgggttccccgcttctggctcggggccccaggacagcgctggtcccacctcttcctgtgccctaatatgggcggcggggagagacttcgggggccggcccgcgctcagtcctgcccgcggactcccgcctgttgccatggcgaccaggccccgctcctcggctgcgtcccccgccgtcgggccaatggaacactccccaagccgcctgcctccgcggtcccctgcaggcaccgcgggcggaaccattgcttgaggggagaggatggtggctggaggctgccgcggctgggcgggctccaagcacccgggcctccgcgggggctcgcacgcccaggttcctcttccgaggcgcaggatgcggcgggacccagggcggggcgcacggtcccgtaggatccgagtgacggagacagggccgggctccttcccccggggctgttgccacacttcctgcctctgcgctctttccccagcctgtttctaaggaagggagtggggttgggcgaccgcgccccagccgtcgggctgggtccaggctctaggagccgacacggtgttgggcaaagcccagggtcaataggggagggttttaggatgggggacagagaatacagatgactaagaggttaccatcgagggggagcagcagtcgtggaagatccagcagtcctggtgcgcgggaccctcaaggccccctcctcacatgtcaactgagtaccctcttattgtcttctctgctccgaagatgtgtccggccccttctaactctctccttcatccgggctagcagatgaccccagtggtccccaatttctggcagacatgtctccatcttctacctggcatattttacctgcctcagtgtaccccaggccgcttactagctttctgcatatctagacttcccctaatgcctccttcccgcttacgggagagcctcagactctggactcagctcccatgagctcctggacccctactcatttcttgcaatttaatgggtcatgcagctccacccactcaccccttttgatctctcccctcctccgtcctgtgaaaattccagtcccgcatccttctgagcccgggacccccagtcaattcctgggtcaggtgtctccttaaccctcccgatttacagtgcttaaccctcatttctgctttttggggtctcccaatggattgtcagtcctcctacccctctcgtattctgggtacctcaggggtttcttcgcacatactgggaccctcaccccacttgctgcgtaccaggtcctggtatttgtcccagtggactccagggaaatcatcctcctccctgaaacccctcactcatgtgcctgggccccccagcacctccttccatgcgtaccccgaggtcctttgagcccctccccctgcagccccgccgagccacccggcccgtggccgctgtttacaaggacacgcgcttcctgacagtgacgcgagccgcctcctccccttccccacgctcgaggaggggggcgcgggggcccggctccggcgacggccaatcggagcgcacttccgtggctgactagcgcggtataaaggcgtgtggctcaggctgagcggctgggaccttgagagcggccaggccagcctcggagccagcagggagctgggagctgggggaaacgacgccaggaaagctatcgcgccagagagggcgacgggggctcgggaagcctgacagggcttttgcgcacagctgccggctggctgctacccgcccgcgccagcccccgagaacgcgcgaccag

SEQ ID NO: 20841 - DNA, 2300 bp, Homo sapien
cttctatgccagacaccctgccacagattatctcatttaagctttttttttttttttttttttttttttgagacagggtctcgctctgtcgcccaggctggagtgcagtggcgcagtcacagctcactgcagcctcaacctcctgggctcaagcaatcctcctacctcggcctaccaagtagctgggactacaggcacatgccactgtgcctggctaattttttgtattttttgcagagacggtgtttcaccatgttgcccaggctggtctggaactcctgggctcaagtgatactcccatctcagcctcccaaagtgctgggattacaggtgtgagccagccaccatgcctggcctcatttaatatttccacgagtctcaggtggggaaaccaagacccagagacagcaagccaaccttccaagctcatatacggggtaagtgggccagaggaactacaacctgacacttccaggctgtgccagcctgcccagttgtgagtgtcctacaacatccttggtgcccgccatttgaagctgacttctgtcttcaggggtgtgaccatggccctacctagaaggcacaatgccacctgacagcagggttgtcaagtgataaatggcataattgacataatgaaggtaagtaaatctcccggtgctgtgctagcatatacaaaccaatttattatgatcagtttgtttatttatttaatttatttattttgagacaagatcttgctctgttacccaggttggaatgcaagggcataatcatggctcactgcagcttcaaactccttggcacaaatggtcctcctgtatcagcctcttgagtagctgggactacaggcgcatgccaccatggcaggctaatttattttttatttttatttatttatttatttttgtagagtagggggtctctccatgttgcccaggctggtcttgaattcctgggctcaagcagtcctcccgcctcggcctcccaaagtgctgggccatcaagtcaggctaattttaaaatattttttgtagagatggagtcttgctgtgtgggccaggctggtctggtctccgagaccaagggatcctcccacctcagcctcccaaagtgctaggattataggcgtgagctaccgcgccggccactgtgatcactttaaagggctctttactgaatctgcccctttcccctatgagacagatcttatcccaactccgatcttatcccaactcaccgctcaccaaggtctgacacctcctaccctcccacacccatgtctctgccacacctcaccgacctctttccatttctccttcaggacttttcaccttggcatttgctattccctcttccttggacattctttccccaaatctttccatatgggactttcgcttgtcgttctcgctgcactggtcacgggtcttctgcaatcggaccctctctgatttcccaagcttgcccgcccccttctttctctgtctctgcccttcctggcacctatccccgagtgacagcttcagtgtcctgcccacaccctctcttcccctgggagctgctttaaagcagtatctatttcaatatatccaagagtaaaccgagccttagagaaaagtaaccagcccaaggggacgcctccagtgcggagctgggtggagatttgcagcccgccgaggaaggtccctttgcagccagcaggagaagtagggcaacggggagcctttgggcatcgtcatccccgccgcctgaggttaccctttagatgctgcagcctcagctgctcccagctgtcaccttcgccctgctgccctaagtactgatagtcctggtagaccagggcaggggtcgccagctgcaggagtagcagaggcgccagcagcagcgcccccggggtccgcgccatgctggactccaacggcccccaacgcgctcccaggcggagtcgtgcgcggagtctgcggcgggcgcattacccacgcgggcaggtgcagtggtcccggccgaaggcaacgcgtctccccccgccgcccgcaggcgcatggacccggccgcacgctcccccgcacctgcgggcgcagtggacccgaccgctccgctcgtccgctccctcccccgcgccgtgcacgtcttggttcgggccgggcataaaaggcttcgcggcccagggctcacttggcgctgagaacgcgggtccacgcgtgtgatcgtccgtgcgtctagcctttgcccacgcaggtatgaacacccggagtgcacctggcgggaggacccccttcaggctgctttggcccgat

SEQ ID NO: 20842 - DNA, 2300 bp, Homo sapien
ccccgctgatatctagggagaaaaggagaaaagtggagggggcgccgggcgccggggctcacgcctgtaattccagcattttgggaggccgaggcaggcggatctcttgagtcctggagttcaagattagtctgggcaatatcgttgagatcacctctccataaaaatttttaaaattaggccgggcgcggtggctcacgcccgcaatcccagcactttgggaggccaaggcaggcggatcacaaggtcaggagatcgagaccatcctggctaaaacggtgaaaccccgtctctactaaaaatataaaaaattagctgggcgcggtggcgggcgcctgtagtcccagctactcgggaggctgaggcaggagaatggcatgaacccgggaggcggagcctgcagtgagccgagatcgcgccactgcactccagcctgggcgacagagcgagactctgtctcaaaaaaaaccaaccaaacaaacaaacaaacaaaaacatttaagttagatgagcgtggcggcacatgcctgtggtcccagctactcggtacgatggggaggaaggatcgcttgagcctgggaggcaaaggttacaataagccgagatcgctacactgctatccagcctgggcaacagagtaacatcctgtctcaaaaaaaaaaaaaaaaaaaaaaaaaaaaaaaaagtggagggggaggcgaagaggagtaaaaggagataaagagacaatgaactaggaccctgaggaaggggcatgagcctggtaaggggcgggaacccacaggcagaggacatgagccccagtgagcccagggaatagaagtggtggatgccaggcactgtggctggctcaggcttgtaatcccaacactttgggaggctgaggcgaccggatcgcttgagcccaggagtttgaagccagcctgggcaacataatgagaccccgtctctacaaaaaataccaaaaatagtcgggcatggtggtgtggtgtgcacctgtagtccagctgcttgggagactgaggtgggaggatcgcgtcagcccaggaggtggaggttgcagtgagccaagatcgcgccactgcactccagcctggacaacagagagagaccctgtctaaaaaaaaaagaaggccgggtgcggtggctcacgcctgcaatcccaacactttgggaggccgaggcgggcggatcacaaggtcaggaaatcgagaccaacctggctaacacggtgaaaccccatctctactaaaaagtacaaaaaattagccgggtgtggtggcgggcgcctgtagtcccagctattcgggagactgaggcaggagaatggcgtgaacccgggacgcggagcttgcagtgagcggagatggcgccattgcactccagcctgggcgacaagagcgagactctgtctcaaaaaaaaaaaaaagaaaaaaaaaaagtgggtcgaggggtgggggtggggacattcattctaagttgggaggaatgagcttctatagggagcagagaccctgagcaggagtccaccgaggtctgtgatctccaacgggggtggggaaggcttggcctgaatgagacagaggttaggaagcacagatcttgcacggagtggaggtgggccgaagggagcaaccaagagagggagtttggggactccaaatccaaaagcctgggtttagtggaagcggggctacctggtccaggggacttagaatgtgtacagaagcagggaccgcaagtacagggcctgaatccaagtggcagttggggacccagtgatgcggtgacccgtgtcctgggagtggggtgatatttgactctctagttccccgttaggctgggtcttcgaagctacgtctcagtttccctcttatttccccctcttcccaccgggccacgcaggcggggccccagagaccgtgaagcagagcttgcaaagtgaccccgtccaccgaattccccaagctgagtgttcggccatagcccttcgggactacaattcccaggagggcgcacggcagcgacgtcggcgtcggctgcgtaagcgtccacggcggcgggagcgccaggggcgtgttctgcccgcggattggccggaagcaggcgccgcttcgaggcccgcggaaaacgcgcgccgagacccgctcctgcagtattagttcttgcagctggtggtggcggctgaggcggcatggatctcagcgagctggagagagacaatacaggccgctgtcgcctgagttcgcctgtgcccgcggtgtgccgcaaggagccttgcgtcctgggcgtcgatgagg

SEQ ID NO: 20843 - DNA, 2300 bp, Homo sapien
tggcgtgaggcatagcccagaggctgaacaaatctgacccacaagcatcctggaccacctcaagatggaccaggggaaagctaggtccggcaggtcttgcttactgaggcctccagcacatcactgggtgtacacagagggacccagagacggtatctactgatttgttcacttaccacatattgagtacctactgtgtgcaacgtagtgttttgggatctgggagggaatacagcaataaaagagagacaaaagcctctcttgccctgagatgagaggcacacgaacactcacagtcacatattcagtaaacacagacacacaaacatttattcgaacatactctgcaaacatatactccacaaacacagacccacacattctgcaaattaacacacatacaaacacatactcagcaaatgcagacacacgcaaacatccaaaaatacagatacacacaaactcacatctgcagccatacaaacacatacttaggaaacacagacatacacacagtcatccaatgcaaacacacacaaacaacacatataaacacttaaccaatggaagcacagtcacatagttccaaaaccaagggatgtccagttgcacacaaattatcatctaaaacagacaaattattctcccaacacaacacatagacatacacacccataccctctgcagggatgtttttctcatctgattctccccctagaatgtcagctctatgaaacctgagatttttgtgtcttttattttgagtttttgtttgtttgtttgtttttgagacagagtttcactctgttgcacaggctggagtgcagtggaacaatcttgattcactgcaacctctgcttcccaggttcaaactattttcatgcctcagcctcctgaactgctgagattacaagcatgtgccaccatgcccagctatttttgattatttttagtagagatggggtttcaccacgttggccagcctggtttcaaactcctgggctcaaacgatccttctacttcagcttcccaatgtgctgggattacaggtgtgaaccaccatgcctggctgaaattttcatgtcttgttcactactgcatccccagaatctagcacacagtaggtgctcaataaatgtttgttgaatgaatggatgagttaaaggagtgttcacaagcaacacacattcacagaaacttcagaaggacacataatgtgtgcacacaaacacatcctgctcagcacatgacatttctttgttcattcatggtcaaccttcatggtcaaaaacctttatccactgacttccaacatttttgcagggacactaacccaatgctacatttccccttctcacatttattaagatcctgttttattcaactgcaaacacattgcttgggacacacaatcctcccccagattctgaacgtatacacacacacacacacacacacacacacacacacacacacaaccactccaccaagaaacacacataaacataacctcatacaacaaaaacacacatacatgctcaacacacacacagccacacaaacaaaagacacaggtgcctgggaacacacacaggctataggccacacaaacacaccttcctcacacacatacacacacacacacacacacacactccccacatatatagatacagagcttaagccacaagctgaacataaaaacaaacacaaggatatatacacaccagccccaagtcggccagcctttggtcagctggagtgtgggcaggacggtgggaggtcccgcccctgcattaagccacgcccctttcagcagccagtttcctggactggatcctgaggtgtcttagcggcctctagaccccaatccagccaacaggtgaggggctgaatgcggggaggcgggaaggggacagtcttgtctccacagaccgctagctgtccctgcctcggggctttgggccccagtgacagaacctgagccctgccacaccagccttggtcccaaaggtccagctctgggtggcccctaagccgattgtgggccgagagaaggtgacccagagaagggccggcagggagcgagagagggaggagggaggccgcatagaagagagggaggaattactgaacaggagagggggattggaagacctagggaggtccccttcattctgagaaaagaaggggtctcttgaagactaaaaaggtgggagatcctgctggatgggaggagggccactgtggtctaagcttggttggggtggcactgaagggacatagaggacatggttctg

SEQ ID NO: 20844 - DNA, 2300 bp, Homo sapien
aataatttgtctgttttagatgataatttgtgtgcaactggacatcccttggttttggaactatgtgactgtgcttccattggttaagtgtttatatgtgttgtttgtgtgtgtttgcattggatgactgtgtgtatgtctgtgtttcctaagtatgtgtttgtatggctgcagatgtgagtttgtgtgtatctgtatttttggatgtttgcgtgtgtctgcatttgctgagtatgtgtttgtatgtgtgttaatttgcagaatgtgtgggtctgtgtttgtggagtatatgtttgcagagtatgttcgaataaatgtttgtgtgtctgtgtttactgaatatgtgactgtgagtgttcgtgtgcctctcatctcagggcaagagaggcttttgtctctcttttattgctgtattccctcccagatcccaaaacactacgttgcacacagtaggtactcaatatgtggtaagtgaacaaatcagtagataccgtctctgggtccctctgtgtacacccagtgatgtgctggaggcctcagtaagcaagacctgccggacctagctttcccctggtccatcttgaggtggtccaggatgcttgtgggtcagatttgttcagcctctgggctatgcctcacgccagagcctccgcaccctttctccttccctaatctcagcccccgaccctgcgcttggatttcagcaccgcggacaggagcgcgcgagaccagcaccaaggagagctcccgcggtcgccatcgtgagataggtcgccaggggcggagtccgggccatggacggagagatgtgccagcaagggactcagcgagacggcgacacaaatgtgccgacaaacatatacagagacagacagagataacccaggcaaaggcgcggacttgaggcgacaagctcctggtgaatacccggacccagcctcgccgtcgcccccgtcgtccagcaggggtcgctgttacccagcgaccgcgccctccgggaccttggggccagatactggccaccaccccttgggaagcccttctgtcccccagtgccaagactgggagttcggagggctcggacactctcctctccaactttgggaagcatggtgggtttggcctcacctgtgtgaacatggaggagcggcgagggagctgaaaagcgctttaactgcccccctctccaactaccagctaatcgctcctataaatacagacggcctggcctggctccttaatcctgaccgtgagggaggggtcgctagaggggctgcagggttccctgaggaggctctgattgtggggcaggtgggtgggggggcataatatgtatgcacatgtttttctgaggttgcgtctcctgtgaagacgggtctcctcagtgaaaatgtttctctgtaagcatgagatctctcctggggctgtagaggtctcgtgggtggggacagtttcccacagaggatatggcttttaggggtctctgattgggggtatcctttacacgggaattgttactcctgggatctttctcttcggggaatgcctctttcgtggggagggggatggcttttgagaggaaagtcacctctcagggaccatatctattaggaatgattttcagggttgggggagttcttgattggacagggcgtccctgtggaaactatctccccctgggaatgtgtctcaccaagggggtctctgggggatgaatgtagagggaatgtatctcagggagaaggcttcctttggggtgtttcttgactgagggttctacccctgagaatatctctcctctggggtgtctctttttatagtggtctctcggcagcttggctcccatgggggcaccaggaggctccgcccccccgcccgccccttccccccgccagcgcgggcagcggtggctgagcccgggctcgggcgcccagacgcagtgacggcgccgggcccgccccacttcgctccgcccccgcccccgccacccctcccctcagccgccgccgccgccgccgccgcggtccccgcggcttctcactccctccctcctccctcctcccgccgccgctacctccctcctccctccccgggccgaagtcgccgccgctgccgccatggacgattcgggcctcatccgccgccggaggctgcaggtacgcggctgcctgggccccgggtggagaggaaggggtcggcgccctggggcggggctgggcaggaggcgggagaacttgcactagggtcagccgggacgcccccacccataggttcgggacgctaaccgcggggaacgctgt

SEQ ID NO: 20845 - DNA, 2300 bp, Homo sapien
gtggagagagcattccaggtggagggaactgcaagggcaaaggcctggaggcgggaataagcttagcgtactcaatgaatgaatgaaaggttgaatgaatgaaaggttgaaagaatgaatgactcatctacacctcagcagatctatctgactcccagctagagtcatagagttggggtagggggtggggggtaggtaagtagagtgactcacaactgagatttaaaatgggaaccacggaggctgaggtgggagaatctcttgagctcaggaggtcgaggttatagtgaactatgattgcaccactgctggagtaagacaccctctcaattaacaataaataaataaataataaaaagtttaaaaaataaaaaaataaaaatggaaattcaggtgatggccgcatagtcattttttataatgacaataataataattagtgagtattaactttatgtgtctgcatttgaagaaggtcaccttccatttgtcaagctcttaggaagtcactgtagggatcaggagatatggggtcttggcttttttctgaggaaaggaatggggtacaaggggcaacacctgccagccagttttctatccacagggtgaggtggaaggaaggaaactgagtggggctgcaggtggaaagatttgggggagagtttcaaaaggcctttggaggggactccaacaaaaggaaaatgagggatgtcctagacatttctaggatctctaaaagcaaaaagcctaggttcaaatctcaattctgctttttatgaccttggcaaatgaccttccaatagtcccgtgtctccttgaggatcttaggagttgatgcagatgcctagccccttagcatggtgcctagcacatagcaagtgctcaataaatactaagtctggagaacaggcgttattaaggagggacatgctgcatgacagaggatgggccacagcgtcctcccaccccgttgtacaacggacaaacatataggcggggccaaagggcagccctgccctcccgagccacgggtgaccgataatccaaaccaggttttccctctgtctttgcatgaccggagtgaatgaggaccagtcgacctggctgcgtgtctgcaatggcccaagcgaaatcaagacctggattttctggccacagagcccagggtgtccagatccgggtaaccggccttggagggtaagcccctggagggcttttaagcaccacccgaagaagacctggaacccagccccacccgctagcgcccccaaacattctagggacgaagaaagggtcaaactggagcggcggaagttcgggtctttggcgtcagtgtaaacagacgccacctccaatctcagctgcagagccgctcggccaagtggattccgcttctcccgcacaggattaatagttgacactgcagacagggcattcgaactcaggatgctgtctacatataagatcccagggcgtggtggctcacgcctgtaattccagcgctttgggaggccgaggcgggtggatcacctgaggtcagaagttcaagaccaggctggccaacatggtgaaacccactctctactaaaaatacaaaactagccgggcatgttggcatgagcctgtaatcccagctactagcgaggctgaggcagaagaatctcttaaacccgggaggcggaggttgcagtgagccgagattgcgtcactgcactccagcctgggcaacagagcgagactccgtttcaaaaaaaaaaaaaaaaaaaagagcctagctgcacacaggggaccctcgggcgctcagcagtgatgcgacagttcctaagaggatgcaccaacgtatgtgggtgtatccaggcagcgaagtggttaatcccgccagaagggaagcggtggggacaggactccgacagggatcgccggacccagagcaagcctggggttgagtgggtgggtgggtgagtggaagcattccgcgttgggggcggtgtctcgagcgggagtttaaagtcccgcgtggcgctgagccaatgagagttgacgccggcctggagggcggggacacaccgtgcaggccccgcctctttcctcccttttctcagaaacccgacggcgcggacccaacctggctgctgcagtacttgctctaactttgccgcagctgcctcccttctctcggaacccactctcctaacccacccccgagaggcggagagaatgtgggagcacttcagagaggcctaggctccggagatcgggccatctgggctctgaaagcaaattagttttccaactcatgt

SEQ ID NO: 20846 - DNA, 2300 bp, Homo sapien
gtggccagaaaatccaggtcttgatttcgcttgggccattgcagacacgcagccaggtcgactggtcctcattcactccggtcatgcaaagacagagggaaaacctggtttggattatcggtcacccgtggctcgggagggcagggctgccctttggccccgcctatatgtttgtccgttgtacaacggggtgggaggacgctgtggcccatcctctgtcatgcagcatgtccctccttaataacgcctgttctccagacttagtatttattgagcacttgctatgtgctaggcaccatgctaaggggctaggcatctgcatcaactcctaagatcctcaaggagacacgggactattggaaggtcatttgccaaggtcataaaaagcagaattgagatttgaacctaggctttttgcttttagagatcctagaaatgtctaggacatccctcattttccttttgttggagtcccctccaaaggccttttgaaactctcccccaaatctttccacctgcagccccactcagtttccttccttccacctcaccctgtggatagaaaactggctggcaggtgttgccccttgtaccccattcctttcctcagaaaaaagccaagaccccatatctcctgatccctacagtgacttcctaagagcttgacaaatggaaggtgaccttcttcaaatgcagacacataaagttaatactcactaattattattattgtcattataaaaaatgactatgcggccatcacctgaatttccatttttatttttttattttttaaactttttattatttatttatttattgttaattgagagggtgtcttactccagcagtggtgcaatcatagttcactataacctcgacctcctgagctcaagagattctcccacctcagcctccgtggttcccattttaaatctcagttgtgagtcactctacttacctaccccccaccccctaccccaactctatgactctagctgggagtcagatagatctgctgaggtgtagatgagtcattcattctttcaacctttcattcattcaacctttcattcattcattgagtacgctaagcttattcccgcctccaggcctttgcccttgcagttccctccacctggaatgctctctccacagatcctcccatggctggctcttatctttcagcaaccagcttaaaagtcacctccacagagcagccctgtctgacaatgtgtctccatcctagccattgtccatcacatcaccctgtttaatttattcataagactaattattgtctaaaatgatttcgttcacttctacactaatcttgtttaatgtcccctttaccctataaatactagtcccaaaaggccagaaacttttttttttttctccttgagacagagagtcttgctgtgttgcccacgctggtgtttccttggactcaagcgattctcctgcctcaacctcccaagtagctgggactagaggtgcacaccaccacaccggacttgtaatttattcactactgtgtccctagtgcctaggattgggtcagcatacagtaggtgctcaagacatatttttcaaataatgattcctatttcatttgcacaaacacacgctgatatgccaactcacttgcctttatatggcgccccgcctgtgtacgtgggcctctgttggtctctgagggtcaggagaggaatcacccagggatcctctcccccaagaaacttggcccgcagtgcatggccaagggtgaaagtgacagtgctgaagaggggcctgtcttaccctgcttctgctcctccagggagttgataatgcttgtgggcagcaacggcaggtccacgctgaccttcatcgttttgcccctttgccttccagaaggatttgcccctgccccggaaaagcagcaggtgagcctggggagagacgtggcgggggctggccgccccttctcccgccggggtgggggcgccaggcgagtgcgcgggcggggcctggctcgccggcacgcagcagcgccccctcccggccggctgcagccgcagggccctccccttccctgccctcccctgcccgctgcggcggctgcagcctccgccccgcgcgcttgctccccgcgccgccgccgccgccgcctccgccgctgctgccgcacctgccaccatgtcgccgccgccgggtcatgtctgactctctctggaccgcgctttctaatttctcgatgccctccttccccggcggcagtatgttccgccgcaccaagaggtagacccccgatcccc

SEQ ID NO: 20847 - DNA, 2300 bp, Homo sapien
gcagcgccccctcccggccggctgcagccgcagggccctccccttccctgccctcccctgcccgctgcggcggctgcagcctccgccccgcgcgcttgctccccgcgccgccgccgccgccgcctccgccgctgctgccgcacctgccaccatgtcgccgccgccgggtcatgtctgactctctctggaccgcgctttctaatttctcgatgccctccttccccggcggcagtatgttccgccgcaccaagaggtagacccccgatcccctagacattgtcccggccctccccgcaaaagccgccgctccgggtactgctgcagggcggggcccgggatgctgcgcccggtccagctgcgccagaggtgccccagctgcgccttcccgccggggttggggttgaatggggggtggtgtgggccgagtctggggggcttgcacgctggagaggacggccgcggggggagggggctgcgccactgggggtttgtggcgcctttgtctgctggcgctgcgggctccaacagcctggtgggggtagaggaagaaggggaggctggggggcttggcaccctcagaacaatagccgcagcctggcctccccccacccccatgccgcgtgctcctggacgcgctaatatgctcagtcactgcggctgtgggtgaggggacggacggaggggcttggggctccctcttcgggagctggatgctgaggggtagaaaaaagggggggtttatcataacacaacccccccccccgaacacagccttacactgaaaatagtgacacacagcgtcacacaggacatgatgtcacacacatacacacaacagccctagtggcccagatacactgggaggtgccacacatacctagccttgcagctgccacaggtcagaaccatgcacagacacacaggggcaccacgtcgtgtacacctagtaagatgtcacttacatggcgatccacacacacacagttatgtcatccaagatgcaaacatgtgtttcaatatcccatccatgcatccaagaatgtcacaacacacgatgtcatatctaggtatctcacatactatgtcacactgacatcaggataaacagatgtagggatcttgcagagacagaaccacgcaaaatcacatgttatcacattgcaagactcacctagagaatgtcaaatgtggtgacatgtttggacacagtgtcacaagatgttaaattcacacaatagatgctacatacacatggacaagcatggtgaatgtcacacccagacggaaggacagtatcggacacagactcagaatgccacacaaagacatagatacatgtaggggggatcatgcatcctggccaggcatggtggcaggcacctgtagtcccagctactcaggagggtgaggtgaggcgggaggattgcttgagcccaggagtttgaggctgcagtgagccactgcacactgcactccagccgggcgacagagcgagacattgatttaaaagaaaaaaaataataataatacaacctgcctgtgttacagcacacattgttatggacaagtggcatttcacactgtgtcacatagacacacaaatgctcaaattgtatcacacaagataaacccacgttgtgtcacacgtatcacactagaatgcattcagcgtcacacattgttgaattcatacagtggataccacacgtggatacctacagtgaatgtcacgcatagactgagacacgctcagtatcaccaatggtgtcacctagacacagtgactatcacaccatgacagacactgccctacacataatccatactgagagtttctcacacacatgtcatatgcacatcccctgccgtacacagtcctgccgaggcctgcaccacctttcttcgagaaaccctcccagggagcctccaaacacacatggatgggagataggcggggatctgagacaggaggtcagctggtggggctcaagaactcactgggctgcggcccggcccggcccccctgccttaccttccccgcagctgccgcaccagtaatcggaaaagcctcatcctgaccagcacttcacccacgctaccgagaccccactccccgctgccaggtcacctaggtgaggccagtggtagagacttggtgggtgcagactggcctacagtaggcggggcctcaggcgaggaagcgtggtcatgctacagaaggggcgcagtttgaatggaggcgaaccagtttggataaggggcggggccatgcttgtgtgggtgtggtcagtcgcagaggg

SEQ ID NO: 20848 - DNA, 2300 bp, Homo sapien
attataggcaaccaccaccacgcctggctaagtttttgtatttttaatagagacagggtttcaccatgttggccaggctggtctcgaactcctgaccttcaggtgatccacttgccttggcctcccaaagtgctgggattgcaggtgtgagccaccacacctggcctttgccacatttttttgcacataaacgtacaatacatattgcctattgcatttttacacttaataaaatagaggactttctaaatccatagacagagagtttcctcattatttctaacagtggcacaatgtttctttatctaactaccccacatgtgtttgtttggctaatttaacgtatggattattatttccaatctcacaatgagcaagatagtagatataccatttttcacatgtgcaagtatatctgtagcataaattcaaaagtaaaattgctgagtcaaagggaacatgtatttgtaattctgatctgtatcaaacagtaatttacactcccaacagcaaagtatatatgttcacctacatatttgcccatagaggatatcaggttttggagttttttctcccaatctgctaggtgaaaaatggtattttgtggtagttataatttgcctttctgttattgtaagtgagattgagaattttttttttttgagatggagttttgctcttgttgcccaggctggagtgcaatgccacgatctcggctcaccacaacctctgcctcctgggttcaagcgattctcctgcctcagcctcctgagtagctgggattacaggcatgtgccatcatgcccagctgattttgtatttttagtatagatggggtttctccatgttggccaggcttgtctcgagctcctgacctcaggtgatccaccagcctcagcctcccaggtgatccgcccgccttggcctcccaaagtgctggggttacaagcgtaagccactgcacctggccaagaatcttttttttttttttgagacagagtctcgctctgtcacccaggctgaagtgcagtggcatgatctctgctcactgcaagctctgcctcccgggttcacgccattctcctgcctcagcctcccaagtagctgggactacatgtgcccgccaccatgcctggctaattgtttcgtattttcagtagagatggggtttcacagtgttagccaggatggtctcgatctcctgaccgcatgatccgcccaccttggccttccaaagtgctgtgattacaggcgtgagccaccgctccaggcccgaatcttttagtatgtttaagagctgtaactctggctgggtacagtggctcatgcctgtagtccctactctttgggaggccaaggcaggcagattgcttcagcctaggagttcaagagcagcctgggcaagatggcaaaaccaaaatactaaaattagcctggcatggtggcatgtgcctgtggtcccagctacctgggaggctgaggcaggagaatcacttgagccctagaggtggaggctgcagtgagcaccactacactccagtctgaatatcagagtgagaacctatctcaaaaaaaaaaaaaaaaaaaaaaaaaaaaaaagctctaactgtaatttacttacctcacccacttttttctcttcaattgttaggcttttgttattgatttttgggaactctttatatatttatatattaggatgactattttgttggtttcctgctatcttttctagtggaagaagatgagaatatgtcttcagagtcagtcttgggttcaagtcctaactttctctttcattatggcacttggatgaaggactctttcattctgtgcctcagtttccccatgtgtaaaatgaaattaaaagcatcctgctctcatgatgatgatggtggtgtggtctccatctttttcctgaagggccgcagcagcaaggccaagaaaccgccgggggagaatgacttcgataccatcaagctcataagcaacggtgcctacgggtgagccacccggggctctggcggggggagggtggcggaggccgggtgtctcggaggtgacggccggtcctcgctctctccccctgcagcgctgtctacctggtgcggcaccgcgacacgcggcagcgctttgccatgaaaaagatcaacaagcagaacttgatcctccgcaaccagatccagcaggcctttgtggagcgcgatatcctcaccttcgccgagaacccgtttgtggtcggcatgttctgctcctttgagactcggcgccacctctgcatggtcatggaatatgtggaa

SEQ ID NO: 20849 - DNA, 2300 bp, Homo sapien
tctcctgtgtcagcctaccaggtagctaggattacaggcacatgccaccatgccgggctaatttttgtatttttagaagagatggggtttcgaaatgctggccaggctggtttcgaaatcctgacctcaggtaatctgccagcctcggcctctcaaagtgctgggattacaggcgtgaggcaccgcacccggccggaaaaatggctggtcataatttaactactacacctacagtttagcagaattcaggctcctctcatcctcctaacctagtgccctttcattatttctacaaaggcagtttagtttggggaagggctattatcatttaagctataaactaaattcctcccaaaattagcttggggccaggcatggtggctccctctttaatcccagcaatttggcaggctgaggcgggcagatcacttgagcccaggagttcgacaccagcctgagccccaaggtgaaaccccatctctaccaaaaatggtgaaacccagtctctaccaaaaatacaaaaattagctgggcatgtggcgcatgcctgtaatcccagctactcaggaagctgaggcaggaggattgcttgaacctaggaggcggatgttgcagtgagctgagatcacaccactggactccagcctgggcgacagagtgagacaacgtgtcaaaaaaaaaaaaaaagttagcttgaccccactccaggaatgaccaagcaagggcagtttggagattaaaggcaagatggagttggttaggtcagagctctttcactgacataattttctgtcataatttttgcaaaggcagtttcaagccagtactcagattcccatagccctttgccctgccatgatcctttgaggctgaggtgggagaatcacttgaaccccggagttccagagcagcctgggcaacatagtgagaccctcatctctgcaatgaacaattatctgggtgtggtggcacaggcctgtagtaccagctacctgggaagatctcttgagcccagtaggttgaggctgcagtgaactgtgatggagtcactgcattctagcctgggtgagaaaccattatcctgtctcaaaacgacaaaaaacaaacatacagtcacctctttgctagctcaggggatcctggagaaaacgtgcagaatgaaaaaggagagtctgggtggcgtggattacatgcctgtaatcccagcactttgggaggcaagacaggtggatcccttgagctcaggagttcagcctgagccacatggtgaaaccgtgtttcaaaaaaaaaactacaaaaattagctgggcatagtggcatgtgcccgtgatcccagctactcgggaggctgaggtgagaggatcacttgagctggggaggcagaggttgcagtgagccaagattgcgccactgcactccggcctgggcaacagagcgagatattgtccgggaaaaaaaaaaaaaaaaaaggaaggaaaaaaaaaaagaaagaaaaaggggaagatacactggaacacaaatgcttcttaaggggcgcagtggctcacttctgcaatcttggcactttcgggggccgaggctggtggatcacgaggtcaggagttcgagaccagcctagtcaacatggaaaaaccccgtctctactaaaactacaaaaattagccgggcgtggtgtcgggcgcctgtaatcccagctactcgggaggctgaggcaggataatcgctttaatcaggaaggcggaggttgcagtgaaccgagatcgtgccattgcactccagcctgggcgacaagagtgaaactccgtctcaaaaaaaaaaaaaaaaaaaaaaaaaaaaaaagaggaagaacaaaggtcccaagagttggacccaggttgtagggctggaataaaaaataaaatacaaacttgtgcctgatccagaaacccgggcgggagttgggtcagacagaagagcgtgggctgggattagctaccacgaaaaggaacggtggccaggctccaggagacgctggagcgccgggcccgtcgtgggcgtggtctgggcagactcagcgttgccttttgcctctccaaaacgcagcatcgcgtctcgggggaggagtctgtaccctcgtgatgtccccgccccggttcccaggcaagtttagggaagtgaaaggcgccaggtgccagtcctggcctctgatgtaacccagcgccccgcagtcccgacacagattcctggatctcagccccatagcagctatgatcccgctgctgctggcagcgctgctgtgcgtccccgccggggccctgacc

SEQ ID NO: 20850 - DNA, 2300 bp, Homo sapien
agattgtttggctatgacattgtgtaaccaatatagcatagggttgtgttttagtgcctgggaattgtatgtctgtgcatagtccatatacatagacagacacacaattatatgtgcacggattatatgatcagtgtgactgagggaacaggaactcatgtcattatgtaattgcatggtcctgtgagtaactgtgtttttgtttttgtttttagagatgggatctcgctatgttgcccaagctggtcttgaactcctgggctcgagcattcctcctaccttggcctcccaaagtgctgggactgcaggcatgagccactactcactgctccaagcctgttttgtttttgttttttagagacagaatctcactctgtagcccaggctggagtgcagtggcatgatcttggctcactgcaacctctgcctcccaggctcaagtgattcttgtgcctcagcctcccgggtacctgggattagaggtgtatgccaccatccccggcctatttttatatttttagtagacagggtttcactgtgttggccaggtttgtctcgaactcctggcctcaggtgatctgcctgcctcggcctcccaaagtgctgggattactagcgtgagctactgcgcctggccccatgcctccaagtttcaaccagttctccagctcagcctcccaaatagctgggattacaagcatgtgccacaatgcccagctaatttttgtatttttagcagagagagggcttcatcctgttggccagtctggtctcgaactcctgacctcaagtgatctccccaccttggcttcccaaagtgctggggttacaggtgtgaaccaccgcacctggccttgtttttgtttgtgtcacccaggttgatctgccaggaataaagatggccacccaacttttttttttttccagcgacagagtcttgctttctgtgccccaggctggactgcagtggtgtgattatagttcagtgcagtcccgacctcctgggctcaggcaatcctcccacctcagcctcctgagtagctgggactatgggcatgcaccaccactcacagctttttgttggagagataggttttatgttgcccaggctggtcttgaaatcctggtgtcaagtgatcctcctgcctcagtcttccaatgagtgactatgagttatgtgtctgtaatacgtatccatgtccccttcccaggctcccagggcaccagagtggaggttcctgttgtagaaactcagatcctctcctcatgttgggcagaatcaaggagcagccaggcccagagccagggcactggtctcctgcaggtcaggtactgcctgtggcttgatccaacggtcctatcccacccaggaggagagagggtcacttttcccttggctgcccccatcgcactaaagcagctggcactgaaccagcctccatgcagtcccatgcagtgccacccaagggtccccagtagacaatggtgggccagttgtcaggggcttcctcctgctgcagggctgagaccctgggaggtcccaacccaggcaaattgaacgccaggctaatttgaagacccaactcccagccctccccttcaccggaggacagagctctagctggcctgggcccccacctgatagcagcctccaacgtctggggtgtctgataatgcttggcggggagctcgtgccaagtcccgccatcagcacggttgttgctgtttactggggagggggagggctgtggagcctcaatcagggggacagggggtcccacagcttcttcccagaataccctttctgccttttccaggaaagttaactgagggaagacccccaagtctctccttctttggagacccaatgtctgtttttacccagcacctggaccctcaaaccctgaaccccccaacccttgatatttgacttggctttggacacagggttagtctttaaccccagccccagacaggccaacgtgaagtttgtgccccagaaacagtgcccccccgccgccttgccttgctttgccttatcagaggctgcagccaatcagctaaggacagagaggagccctcgaaggggctatcacagcctcagagttcacgaggcagccgaggaagaggaggcttgaggcccagggtgggcaccagccagccatggccacagccgagaccgccttgccctccatcagcacactgaccgccctgggccccttcccggacacacaggatgacttcctcaaggtggggcctagaaggtggggtctaggtgggctggctggaatccagggcca

SEQ ID NO: 20851 - DNA, 2300 bp, Homo sapien
agcttgggcaacatagcgagatcccatctctaaaaacaaaaacaaaaacacagttactcacaggaccatgcaattacataatgacatgagttcctgttccctcagtcacactgatcatataatccgtgcacatataattgtgtgtctgtctatgtatatggactatgcacagacatacaattcccaggcactaaaacacaaccctatgctatattggttacacaatgtcatagccaaacaatctctaaaacacagaattcataatccacaggcaggcacacagttatacaatcctactgacacaatttagccgtaattgagcagacacacatggggagtcagatacattgtcacagaactttttttttttagatagtgtctctctctgtcacccaggctggagtgcagtggcatgattttggctcactgcaacctccacctcctaggctcaagtgattcctctgcctcagcctcccaagtagctgggattacaggtgcctgctaccacgccacgctaattttttttttttttttttttttgagacagagtttcactcttgttgcccaggctggagtgcaatggcatgatctcagctcactgcaacctctgcctcctgggttcaagtgattctcctgcctcagcctcccgagttgctgggattacaggcacccacaagcaggcctggctaatttttgtatttttagtagagatggggtttccccatgttggccaggctggtcctgacctcaggtgacccaccctccttggcctcccaaagtgctgggatgacaggcatgagccgccccagccagtcaaaacctacactttatacagtcacaccaccggtcacttttacaatatgtaaagtaattatttagtcacagttgcatagctaccagtgcccaaccgtaggggatgcacccagttaaacacagacaaacgcaaggacatggcatcacaggtcctgagaatcaagacacacacatttctcaacagatacacaatcagaatgggtgcaccacaaatgcactacacaaaaagacaaaacaggcggggcgcggtggctcacgcctgtaatcccagcactttgggaggccgaggtgggtggatcacttgaggtcaggagtttgaggccagcctggccaacatggtgaaacccgtctctattaaatataagaaaaaaggccaggcatggtggctcacacctgtaatcccagctactcaggaggctgaggcaggagaattgcttgaatccagtaggcagaggttgcagtgagccaagattgcgctactgcactccagcctgggcaacagagtgagaatccgtctcaaaaaaaaaaaaaaaaaaaaaaaattagccaggcatgatggcatgcttcagtggtcccagctacttggaggctgaggtgggaggatcgcccaggaggtggaagctgcagtgagctatgatcgcgccactgcactccagcctgagcgacagaacgagaccctgtctaaaaagaaaaaacaaaaacaaaacaaaacaaccacatagactcacagaatcacacaagttcacacacacacacacatacacagacacagacacacacacacacacacacacacacacacagagtcacaagtatctacatgtgcttcctgggacagactggcagaaaggtttgctaagatcgcccacttggagctcgtcttccccacaaccagcacccaattagagaactcgagtctggcctcctgggttcaggaggacgcctagtgctcgcgccagaatttctttgtttaattcttgactccctccgcacacaccccctgcaactgaccaaccaggagtgggccgagccctttcctacggccaataagaggagaaacccagctggccaatcggtttcccgcactcgtcttccgcccctaccccgtccgcttcttaaaggggctagcctatctctgtctgggccccccgatttccacaggcaaggctaccttagcccttttaaaaggcagagctgcggagggggccggattctaggaggaaccaatgaaaagcctcactcggcctccgctcctcccacttcttgctgaggtcaaaggcctgcgtcagttgcactgtagcctcggcagtgaaccgggaggtactaccaggtaaggaaggtgcggtagccccagccgtgggtgagaggagctccgctctgacacccccgctcctgtaggtcgccgtcgttgctccgctcgctctgagagagcatggccctgagaggcgtctccgtgcggctgctgagccgcggacccggcctgcacg

SEQ ID NO: 20852 - DNA, 2300 bp, Homo sapien
cgggagttggaggttgcagtgacctgagatcgctccactgcactctagcttgggcaacaaagcaagactctgtctcaaaaacaaataaataaaaaggctgggcacagtggttcatgcctgtaatcccagcactttgagaggccgaggagggcggatcacctgaggtcgggagtttgagaccagcctgaccaacatggagaaactccgtctctactaaaaatacaaaattcgccaagtgtggtggtacatgcctgtaatcccagctattcgggaggctgaggcaagagaatcgcttgaacccgggaggcggaggttgcagtgagccgagatcgcgccattgcactccagcctgggcaataagagtgaaactccatctgaaaaaaaaattaattaaaaataaaaataaaaaaacaaagaaggtagaaatgaggggattttgagacaggatgcagagggacagagagaagctggactctaggcttgctgctaagttttgagcttgggaaccaggtggctttttatgtcattaactaagggaatggaagatgaaatcgggttgcctgggagatgacgcttttggttgtgcaaatgtggagtttcagatgcctttgagacagccatgtggggaggctgggaggtttcatatattcttgggtcctcaggagagaggcatgggctgggatgatagaatttagatgatagaatccaaagtgtggatggtaatggatagtactcgcaagtcatttacttattagcagcacatttattgcttctctcatgaggggtaagtactgaagatacaaagatgaaggatggccctggcccttcagcagactacagtgggaggccaaggtgtaaacagtgaaaccgtaggtgctgtgtgcacctaatccagccaaggaacactttctggaggagacaggacgtaggtgggaaaggggactgttcagggatcccatgctacgggaatgaatgcctttggagaataatagcctgtgcattgtggaatggtggctgggatattagctgcaggggccagcagggaggaggcatggaggcctcactgcagaacaagtgtgtgattgacggtgtctggcaagaagacagcagaggcccaagcacagacctctgggataccacatgtcgggagtagcagggaagggtggtcagcagtgctggctgctgccaagaggtcagcatgtcactctgagatgtctatcggtctaaccacaaggtcatggtgactgtggtaggagctgtttcatttgagaaccgggggaggaacctgattacaatggactgaaaagtgaatgggggtaagaaaataagcccaggatggccgggcgcggtggctcacgcctgtaatcccagcactttgagaggctgaggtgggcagatcatgaggtcacgagatggaaaccatcctggctaacacggtgaaaccctgtctctactaaaaatacaaaaaattagccgggcgtggtggcgggcgcctgtagtcccagctactcgggaggctgaggaaagagaatggcgtgaacccgggaggcagagcttgcagtgagctgagatcatgccagtgcactccagcctcggtgacagagcgagactctgtctcaaaagaaaagaaaagaagcccagggtgagactctctctctctcttaaaaaaaaaaaaaaaaaaaaagcccagaaaatttaagcagctccttctagaaccttggccttgatggggaggaaagagggaggtggccggctgggggagaccgggtggagaggggaggggtgtatatgtgtgttgtggttgttttgtttgtttgtttgaaacagggtctcactctgtcgcccaggctggagtacagtggcgtgatatcatctaggctccagtgcagtggcatgatcaagcttactgcagccttgacctcccgggctcaagtgatcctctcacctcagcctcctaagtagctgggactacaagtacacaccaccacactcggctaatttttgtgttttttgtagagatggggttttgccatgttgcccaggctggtctcaaaaccctgagctcacgattcacctgccttagccccccgaagtgctggtattacaggcgtgagcccactgtgcctggttgagatagctgagatttatttttattttattttatatttttgagatggagtctcgctctgttgcccaggctggagtgcagtggcacgatctcagctcactgcaacctctgcctcccaggttcaagcgatcctcctgcctcagtccgcctagtagctgggattacagacaca

SEQ ID NO: 20853 - DNA, 2300 bp, Homo sapien
tctaatactaataggctgagtggggaaacccagcaaggcctatctgtctagattcttcttggagtctcaggaatgcatgctcagagaggccaagaagaatctagatagataggccttgtgtggggcagaaacttctttgaaacgggggtcttatgacctacagtcaatagggtagatcagataatttcttctttttttgagacagcactttgggagaccaagacgggaggacggcttgagcccaggagttggggatcagcctgggctcagcacagtgagatctcatttctacaggaaaaaaaaatataattatgtgtgtgtgtgtgtgtgtgtgtgtgtgtatatatacatacaatcttttttttttttttgagacggagctttactctgtcaccccggctggagtgcagtggcatgatctcagctcactgcaacctctgcgtcctgggtttaagcaattctcctgccccagcctcccgagtagctgggactataggcgcccgccaccacgcccggctattttttgtatttttagtagagacagtttcaccatgttggctaggctggtctcgaactcatgacctcaggtgatccacccgcctcggcctcccaaagtgctgggattacaggcgtgagccaccgcgcccggccagaaaaatatttttaaattagaagggcctggtgaatgacactgctactcaggaggccgaggcaggaggatcgcttgaacctgggaggtcgaggctacagtgagctgtgatcgcaccactgcactccagcctgggcgacagaccaagatcttgtctcaaaaaaaaaaaaaaattgttatggagtatattttccaaggcagagtggatgaagttagaagcaccgaataaatacaggactctgagatccgtataacctgggcgccccgtggaacccaggagcctcacaggggcacacaagcgcacccagagcgcgccgtcctgctcccaaggggcgccgactgcgcgcgcagcccgcggaccgcgaaactgctgcttaacggtcggccccgcccagttggccgcgcaagttctcaaagagggcggggccgggagcacgcgtcacaacacactcgtccgcgggagcgcagctggccaggggcggggtcggcgcatgcgcagagggtgcgagcttgaaggcgggaaaatacggaatggagcgacagggagtacgcggcgcttgtttccttctcgcgcgtggggcgggcggacagataggcagggaacggctgcgatcccagccatctccagcggacccgagcccggccgcttgtcctttgccattggggctccctctcatcaggcctggcctcaaatttcctgactgactgaacccggccctgactgacgcactgacgggtctgatttccacacatggcgcgtggccggaacggagtagagaaaggcacaaacacccacgcaccgcacccgtttctttcatttctttttttttttttttttgagacgaagtatcactctgtcgcccagtctggagtgcagtggcgtgatctcggctcactgcaacctctgcctcccgggttcaagtgattctccttcctcagcctcccgagtagctgggattacaggcacgcaccaccacgtcagctaatttttgtatttttagtagagacggggtttcaccatattgctcaggctgttctcgcactcctgacctcgtgatccgcccgcctccgcctcccaaagtgctgggattacaggcgtgagccaccgcgcccggcctcatctcttttctcctacctcttctcctttctcgaaggactccagccaacacacataccagttaggagcccaggtcctccagttacattcccacagccctgccctcacccggcccctctaggtctggtgtcctggtgtcccctagggacagagtgtcctttcaccccatgcccctgccctcatggcacctgccccagccctgcccgtctttcctgcgggtccccaccgtcccgcagcagcacatcgaggtgaccagggttgaagggtcggcaggagggcgatctgttcactcctcatcctccctccttggcctccgtcctgactgtgcttgcaggtggacgtgccccatgtgaaatgcaaagaccaggaaccgcagcccttgggggagagcaaggagcatccgcggtgggaagagaactgcgaggaggaagctggtggagggccagctaggtgaggaagatcccagccctatgggtctacacaggcccctgggtccctctcattcacccttttcttccacaaggctatgccagt

SEQ ID NO: 20854 - DNA, 2300 bp, Homo sapien
caaggggaagtctttcccttgagaccacttggctgtaaagttgtatagctgggatgtgaacctagctttaagggctgtgctttcaacctgggacccagcgctgcagaaagggggtgcctggctctgagcctcacccctgcctggacaccctccccacatttccctctaggtcatcgaggctgaacttcggtccaccaagcactgggagcttactgcggagggcgaggagattgcccgggagggcagccatgaggcccgtgtgtttcgaagcattcccccagagggcctggcccagagcgagcttatggtaggagctgcggggtgaatggggagtgagtgatgggatgaaggtggccctcgtgccccactcactgcagcctctcttttccagcgactgcccagtggcaaagtgggcttcagcaaggccatgtccaacaagtggattcgggtggacaagagtgcggctgacgggccccgggtgttccgagtggtgcgttcctgcgggctggtcagggggcaggtggacgggcacatgggcccctggccctcatacccctcacactccttatcctggcaggtggacagcatggaggatgaggtgcagcggcggctccagctggtccgggggggacaggctgagaagctgggggagaaggagaggagcgagctgaggaagaggaagctgttggctgaagtgtgagtgggtgccccctgcaggctcaggcccccaccacctgcgaagcatggtggaggcatggtgggagggagacatcttgcccacaccaagcacaggtgtggccagtttcctcccagctcgcttaatgccatagttgtcaagcctacgtgccttggggtctttgcccatgaggacccttctgctgagaactgttttccctctgatcttcaagataggctcctcatcaagtctctctcctgtgtccccttaaagaggccaccctgacagccctcctctccccttgagttccatgaagcccatcgcccctagtcttcatctttggtgcttgttcatttctttcactgtccttagtgtggtccaaagtttaatgaacacacaccagacaggcctctggaacctagatgggctaggggccgtcctctcacaggacaaatgtcccctttgagcagacacagagtggcagagagaagagactagagctgggatgcctaactgaagttcgggctctgtcacttaactagttttatgaccttggccaagtcacctggcctttgctggtctccgtttccttatctataaaatagcctgggccaagtgtgtggctcacgtgtgtaatcccagctactcaggaggctgaagtgttaggatcacttgaatccatgaattcaaggccagcctgggcaacatagagagacccccatctcaaagaaaaaggggccaggcacgatggctcatgcctgtaatcccagcactttgggaggccgaggcgggcaaatcacctgaggtcaggagttcgagaccagcctggccaacatggtgaaacctcgtctttactgaaaatacaaaacttagccgggtgtggtggcgggtgcctgtaatcccagctactctggaggctgaggcaggagaatcgcttgaatctgggaggtggaggatgcagtgagctgagaccgtgccattgcactctagcctaggcaacaagagcaaaactctgtctcaaaaaaggaaaacaaacaaacaaataaaaaaaactgccctctttccggggcttgtggggagacttttgcagaacagagcctggcacagaataaatctgctagactttccctagtatcatcactcagtcgtgtacttagcaccttgaacagaccctggcacacattaggttctcagtaagtgttgaatgaatcagtgagtgaatacagggagatacagcatggtcacataggaggatttcaggtagtgataaatgtcaggatggaaataaagcagagtgacttggtaggtagcatggggatcctcatcagacgggagatcaaggaagtcctctaggaggagatggcagtggcgtccccttccttcccctggccacaggactctgaagacctactgggtgagcaaaggcagtgcctttagtaccagcatctccaagcaagagacagagctgagcccagagatgatctccaggtagcaggcaaccccagggtcagggcaggtgggagctggggcagggggcaggggcgggcagcccttaccaggcccttgcatcctcccccagtggctcttggcgggaccggcccttcaagccctacaacttcttggc

SEQ ID NO: 20855 - DNA, 2300 bp, Homo sapien
ctcaaataataattgtgatgtaaaaggaataaatgtgttctgcttataagagtgttcgaacatgggccacactcaatttagtaagcagtgtgaatatgtgtgggcatttaattctcacagtaacctgggctccaatcacctccatgtgagcaagaaactgaggcacagaaagactacaccttctggttgaatgacataaataacagatctaggattcttttttttttttttttttttttttgagacagagccttgctctgtcaccgaggctggagtgcagtggtgcgatctctgctcactgcaagctccacctaccaggctcaagtgattctcctgcctcagcttcccgtgtagctgggattacaggcacccccactgcacccagctaatttttgtgtttttagaggagatggggtttcgccatcttggccaagctggtcttgaactcctgacctcaggtgattcacccgcctcagcctcccaaagtgctgggattactgagcctggccagcagatctaggattctaatctacctgtgctgacgtaagtcaccactgcccacatgtgattactgaccatttgaaatgtggttggtccgaactgagatgtgttgtaagtgtaaaatacgcatcagattttgaagatttagtatgaaaaaaagtgcaatttttttttttttgagacggagtttcgccttgtcacccaggctggagtgcaatgacacgatctcggctcaccacaacctctgcctcccaggttcaagcgactctcctgcctcagcctcccaagtagctgagattacaggcatgcgccaccacgccctgctaattttgtatttttagtagagacggggtttctccatgttggtcaggctggtctcaaactcccgacctcaggtgatccacccgcctcggcctcccaaagtgctgggattacagaggtgagccactgtgcccggccgagtgcaaaatattttattagtcatctttttttttgtaagagtcagggtctggctggctgggcgaggtgggtcatgcctctaatgccagcattttgggagaccgatgcaggaggataacctgagcctaggagtttgagaccagcctgggcaacatggccaaaacccatacttaaaaaaaaaaaaaaagctgggtgtggtggcgcgcacctgcagttccagctactcaggagcctaaggttggaggatccttagagcctgggaagtcaaggctgcagtaagccataattgcaccactgcactccagcatgggtgacagagcaagaccctgtctcaaaaaagaaagatgttttgcactgtgtttctataggacagtgctaatctaggccatgcagtatttgcactgacgttactctcagcgcacaggggtgggaggatctggaaggtttataatttatgacttcatttccaccaactctctgtagaaccttgggcaagtcataccaccctctgagcctcagttttctcacatgtgtaatgcggttatatcagtatctacatcataaagttttggggataaatgaaatactacacgtgaagtactcagttctgggctaagtactaccacatacgaggtagtccacacaggttaggtgccaccttgacttactaggtgaattccttttccctctataaaaagggacggtacctacccagccttcctttgaaattttaaaagtagctgacatcgccaaaatgaccatctctggagcccaccacccaccgcctctcctagggcaagagagaataccagaagggcagagggttctgtaacccagagacggggaagtccaaggtcacacagcccgctcgaagtgaggctagataaaactcaaaacagggcggtgcttctgaccttgagataatcaattttacccctctggtcaaccagacgccattgatggagccagggtggaggtgggaactgagtcccatgcaccttttgcggctccgtcgccacactcaagatgacgacacattgagccctgttctacagttagacacattcaagatggcggtacacactccggttccggttccggtggctcagctccccccgcccacccgggcccggacacgctgagcacactggaaggagtcatggcggatggtcaggtggcggaactgctgctccggcggctggaggcgtctgatggcggcctggacagcgccgagttggcggctgagctgggcatggagcaccaggcggtggtgggcgccgtgaagagccttcaggcgctgggcgaggtgagccgggcccgtgatgccggaccgccttgcc

SEQ ID NO: 20856 - DNA, 2300 bp, Homo sapien
acgcctggcaattaaaaaaaatgtttttgtaaaaatggcctcctgctatgttgcccaggctggtcttgaactcctggccttaagcattcctcccatcttggcctgccaaagtgttgggattacaggcgtgagccactgtgccccgtgtgtttttagttaatttccacaagagtccttccttcctctcttctatcatgcagcaagtactttttaagcctgttctgtgccaggtgctgcaggtgacactggaggatgcgaagtgaacaaaacaggcagtgtctaacctcaagtaggaagcgccaagcccacaggtgcctgacacaggaacaggaggaagggtcagcaagaggcctgggatggtccccgggatcctcatgggggggaccagactaggcaatactgaatactacctagaggaagtggtagaaccccaacttcccagttcattctcccccgtctttttttcgagatggagtcttgctctgtcacctgggctggtgggctggagtggagtggcgtgatcttggctcactgcaatctctggctcccaggttcaagcgattctcccacctcagcctcccgagtactgggattagaggcacccgccaccacgcctggctaatttttatttatttatttatttttatttttagtggagatgggttttcaccttgttggccaggctggtctcgaactgacctaaaatgatctgcccgcctcggcctccccaagtgctgggtttacaggcgtgagccactgcgcccggccaccatttcttttttttttttttaaccagagacccttgccaagtcattccccccactccactttattttccttttcattttttccttcctctcttttctgagtcacaaccattagccaggaagcaccccctccccaccctctttcctggatccccctcattccctccttccatagtccactcccgcgctcccaggtccagggcttatttgcccagagtttggaaaacccccagctctccttcctcctttctacagcgtgggggcagggtactggtgccagtcacgtgcctctggcttctgaagaagactctagactggggtcggggggtgggtcctgcccatctccctagcatcttatcgtccctaccatctgtgtcttttttccctccccaaacggaaccccctgccctctcgcctgcctatagccgtttaattgcaaaagccaggccgtttgtgggagaccacagacagcgacccccttcatttaccggttgagaggagggtaaaggggcggctgcaatctgggtaataaccctatccccactccagaagtcacagtcacatcgttaagccttcctcccctcttgtcccaggacagctttaaaaacgttaaaagcatttctgctgggtagcatctggccagggtcgccccctctgtctgctcaggaacgtctgtcacttcagagagcttaagtgacttgccccggtcacacagcagcagtccgataggctgccagggctctaggggcagaaggaggagagggctggcattcttcccaccggcccgcgtgactgtagcaccggggtgcagcgaagccccaagggccccaatccgtgagctctctcccatcccaggcaggggtgggggagcagcagtggggtgctggttctcaaatgcaagataagagctggctaagaaagccttgcccagcccctccacctagagggaatgggagggagagaagctgagggcagggtcccggtcccgcgtggagacagctgcgctcccgcggtttctttaaacgcccagatgggcaacgacgcgcgcggacgagggcggggttgggttcaggtctggtcacatgacctggcctgaggtgctcgcggcccccaccccaccagtgggcgtcccccccacgcgtggtcgaccatcattggtcggtggtgaggccaatagaaatcggccatctgggaacccagcgttccgaggcgcagcctaacatagtgaaccgacgaaggtccaatggaaaaagacggccatgggcatagaccaatgacaaagtggcaggggcgggcccaagggctgggtcaggttggtttgagaggcgggtgggtataaaagtgcaaggcgggcggcggcgtccgtccgtactgcagagccgctgccggagggtcgttttaaagggcccgcgcgttgccgccccctcggcccgccatgctgctatccgtgccgctgctgctcggcctcctcggcctggccgtcgccgagcctgccgtctacttcaaggagcagtttctggacggaggtaacgc

SEQ ID NO: 20857 - DNA, 2300 bp, Homo sapien
cagctgcgctcccgcggtttctttaaacgcccagatgggcaacgacgcgcgcggacgagggcggggttgggttcaggtctggtcacatgacctggcctgaggtgctcgcggcccccaccccaccagtgggcgtcccccccacgcgtggtcgaccatcattggtcggtggtgaggccaatagaaatcggccatctgggaacccagcgttccgaggcgcagcctaacatagtgaaccgacgaaggtccaatggaaaaagacggccatgggcatagaccaatgacaaagtggcaggggcgggcccaagggctgggtcaggttggtttgagaggcgggtgggtataaaagtgcaaggcgggcggcggcgtccgtccgtactgcagagccgctgccggagggtcgttttaaagggcccgcgcgttgccgccccctcggcccgccatgctgctatccgtgccgctgctgctcggcctcctcggcctggccgtcgccgagcctgccgtctacttcaaggagcagtttctggacggaggtaacgcctggtcccgcctcgaggccgccccgacgacgcggccggcccccgatcctggatctgcgttgtcgcccgtaattaccgtttagaggtccaacacggtggcctcccgggactagagccgcgggcgatttctcttctgcgtccctggggagcgcggagggcgtagcggcctcccgcggcgggagttagggttagcccgaggatctctgaaggcacccgacgtgtcaaactagaggttggaatggggagtgtcggggatctcctttcctgtccccagcagcttgtggctctcggcagatgtttggtgtggggggggattagcacagccgctctgacctacccctctaatcccccacttagacgggtggacttcccgctggatcgaatccaaacacaagtcagattttggcaaattcgttctcagttccggcaagttctacggtgacgaggagaaagataaaggtaagagcctaggagtgggtgctcagatccgggaggacttcctggcagaagtccttgtctgtacacacacagccgggacagtccccttggaggaggacaggtggaggaagtgggggagtcttctctattctctaagtcgagggtcctcgcgagtcaaggcccaacggtgacctcactaccgtcccgtctcaggtttgcagacaagccaggatgcacgcttttatgctctgtcggccagtttcgagcctttcagcaacaaaggccagacgctggtggtgcagttcacggtgaaacatgagcagaacatcgactgtgggggcggctatgtgaagctgtttcctaatagtttggaccagacagacatgcacggagactcagaatacaacatcatgtttggtgagggcctgcttcctggtgctgatctctgtcccattagttagagggagacccagaccccattgactttcttaataatgattttttttggaaggggagctaaaagaataagtcccagcaacaatttattgcattatgatcgcagatctaggctgttaatttaatttgcgtgtttgtatatagttatttcccaatcttactaatgaggattttgagttctagagcactgattttttttttttctcctttaaacttaaggctccacccacagcccattcaggacagaatcagggtctgagtttctcttctcagccttgacagacccgagttgaagaaccaggtcttccttttataaagaggggtgagagcctcgagatgatgggtagtctctgactcttaactggatctgcttcacacctaggtcccgacatctgtggccctggcaccaagaaggttcatgtcatcttcaactacaagggcaagaacgtgctgatcaacaaggacatccgttgcaaggtgtgcctgggggtggtggcaaatggctgtcatggggagattcagaggtcagcctcattggggggtggcccccgctcaccttcttccttcttcaggatgatgagtttacacacctgtacacactgattgtgcggccagacaacacctatgaggtgaagattgacaacagccaggtggagtccggctccttggaagacgattgggacttcctgccacccaagaagataaaggatcctgatgcttcaaaaccggaagactgggatgagcgggccaagatcgatgatcccacagactccaagcctgaggttggtgtttgggcaggggctctgctctccacattggagggtgtggaagacatctgggccaactctgatctcttcatctaccccccag

SEQ ID NO: 20858 - DNA, 2300 bp, Homo sapien
caggacgaggagcagaggcttaaggaggaggaagaagacaagaaacgcaaagaggaggaggaggcagaggacaaggaggatgatgaggacaaagatgaggatgaggaggatgaggaggacaaggaggaagatgaggaggaagatgtccccggccaggccaaggacgagctgtagagaggcctgcctccagggctggactgaggcctgagcgctcctgccgcagagctggccgcgccaaataatgtctctgtgagactcgagaactttcatttttttccaggctggttcggatttggggtggattttggttttgttcccctcctccactctcccccaccccctccccgcccttttttttttttttttttaaactggtattttatctttgattctccttcagccctcacccctggttctcatctttcttgatcaacatcttttcttgcctctgtccccttctctcatctcttagctcccctccaacctggggggcagtggtgtggagaagccacaggcctgagatttcatctgctctccttcctggagcccagaggagggcagcagaagggggtggtgtctccaaccccccagcactgaggaagaacggggctcttctcatttcacccctccctttctcccctgcccccaggactgggccacttctgggtggggcagtgggtcccagattggctcacactgagaatgtaagaactacaaacaaaatttctattaaattaaattttgtgtctccctcctgtgtctccttctggggaaagacagacttaaggaaacccagcagtggtctttttggggggggggggggtttccagtatatctcctttttcagctattgctagagaggttgctgagtgttccacaagattccagggacccttatttaccccataaccctcaaaaccaacgggggaatggctgttgctgctgtaaatactccacatactaacttactgaatccttgaacctaactggtaagttttggttctgcttatttatttatttttaagatagactctcgctctgttgtccaggctggcgtacagtggctcaatctggttcaccctgccccttaaactggcctttttcatgcttctattcctttggggtcctgtggctcagcccaacccctctgggatgcctccaggactggtagatccaagggagaattctgtatttaatgtagtgaggctttgaaagttaacatctttaaatacttctggggtcagattaggtatagtacaacaaagtactcctgcccggagacccaagaatgaaaattgtaggttcattccaaaactccagatccctaaagaatgaatgaggctacaaaatggcaccttgcccccgcttccaacttaaggttttttttctgtgcttggtggcctttcaggtatttctagttttgagtaactttcactttgactgctctacaagggttcctgccaggatacccagaccagaataaaactcatttgggggccgggtacggtggttcacgcctgtaatcccagcactttgggaggccgaggcgggtggatcacctgaggtcaggagttttgagaccagcctggccaacacggtgaaacccaatacaaaaaattatccgggcgtggtggggggtgcctgtaatcccagttactcgggaggctgaggcaggagaattgcatgaacccggaaggcggaagctgcagtgagccgagatcgcgccactgcactccagcctgggtgacagagactgtttgaaagaaaaaattctcatttggaagaggcaaaatgaggtttttacagaagaaatacaaatgtctgtaaccagtacaggtacataaaaactttgttaaaaattcatttgagcgtgagagtggggacaccagagtcactttgcagccccgtgacgtcaccgataacgggcatggcgtcactcaggagaccacgtgtgcgggccgagcaagaagccccgcccacagcgcggagtttagtctgcgcgtgcctcgctcgagaacgcgctcgtgcgcatgcccacaaaggccaaggagggagtgcgcaggtcacgtgcgccggtggtcagcgcgcgcattgcctgccccggaagtggtcggcgcgcggcgcggcgcgcctgggcgctaagatggcggcggcgtgagttgcatgttgtgtgaggatcccggggccgccgcgtcgctcgggccccgccatggccgtcaccatcacgctcaaaacgctgcagcagcagaccttcaagatccgcatggagcctgacgagacggtgcgggccgggccggagc

SEQ ID NO: 20859 - DNA, 2300 bp, Homo sapien
ttgagacagagtctcgatctgttgcccaggctggagagcagtggtgtaatctcagctcactgcaacctccgcctcccgggttcaagcgattctcctgccttagcttctcgagtagttgggattacaggtgtgcaccaccgcacccagccaatttttgtatttttagtaaagacggggtttcaccatgttggccaggctggtctcgaactcctgacctcagtgatacctgcctcagcctcccaaagtgctgggattacaggtgtgaaccaccgcgttcagccacatttacattaaaaaaataataaatgctagtgggctttttgtctgtttgtttgttcagacagagtctcactctgtcaccctgggtagagtgcaatggcacgatctcagctcattgcaacctccacctcccaggttcaagcgattctcctgcctcagcctcctgagtagttgggattacaggcgcccaccaccacgcccaggtaatttttgtatttttagtagagacaaggttttgccatgttggtcaggctggtctccaactcctgacctcaagtgatccgcccgcttcagcctcccaaagtactgggattacaggcgtgagccaccaagcccagcctaataaatgctagtttaaatgtataaaagtaaagttaaaaatataatttttacgcagccataaaaaatgatgagttcgtgtcctttgtagggacatggatgaaactggaaaccatcattctcagcaaactatcgcaaggacaaaaaaccaaacaccgcatgttctcactcataggtgggaagtgaacaatgagaccacatggacacaggaaagggaacatcacacaccggggactgttgtggggtggggggaggggggagggatagcattaggagatatacctaatgctaaatgacgagttaatgggtgcagcacaccaacatggcacatgtatacatatgtaacaaacctgcacgttgtgcacaagtaccctaaaacttaaagtataataataataaaataaaataaaataaactttttgaaggcaaaaaaaaaaaaaaaagaatagcatgggggaaaccacccccgtgatccaaccacctcccttccccgacatgtggggattacaggtccctccctggacacatggggattataattcaggatgagatttggttggggacacagagccaaaccatatcagtggccctgccacagcctcttatttttgatttttcaatgtgttcattcaacatgatttcagattattcattggagggctactgtgtgcacagaagacacatggatgaataaaacagtatggtttctgatatgcaaaaaacaaaaatacaatttttacccaaagaacactgaacacttagaaaaaaatacacaaatatatatttgtagccaggtgagcgtatatatatatgtatatgtgtgtgtgtgtgtatgcatgtatgtatttatttttatttattaattttttagacggagtttcgctcttgttacccaggctggaatgcaatggcacgatctcggcccaccccaacctccgcctcccgggttcaagcgattctcctgcctcagcctcccgcggagctgggactacaggcatgcgccaccatgcccggctaattttgtatttttagtagagacggggtttctcctctcctcccggaaggcggaggttacagtgacccgagatcacgccgttaccctccagcctgggcgacagagcgagactctgtctcgaaaaaaaaaaaaaaaaaagactggtctcgaactcgcgacctcaggtgatccgcccgcctcggcctcccaaagtgctgagattacaggcgtgagccaccgcgcccgacaaaaatatgtatttttaagtgtcagtgtgcagaaaggagaagaaaaaaagtgaaaattaaaaatgactttaatcagtaactgcttaactaaaatttaaagttatacttggaaacgtataaaacccatactatccccttcgccgccctcccccgaactgaggcagcagggacacccctcgccctgccctggcccacaccgggcctcgcgctcaggcaccgggcatggacagcccggcgggcctgtgaggaccccgcacagccaagatggcggcgtccgtgcgacaggcacgcagcctactaggtgtggcggcgaccctggccccgggttcccgtggctaccgggcgcggccgcccccgcgccgcaggccgggaccccggtggccagaccccgaggacctcctgaccccgcggtggcagctgggaccgcgctacgcggctaa

SEQ ID NO: 20860 - DNA, 2300 bp, Homo sapien
aaaaaaaattttttttttcctttttaaggctgaatgctattccattgtatgaatggaccacattttttttttcccaattgcagatgtcaggctgaaagaatggaccacattttaggctgggcacgatggctcatgcctgtaatcccagcactttgggaggccgaggcaggcggattacaaggtcaggagttcgagaacagcctgtggtgaaacgctgtctctactaaaaagacaaaaattagccgagcgtggtggtgcgtgcctgtaatcccagctactcaggaggctgaggcaggagaatcgcctgaacccaggaggtggaggttgcagtgagccaagatagcgccactgcactctagcctgtgtgacagagtgagacttcgtctcgaaaaaaaagaaaaaaaaagcggccaggcacggtggctcacgcctgtaatcccagcactttgggaggccgagacaggcagatcatgaggtcaggagatcgagatcatcctggctaacatggcgaaaccccgtctccactaaaaatacaaaaaattagccgggcgtggtggcaggcacctgtagtcccagctactcgggaggctgagacaggagaatggcgtgaacctgggaggcggagcttgcagtgagccgagattgcaccactgcactccagcctgggcaactgagcgagactccgtctccaaaagaaaaaaaaaaaagaatggtctacattttgtttatccatttatctgtacgtggacatttgagctgtctccaatttttgcctattgtgaataatgatcttatgaacatgggtgtacagcatttcttcttcttcttctccttcttctccttctccttcttcttctctttctccttctccttcttgttcttctccttcttcttctttcttctttcttcttctttttatgagacagaatcttactgtgtcatccaggctggagtgcagtggcacgatcttggctcacagcaacctctgctaggttcaagcgattctcttgcctcagcttcccaagtaactgggagtacgaccgggcacagtggctcacgcctgtaaccccagcactttgggaggccaaggtgggtggatcacctgagatcaggagtgtgcaccaccacgccgagctaatttttttttgtatttttagtagagatgagatttcgccatgttggccaggctggtctcaaactcctggcctcaagtgatctgcccacctccacctcccgaagtgctgaggcttttattctttttttccccgctgagacagagtcttgctctgtcatccaggctggagtgtagtggtgcaatctcaagtcactgcaacctctgcctcccaggttgaagcaattctcctgcctcagcctccggagtaactgggattacaggcacacgccaccacgcccagataatttttgtattgttagtagagacagggtttcaccatgttggccaggctggtcttgaactcttgacctggtgatccacctgcattggcctcctagagtgctaggattacaggcgtgagccactgtgaccagcctggtttttattcctttttttttgtttgtttgttttttgagatggagtctcgctctgtcacccagactggagtgcagtggtgcaatctcagctcactgcaagctctgcctccctggttcacgccattcttctgcctcagcctcccaagtagctgggactacaggtgcccaccaccacacctggctaatttttttttttttttttagtagagacggggtttcaccgtgttagccaggatggtctcgttctcctgacttcgtgatccacccaccttggcctcccaaagtgctgggattacaggcgtgagccactgtgcccatcctcaggtgtttattcttagtgaaataaagtagcatagaatcaaattaccagattgtttctagtaattactgtcacactgtgggcctcctcctgaggcttttttctgagggagatgagagccatggaaggttctcatcacagggaccagtcttgactcaggtgctcacaggcgccctctggccgctgtggggggaataaactgtggggggccggtggccagggcgggaactgggagacctggaaggaagcgactgcactgatccaggtagggggacaaggagtgggtgagaagcgggcggattctgggtagattctggagctgaccggagttactgtcatataagattgggggcggggatgggtgttagagaaagagataggtcaaaggtgctctccaaagtttggagccttagcacctggcaggacagag

SEQ ID NO: 20861 - DNA, 2300 bp, Homo sapien
gggtgacagagggagactgtctcaaagaaaaaaaaaagaagaagagaaaaacaagtcaggcaagatagcttcctgtgcctatattcccagcattttgagacctgcttttcaagaccagcctgggcaacatagtaagaccctgtgtcaaataaaaaaataataaaataaaaagaactggcagggcatggtggctcatgcctgtaatcccagcactttgggaggctgaggtgggcggatcgcttgaagtcaggagttcgagaccagcctggccaacatagtctctactacaaatacaaacattagctgggcatagttgttcacatctgtaatcccagctacttggggggctgaggcaggagaatcacttgaccccaggaggcagaggttgcagtgagacgagacacagtgagactctgtctaaaaaaaaaaaaaaaaaaaaaagaacacaaaaacccagcaacaataatgttactcagagctgattcatggtgttactgtgtaggaacctctgttttaagctccttacataaattacctccttgagtcctcagaataacccaatgagatagggactgttttatcttcatattacagaagaagaaggtagggaccaggatggttaagggatttactcaaggttgcacagccaggaaattgcaatgcctaggccgaacccaagaaacctggctgcaaggtatgctagtttttaattttttttgagacagagtctcactctgttgcccagtctggagtgcagtggcgcgatcttggctcactacaacctccgcctcccgggttcaagcgattctcctgcctcagcctcctgagtagctgggattacaggcatgtgacaccacgcctggctactttttgtatttttagtagagacggggtttcacttatgttggccaggctggtcttgaactcctgacctcaggtgatctgcccgcctgagcctgccaaagtgctaggattacaggtgtgagccaccgtgcctggccataatttttgtatttttattttatttattttttaattttttttgagacagagtctcactcttgtcgtccaggctggagtgcagtggcgcgatcttggctcactgcaagctccgcctcctgggttcaagcgattctcctgcctcagcctcctgagtagctgggattacaggtgcccaccaccacgttcagctaattttttttgtatttttagtagagacggggtttcaccatgttggtcaggctggtctcaaactcctgacctcgtgatctgcccgcttcggcctcccaaagtgctgggattacaggcgtgagccacctcaactggcgaattttttttttttttttgagacggagtctcggtctattgcccaggttggagtgcagtggcgtgatctccgctcactgcaagctccgccttctgggttcaggccattctcctgcctcagcctcccgagtagctgggactacgggcgcccaccaccacgcccggctaattttttgtatgtttagtagagatggggtttcaccatgttagccaggatggtctcaatctccggacctcgtgatctgcccacctcagcctcccaaagtgctgggattacaggcgtgagccaccgtgcctggccaatttttgtatttttaaagtagagatgaggtctcaccatgttgaccaggctggtcttgaattcctgacgtcaggtgatcctcccgtctcggcctcccaaagtgctgggattacaggtgtgagccactgagcctcacccaaagtgtgcttttgctaattggagaatcggggtcccaggactggaaatgcagctgcccagggtcttcagacattgtgtgtctcggcccctggccccagacctgtctttcctggtccccacagctcgcacacagcaggaccagcccccatgtctctcagcaagttgggaggaggtgtgggaacccagctggtctgaatttactctcctcccccgctgtgggtctacagaaatgcctcccaggctatccaggaggggccaagagattaaaagcaggttcagaaggctcagatgccactcaccagacagcagggtcgactgctagtgaccttgagcccagtccggacagacagacaggcagacagacgcacggacaagcagatgctccttggccagctatccactcttctgtgcctgcttagcggggccctgcctacaggctcagggaggcctgaaccccagtctcctcgacctcagtcctgggctgcagccaatcagacctgggctctgggcccaggggccctgcccccactggtgc

SEQ ID NO: 20862 - DNA, 2300 bp, Homo sapien
catactcacgtacacatgcatacttttgtgcctgcttgcaagagcccaatgggcacagccaaccctgtgtgcgtgcgcaccccccgccctgggcactgacaccccctttaacagacaatgcatagctgagaattgccacagctttttggcccaagagagcaagaaggtgctggttgcacctggcagcaggcgggtgttttgtctcagcaggagctgcctgggggctgtaggcactgcctccccacccaccctgagggttaccagagggcttcctctccccttgctccagggtccccagcactacctctccccccaggcctttatgttctgaaaatgaggagtcagggcccgcaagaggggctggaacctcaccaaagtgtgtgtgtgtgtgtgtacatgtacggaggccctgatgcccaattctgtccctgacagctgagctgtgggtctcctgctatatttgcctatgtcgatgatcagggccacattacaagtgtgttggggggggggcacgtaagggacatgggtgtatgtgtgtgatccctgtgtgcatggctagatgattctcccaggggggttgtcagccgcctgggcatcagttggtcagtgtgtccaaggcctgtgggtacatctgggcaacccagtgtgtgtgtgtgtgtgtgtgtctgtgtgttgtgttgtgacagccagtgttgctttgtatctgtgacgctgtgtatctctttgtattggggtcctttgcattcacttccaggtgtttggtgtgtgtttatgtgacattgtgtatcttcccttcattagtgtcatcttatttatttagttattttttttcagacagggtcttgctctgtcacccaggttggagtgcaatggcactatcatggctcactgcacccttgacctccccgggctcaagggatccccccacttcagcctcctaagtagctgggaccacaggcatccaccaccacacccagctaatttttgtatttttggtagagaggggttttgccatgttgtccaggctggtcttgaactcctgagctcaagcaatccactggcctcggcctctcaatcatcagtgtcattctgtacatcggggtgtactgccacaactgccagtgtgttctggcactgcgatgtgtgtgtgttgtgtatgtgtctgcgtgtaggaattgtgtgtctggaaggtgtcagcgtgtggctgtgtgatcttgcatgtgtctgtgttctgcaggaacatgcgtcagtgtgtgtgcatcagtgtgcatctctatgtgtcatgcactggtgtgtcttcgtgtatatcagtgtgtgtctacgtgacgcctgctttggtgtatgtctatacgcggttccttgttgtgtgcctggataccatggtgggacggtgcatgtcagagcgtgggtcgtgggtgttttcccagactgctgtgtgtgtgtgcccgtgtgtaggggttgtgtgtctgtgccttgtgtgcactggtgtccgagtgtgctttgtgttcgaaggcggaacgtgtggccaggcgttctggacgtgacatgtgtggcggggtccgagtcccgctgcgtgtcagcgtgtgtctgcgctggaacgcgggccagcacgtgtcagggcggccgcgtcggtgtgcgcccccgcgcgcgcgtgtgcgtgtgttcgtgtgtgtgtgtgcatgtgtgtgcttgtgtgtgtgcgccggccgccgctcccccgccctgcccgcccctccccgcgcccctcctcccgcccgcgccgcccgcccgctccctctccccggagtgcgccgcttccaaactttgtctaaactttcactttcacagcgcggcggctgcggcggcggcggcggcgggcgagggtgaccggccgagcggcggcggcatggagtagacgcgcggcggcagcggcggcggcggcggacgcgagaggcagcggcgagcgcggcggcggcggcggcagcggcggccccggagccggcggggccgagcttgcgagcggcgagcgcggagcggcgccgggccgagcgcggggccgcgggccgggcgggcgcagcgcggcggaggccggaggagccgagccggagcccgagcccgagcgcggccgccgcctgccgggcctcccctcgccgcggccggccgccgcgctcccgcccgggcgcccagctatgtactccccgtactgcctcacccaggtaccggccgccgcccccgcgcgaccgggggaggggagcgggcgcgggaggccggccggcggcgcgggcggaggggacgcgcggcggccgggaagggggggccga

SEQ ID NO: 20863 - DNA, 2300 bp, Homo sapien
agccctttgctgttttttgttgtgtcctttcttagctcttttcttttcatttgggtttctcattttatacttttgcactttgcactgctagggtttgggctctttagtctaaattgatttgggagacaggtaagaaaactaatctcaggtcaactggagagggcagatctggagaattaaatgcctgtgcagtggtgaggggcgttggtcagattccttgcctctgctcagaggtagtgtccatctttttgcctttgtcacttctccccgggtctggctgttgtttgtggctgcgtgtagagcttgtcaggcggagtgctgtgacaggaggctattttaataaactgttgcagtttctcgagccgagctgtgttgcgttggcatccctcgtcaccgctaatggagtgtgcgtggctgggtgtgggccgaaggaggaggctgagcttgctgggggctgggggagaagggagggacgtgtggggtgctggcctcccccttgtctgagagtgctccttcagcagccagacctgggggcatcacaaggtggcagtaccctgggcaccagatccctgccctggaagtactgctggcatggacactttctgagctctctttcttcttatttctattcatagcaccgcaggcccgtgtgtatgtggccggggaggaaaacttccactcgcccctgtgtgctccataggaagaaaaaaaaaaagaaagaaagaaatagaaacagaaaaagagagtgtgcaggcccgagagaaagactgaaaccaaaacacagagagaaggcgcagctgcttccccaaggccttctggggctcccgcccgccagcccgccgggagtcaggcctttatttatttatttttcaggcttaaaaaaaaatttcgagtcttccacaatcccagtcccccccaatgccccaccccacccccagatttgctgggtggctgctgccaaatggacccgagtgggagcctggaatgaaaaattcataactgctggactttgcttgttcattagacgtgaacttgtcgattgggcaaattgtttttggtctccaactgccgggggctctccccaccctccctgctcgcccggttccctcctccccttggacgcagccattggctgctcgtggatgtctctttgccaaataggtggatccttctctctctttctctctctctctctctctctctctctgtctctttctccccccacccctttttactggcttggcacaagcaaatggatggggattgagcctgaaaggagagagagagagggagtttgagagagagaaaaggagcaaaaaaaaaaaacaccccaaaaacccaaccagtgcgcacacacacgcgcacactcacacacacgccccatcccatccacgtcctccctcgatcctcgatctctccctcccccccttcttcctttcctccctccctcgctccctctctctcttttgcacgcgtctgccagcaacggtctgcagccggtcagaactcgtcctcttccccgggaatctgcgagctcccccttttcctccgatcaggcagctcgaagtttacacccctgtgccgctgccaaagccgaaagcctttttcttcagctgccgctttttccctcctgggttttgtttttgtttttgttttgcacgggggtggggtggggtgcgttgttggttgtggggagatggtgggaggctggttttgatttttaaattttgcatttttttctttttttttttttttaaactggaagaggatgcacaggggaagaaattgaaaaaaaaattttgttggcttttgtttacctggcgtgtgtggcagccggctcgctccctctctctgcttgctatccctgacctttctttctttttgctccttttcaaaaaaaatattaatttcccccttctgtgcaatggagcatggggggggggaggagggggaagggtttgagaatccacccaagcccggcccctattccccagaacaccaataataaccccctttaaaacatttaccttcctcccctgctcctcctcctcccccctccccccacccgcccccaactcacaactcttttgagtccagaatctcagaatcgggcgttgggctttgccgggtgcttcagatcaatggtaattatttaattttttccagttttatttttgtaaacagaaatcaattattatttaaacttcaaacaagcaaacaaccaaaaaaaaaaaaaaaaaccaaacaaaaccgagagagcccatccttctgtcacctgactgagtgggaaaaagggtgaa

SEQ ID NO: 20864 - DNA, 2300 bp, Homo sapien
gcatggacactttctgagctctctttcttcttatttctattcatagcaccgcaggcccgtgtgtatgtggccggggaggaaaacttccactcgcccctgtgtgctccataggaagaaaaaaaaaaagaaagaaagaaatagaaacagaaaaagagagtgtgcaggcccgagagaaagactgaaaccaaaacacagagagaaggcgcagctgcttccccaaggccttctggggctcccgcccgccagcccgccgggagtcaggcctttatttatttatttttcaggcttaaaaaaaaatttcgagtcttccacaatcccagtcccccccaatgccccaccccacccccagatttgctgggtggctgctgccaaatggacccgagtgggagcctggaatgaaaaattcataactgctggactttgcttgttcattagacgtgaacttgtcgattgggcaaattgtttttggtctccaactgccgggggctctccccaccctccctgctcgcccggttccctcctccccttggacgcagccattggctgctcgtggatgtctctttgccaaataggtggatccttctctctctttctctctctctctctctctctctctctgtctctttctccccccacccctttttactggcttggcacaagcaaatggatggggattgagcctgaaaggagagagagagagggagtttgagagagagaaaaggagcaaaaaaaaaaaacaccccaaaaacccaaccagtgcgcacacacacgcgcacactcacacacacgccccatcccatccacgtcctccctcgatcctcgatctctccctcccccccttcttcctttcctccctccctcgctccctctctctcttttgcacgcgtctgccagcaacggtctgcagccggtcagaactcgtcctcttccccgggaatctgcgagctcccccttttcctccgatcaggcagctcgaagtttacacccctgtgccgctgccaaagccgaaagcctttttcttcagctgccgctttttccctcctgggttttgtttttgtttttgttttgcacgggggtggggtggggtgcgttgttggttgtggggagatggtgggaggctggttttgatttttaaattttgcatttttttctttttttttttttttaaactggaagaggatgcacaggggaagaaattgaaaaaaaaattttgttggcttttgtttacctggcgtgtgtggcagccggctcgctccctctctctgcttgctatccctgacctttctttctttttgctccttttcaaaaaaaatattaatttcccccttctgtgcaatggagcatggggggggggaggagggggaagggtttgagaatccacccaagcccggcccctattccccagaacaccaataataaccccctttaaaacatttaccttcctcccctgctcctcctcctcccccctccccccacccgcccccaactcacaactcttttgagtccagaatctcagaatcgggcgttgggctttgccgggtgcttcagatcaatggtaattatttaattttttccagttttatttttgtaaacagaaatcaattattatttaaacttcaaacaagcaaacaaccaaaaaaaaaaaaaaaaaccaaacaaaaccgagagagcccatccttctgtcacctgactgagtgggaaaaagggtgaaggggttgtgggaggctggggaaggggtcgcaagaagacccatgtagcttttaaccctaatgtggccgagacaagcaccttatttgtgctaacaagaagtgttttgttcattattactgtgattaacattagtattggtgtcgataacaaagctgaaatcacatatttaggatttaggtctgattaaaaaatgttggggtggatgttccaactggatcaggagaaaagaaaatgaaaacagcctggggagagggaagcctgatctgtttcctcactcgcttgctcgtggatgtcattttctgtcttcttgggggcggccaaaaatcgaccggtgtcggggaccagaggcggccccgcacgcccccgcgtgtgcgtccacgggcgtctgtgcagacggacactgtgccggggcgagctgacaggagttcacggctgcgatagaacatggagatgtcatgggcgcgacagagcctggcggggataccagcagcgtgtgtgtgtggacggcaacgttgtctgtgcgcgtgtgtgtgagtgagtgagggagagagagagagaataggtgtgtgtagaggctcccggtgcctctg

SEQ ID NO: 20865 - DNA, 2300 bp, Homo sapien
cctggggctgccgctgggccaggcatagactgaaccaataaagagatgtcacgtcaccttctcccgattgcctgtggtttgtgtattggtccatacagctgcatgactgggatctgttcctctggggatcgttcgcccctgcctggctggagtgttgagtctgtatgggaggtaggagctgaccatctgcacagtggtcggcccctctgcagcgagggtcactgagccaccccagagccggagccagcgattcccgaagcggccacggggcggcagctgtgcgctcgctcccgcgggggttctgcccctcttccccctcccaccttcagcgctctccaggccacgggcttgcgcatagtggggcgctcctgcccggtagcccccacgtgtcttcgcgccgctgcctcctcgccgcctggtttctttggcccagctctccaggggccacagtggcggaagctggaccggaaccaggcgccctgtgcatccgctccagaccaggtgcttcctgccctgaggcccggggcgaggggggcgtgcacacaaagagggacctcgcaggctgctgcccagacacccagtgagggggagctgtacccctccctgccctccagagtggggtttagtaacgttaacgaagagtcctggggcaggatcccctctctggctcctgctcccttcatccccatctgtaatgaggctaatcttaggaccctccttgtagcgatatcagagttagcgcttaatttttttttttttttttttttttttgaggcaaggtctaggtgtgtggcccaggctggagtgcagtggcgcaatattggctcactgcagcctccacctcccaggctcacgccatcctcccacctcagcctccagagtagcagggactacaggcacgcaccaccacaaccagctaatttttgtattttttgtagagatggggttttgccatgtttcccaggctggtctcaaactcatgagcccaagcaatccgccagcctcagcctcccaaagtgctgggatgacaggcatgagccaccaagcccggcctttactgcataaaactttagttcctgcttctttggaggaaagcaatggaggtgttgatcgtggggtcctgggctccaccccattcctgggcgggggggggggggggttggtagtcctgctgctgggtgcctgcctgcctgggggctcttgcagttgcccagatacacagacgggccaaagcatgagtatcacaagtgggtggcagtctggtagctgctgctgcctggctgtgcccagagcctctccctgtgggaggctccagtagggtcttgaggtttaccaccaagccaggataactgccccccatgaaggggccgggtgctgtggggtgagggccatggaccaccaagttggagttatgtgatcctgtagccaagaggcctatagttgtggggacctgttgggcatctactggaaggtcacaccagccccagcaccctaggaaatccaacttccccaccccacccctgacagccatggctcttcctctcaccctcctgggcttggaaatgtgtggatactgtgctgagggcttgggacacctgcccaggctggacacccaaggccagactgttagaactgttcccctttgggtgccccactcccgggtaggggtggtggagaggagggaagggcctctgtaaaaagaggaaccaggctgggtgaggagaggaggtgggggcccagggtcacgcggccccaacgggccggaaagggctctccctcacccccatcagcacagacattcgggcagggagtgtgcaaagccaaagggcagactcggacataagaggaggcagcttccctgcctcagtttaccccctgcgtgcatccaggcacctccctccccggctgccctggggcccgggtccccagaggcccggggtccctacagtggctgggggagcggaaggcgaagccctgaggggtggcggaccgagtcctgccagcgccggctgggggcggggccgggaggcccgcgctgctaggtccccgcccgctggtttcctccggggtcagccaggctccttatcaggcgcggccaggcagcctggcccttatctgcactgggccagcatcctccggccgctgcgccgccaggggtgagagggaggaaaccgggccgccgggggcggggagaaggcgggccggcccgggagccgctcactttccctgggggggacctacgcggagacctcggctatcctggccttccgaggcccacgaggaggcgcggcccaacgccg

SEQ ID NO: 20866 - DNA, 2300 bp, Homo sapien
ccctggcggcgcagcggccggaggatgctggcccagtgcagataagggccaggctgcctggccgcgcctgataaggagcctggctgaccccggaggaaaccagcgggcggggacctagcagcgcgggcctcccggccccgcccccagccggcgctggcaggactcggtccgccacccctcagggcttcgccttccgctcccccagccactgtagggaccccgggcctctggggacccgggccccagggcagccggggagggaggtgcctggatgcacgcagggggtaaactgaggcagggaagctgcctcctcttatgtccgagtctgccctttggctttgcacactccctgcccgaatgtctgtgctgatgggggtgagggagagccctttccggcccgttggggccgcgtgaccctgggcccccacctcctctcctcacccagcctggttcctctttttacagaggcccttccctcctctccaccacccctacccgggagtggggcacccaaaggggaacagttctaacagtctggccttgggtgtccagcctgggcaggtgtcccaagccctcagcacagtatccacacatttccaagcccaggagggtgagaggaagagccatggctgtcaggggtggggtggggaagttggatttcctagggtgctggggctggtgtgaccttccagtagatgcccaacaggtccccacaactataggcctcttggctacaggatcacataactccaacttggtggtccatggccctcaccccacagcacccggccccttcatggggggcagttatcctggcttggtggtaaacctcaagaccctactggagcctcccacagggagaggctctgggcacagccaggcagcagcagctaccagactgccacccacttgtgatactcatgctttggcccgtctgtgtatctgggcaactgcaagagcccccaggcaggcaggcacccagcagcaggactaccaacccccccccccccccgcccaggaatggggtggagcccaggaccccacgatcaacacctccattgctttcctccaaagaagcaggaactaaagttttatgcagtaaaggccgggcttggtggctcatgcctgtcatcccagcactttgggaggctgaggctggcggattgcttgggctcatgagtttgagaccagcctgggaaacatggcaaaaccccatctctacaaaaaatacaaaaattagctggttgtggtggtgcgtgcctgtagtccctgctactctggaggctgaggtgggaggatggcgtgagcctgggaggtggaggctgcagtgagccaatattgcgccactgcactccagcctgggccacacacctagaccttgcctcaaaaaaaaaaaaaaaaaaaaaaaaattaagcgctaactctgatatcgctacaaggagggtcctaagattagcctcattacagatggggatgaagggagcaggagccagagaggggatcctgccccaggactcttcgttaacgttactaaaccccactctggagggcagggaggggtacagctccccctcactgggtgtctgggcagcagcctgcgaggtccctctttgtgtgcacgcccccctcgccccgggcctcagggcaggaagcacctggtctggagcggatgcacagggcgcctggttccggtccagcttccgccactgtggcccctggagagctgggccaaagaaaccaggcggcgaggaggcagcggcgcgaagacacgtgggggctaccgggcaggagcgccccactatgcgcaagcccgtggcctggagagcgctgaaggtgggagggggaagaggggcagaacccccgcgggagcgagcgcacagctgccgccccgtggccgcttcgggaatcgctggctccggctctggggtggctcagtgaccctcgctgcagaggggccgaccactgtgcagatggtcagctcctacctcccatacagactcaacactccagccaggcaggggcgaacgatccccagaggaacagatcccagtcatgcagctgtatggaccaatacacaaaccacaggcaatcgggagaaggtgacgtgacatctctttattggttcagtctatgcctggcccagcggcagccccaggtccagggggggtctggttggaggtctctggacagtcaggggcagcatcagcagaaaccctgggtgtcggggggctgtgggagtagcagcactggtccccgcgttgacaggtgccctggtgggaagatggtgggtgtgaacccct

SEQ ID NO: 20867 - DNA, 2300 bp, Homo sapien
caaccacccctctctgtttagggccaagttctctgcagcctgtggtccccctgtgacccccgagtgtgaacactgtgggcaacgacaccaggtagggctaggccaggggaggcaaaggagcaagagggtcttgaaggtcatagtccctgctcacctgtccccggtgcgcccccagcttggtggccccatgtgggcagagcccatccatgacctggattttgtgggccgtgtcctggaggctgtgagcgctaaccccggccgcttccacacctcggagcggatccgaggggtcctgagcgtcatcactgaggtgagagccgggctgtgacggggaagggggctccacctgtgcccgtccatctccactcatgcccatcctgtcccccatcgcaggagctcccggacgtgcctctgtactacaccctggaccagctgagcagcaccatccactgcaacacaccaagcctcctgcagttgcggtaagagcccctggggtcgggaggagcctgtcccagaccacagggtggcctggggcaagtccagggattctcatgcatagaacttgcgagggggtggggagaacccggtgcactgtctcattcctgtaatcccagtaccttgggaggctgaggcaggaagatcacttgaggccaacctgggcaacgtagtaagaccctatctctaacaaataaataaataaatatatatgtacacacacatacatatacacacacatacatacgtatgtatacacacacacacacacacacacacccattagcctggcatggtgatacatgcctatagtcctaactactcaggaggctgaggtgggaggatcatttgggccaggagtttgatgctaaagtgagctatgatcatgccactccagcctgggtgacaaaatgagaccctgtctctttaaaaaaaaaaaaaaaaaaaaaaaattaggccaggcttattggctcatgcctatattcccagcactttgggaggctgaggtgggcagatcacttgaggtcaggagttcaagaccagcgtggtcaaaatggttaaaccctgtctctactaaaaatacaaaaattagctgggtgtggtggcacatgcctgtagtcccagctacttgggaggctgaggcacgagaatcactggaacctgggaggaggaggaggcggtggtgagccaagattgcgccactgcacatcaacctgggcaacagagcgagactccatttaaaatataataataataattagaaaaagaaaaaggccaggtgtggtggctcatgcctgtaatcccagcactttgggaggctgaggcgggcgaatcacttgaggccaggagttcgagaccagcccggtcaacgtggcgaaaccccatctctactaaaaataccaaaatattagccaggcgtcatggcacatccctgtaatctcagctactcaggaggctgagacaggagaattggttgaacctgagaggcagaggctgcagtgagccaagattgcatcattgcacaccagcctgagcgacagagtgagactccacctcaaaaaaataataaataagaaggccaggcacggtggctcactcctgtaatcccagcactttgggaggctgaggcgggcggatcacaaggttaagagatcgagaccatcctggccaacatggtgaaaccctgtctctactaaaaatacaaaaattagctgggcgtggtggcacatgcctatagtcccagctattcgggaggctgaggcaggagaatcgcttaaacccaggaggcggaggctgtggtgagccaagattgcgccattgcactccagcctgagcgacagagcgagactccatctcaaaaaaaaaaaaaaaaaaaaaaagaaaagaaaagaaatgaactctgtagccatgagcccttgccgaaggtagtcttacctacgctggtcagcttgggctttggggtcaaggagtccggcatctccctcataatccctgctgttccccaggtcggccctcctccacgctgacttccgggtctcactctcccacgcctgtaagaacgctgtgaagacggatgcccctgcctctgccctctgggacatcatgcgttgctgggtgagggcagggctgacctcatgcaggtgggagggcaggtggtggtcacctggaggtcccttgggcctagtattccctaacctctgacctctgcccccaggagaaggaatgtccggtgaaacgggagcgactatcagagactagcccagcgttccgcattctcagtgtggagcccaggtaggggcaagcac

SEQ ID NO: 20868 - DNA, 2300 bp, Homo sapien
cactgggaaaggcgattttggcagccccctcggtgactgtcgtctcctggacttcacgtggacgttcttctccgtagggcccggtgccgttctccatcgctgctgtattcggcagccctggagactgccactcgaaaaaccgggctctagagagcacccgggcggagcggaaagtgaggcttagccacagagacgatccttgcatgagacatccgctggcgcctccgcccgccaagcctggttcggggggcgggggagggcacagagagggtcagagagccgcattccgggcccggggatgtcctacatatctatgaggtagggactaggaaaacctgcggcctcggtaagctgatatcccctcgttttggggatgactggtccctgtggagccgatgccctcgtgcaggcccgccccgagtccgaatccctccccgcgctgcctagcccgtcctcacctgctctcgtagccacagaaaaccgaattagtcaaggtgcacgtttcccgaattaggacctgggcgccgccatgttggcacagtgggtgggcgaatcacatgatagtggttggccagtcaatgaggaaacgtacggtgggcggccgggatcaaaatgaaagccataaaggaagcgcgctgatcgtgctgttccgggggtgttaatcacagtggatcccctgggagaggacacgtccctagtcccatttcacagatgaggaagttgtggctcagaaaaggggcggtaagcggagaaacccaacacttattggtcctcttctgtgttctgggtgctatatacacattatttcagagcaccctgcaggaatgactcaggctctggagttggatttaccgggtttgaatctcagtcccatcacatgctctgggcaggttactcccgcggcttcacttttcttacctattaaatgagaatcgtggtttctcagatagagcaaagattaaatgacagattcctggaaagtgtgcaaagaaccactctaacattgtaagcgctcggtaaagttctaaccagtgtatgaaggcaggacagcgaagtggtcccggctacctgggttccagtctcagctcgccctgcgacttgttaactctgaacttaagttaccgcttttgcaaaatgggcagaacttttttttaccatttgttactgggttgtagtgagaagtaaacgagttagtgcaggtaaaatgctaacagaacctagcatccggtaagcatcataaaagtcttaggtcttattgtcgcttttgagcctgtgtttaaatcctggcacctaccatcacttccttgctgtgtgatgatcttgaccagctttcttcatttctctgtgcctccttttctttctttctttcttttttttttttttttgagacggagtctcgcccaggctggagtgcagtggcatgatctcggctcactgcaaccaccgcctcccgggtgcaagcgattcttctgcctcagtctcccgagtagctgggattacaagcgcatgccatcacgcccggctaatttttgtatttttagtagagacagagtttcaccatattggccaggctggtttcgaactcctgacctcaggcgatccacccacctcggtctcccaaagtgctgggattacaggcgtgagacaccgcgcccagctgcctttattttctatagtgtgtctgtagcagttctcactaaaaaatgttactgtgtagtttaaacgagctaattcccataaagaatgtaacgcagtgcctgccacaataaacagcagtcattattgtttttgttttacaggaaactaaagttcggaaaggtagagcgacttgcccaaggtcgcgggactagaaggtggcggggccaggattcgaaccatcgagctgagccgacgtactggcgaggatcccccaggggcatagagaggagacggagccggttagaaggggcgcgctcggagctcggctggcctcgcctggagggcggggcccgagggcggtgcgcgggcggggccggggccgctcctccctggcctggctgcggcggcagcgcggcttgcgctcgctcggcgctcggctggggcggcctggcccacaatgaatggccgccgcggctgccgctgctgctgaggcggaggccgcggaggccgcggaggcggaggccgaggccccggcgcagcggggcgcgccccgggcccaggcccggccccagccgccgctgcggagcccgccgggaccccccggagcgcggccacggcgcaggtgaggcggcccgcctcaggcccggttccggcctcctcca

SEQ ID NO: 20869 - DNA, 2300 bp, Homo sapien
agcccgactcctcctccccctccccctccccctccggcatccacgagaacctcctcacttttccgcctcggaccctccaacttccccggatccccggtacctgccccggcccgacctggccccctccctcgctgggagacgggggagcggtccaggtacgatcctgccgcccccaagccctgaagctcgggctggacgctcaaggccgcccgcggtagctgggcctccacacactcgcctgcccgggcacagtgcaggctgcgggcccggctcctcctcggtccgagaaagcacccaggccctccccactcagccctcgggccgccccggctggaggaggccggaaccgggcctgaggcgggccgcctcacctgcgccgtggccgcgctccggggggtcccggcgggctccgcagcggcggctggggccgggcctgggcccggggcgcgccccgctgcgccggggcctcggcctccgcctccgcggcctccgcggcctccgcctcagcagcagcggcagccgcggcggccattcattgtgggccaggccgccccagccgagcgccgagcgagcgcaagccgcgctgccgccgcagccaggccagggaggagcggccccggccccgcccgcgcaccgccctcgggccccgccctccaggcgaggccagccgagctccgagcgcgccccttctaaccggctccgtctcctctctatgcccctgggggatcctcgccagtacgtcggctcagctcgatggttcgaatcctggccccgccaccttctagtcccgcgaccttgggcaagtcgctctacctttccgaactttagtttcctgtaaaacaaaaacaataatgactgctgtttattgtggcaggcactgcgttacattctttatgggaattagctcgtttaaactacacagtaacattttttagtgagaactgctacagacacactatagaaaataaaggcagctgggcgcggtgtctcacgcctgtaatcccagcactttgggagaccgaggtgggtggatcgcctgaggtcaggagttcgaaaccagcctggccaatatggtgaaactctgtctctactaaaaatacaaaaattagccgggcgtgatggcatgcgcttgtaatcccagctactcgggagactgaggcagaagaatcgcttgcacccgggaggcggtggttgcagtgagccgagatcatgccactgcactccagcctgggcgagactccgtctcaaaaaaaaaaaaaaaagaaagaaagaaagaaaaggaggcacagagaaatgaagaaagctggtcaagatcatcacacagcaaggaagtgatggtaggtgccaggatttaaacacaggctcaaaagcgacaataagacctaagacttttatgatgcttaccggatgctaggttctgttagcattttacctgcactaactcgtttacttctcactacaacccagtaacaaatggtaaaaaaaagttctgcccattttgcaaaagcggtaacttaagttcagagttaacaagtcgcagggcgagctgagactggaacccaggtagccgggaccacttcgctgtcctgccttcatacactggttagaactttaccgagcgcttacaatgttagagtggttctttgcacactttccaggaatctgtcatttaatctttgctctatctgagaaaccacgattctcatttaataggtaagaaaagtgaagccgcgggagtaacctgcccagagcatgtgatgggactgagattcaaacccggtaaatccaactccagagcctgagtcattcctgcagggtgctctgaaataatgtgtatatagcacccagaacacagaagaggaccaataagtgttgggtttctccgcttaccgccccttttctgagccacaacttcctcatctgtgaaatgggactagggacgtgtcctctcccaggggatccactgtgattaacacccccggaacagcacgatcagcgcgcttcctttatggctttcattttgatcccggccgcccaccgtacgtttcctcattgactggccaaccactatcatgtgattcgcccacccactgtgccaacatggcggcgcccaggtcctaattcgggaaacgtgcaccttgactaattcggttttctgtggctacgagagcaggtgaggacgggctaggcagcgcggggagggattcggactcggggcgggcctgcacgagggcatcggctccacagggaccagtcatccccaaaacgaggggatatcagcttaccgaggccgcaggttt

SEQ ID NO: 20870 - DNA, 2300 bp, Homo sapien
acctgttcaacaacagccgcagcgccgtggtggagctgccggcggctgtgcagccccagtctttccagcagatcctcagcttctgctacacgggccggctgagcatgaacgtgggcgaccagttcctgctcatgtacacggctggcttcctgcagatccaggagatcatggagaagggcaccgagttcttcctcaaggtgagctccccgagctgcgactcccagggcctgcatgcggaggaggccccatcgtcggagccccagagccccgtggcgcagacatcgggctggccagcctgtagcaccccgctgcccctcgtgtcgcgggtgaagacggagcagcaggagtcggactccgtgcagtgcatgcccgtggccaagcggctgtgggacagtggccagaaggaggctgggggcggcggcaatggcagccgcaagatggccaagttctccacgccggacctggctgccaaccggcctcaccagcccccgccaccccaacaggctccggtggtggcagcagcccagcccgccgtggctgcgggagcagggcagccagccggtggggtggcagcagcagggggtgtggtgagtgggcccagcacgtcggagcggaccagcccaggcacctcaagcgcctacaccagcgacagccctggctcctaccacaatgaggaggacgaggaggaggatggtggcgaggagggcatggatgagcagtaccggcagatctgcaacatgtacaccatgtacagcatgatgaacgtcggccagacaggtgaggtgccgtcctgtcccccatcccaccagccacccctgctcctcctgccactcgcgtgccactctctccctgcagccgagaaggtggaggccctcccggagcaggtagcccccgagtcccgaaatcgcatccgggttcggcaagacctggcgtctctcccggctgaacttatcaaccagattgggaaccgctgccaccccaagctctacgacgagggcgacccctctgagaagctggagctggtgacaggtgggccggtctcgccccagatctctcccctccgcagctttggagccggctggcctgggctgggctgggcagctggttaggagcccccagcacctcagtttccctatctgtgctgtagtgttggtaacagccaccctaagggtgggggcgttggtgagatggaggagctgatacagcaaggcctggcctctaggtttctggcttaaggggtcggggcgagcattggctattattgtttggccgcatgggtagattagctacttcccgggctcctgtgaaggccagctactacctaggttaggaatttggacagtcacaggggcgaatgcctgtagtcctagctactcaggaggctgaggtgggaggatcccttgagcccaggaggtcaaggctgcagtgagctgtggtggccactgcactccagcctgggtgacagagtgagacttcatctcttaaaaaaagaagaagaagactgtgtttggtccttgggtcagagtgcctaggtgtgagcctccactccctgttggtcctgctgagcttgggctcatctctagctggtgacagccagcgtgcccacctcacacaggcttgcggcacgactggccacacagcaggcaccccgaggatggtgaagcaaccctttctgtcctttcctgagcactgatgaggttgggggagccccaaggagcctcccctgactgcccttggtgggtagagatgtaggggagaaggtccctgggtgagttttcttgggacccagagcccagcagggagggcctggggtgttctgagatgaggcctggtatcatgggggctgtggcggtttgggggcaccccaggccatcctccggcttcctctcaccaggcaccaacgtgtacatcacaagggcgcagctgatgaactgccacgtcagcgcaggcacgcggcacaaggtcctactgcggcggctcctggcctccttctttgaccggtaaggcccttgccagagccccagggaggggggtggggtttccccatgtcccccccaccaccaacttgagcgctgactccctccatgtcccctgcccccaggaacacgctggccaacagctgcggcaccggcatccgctcttctaccaacgatccccgtcggaagcccctggacagccgcgtgctccacgctgtcaagtgtgagtgttggcccagctggacgaggcgtgggcccggggcacgcaggttgacgttttttcccagccttggctctcagagagggctagagttcagtgttgag

SEQ ID NO: 20871 - DNA, 2300 bp, Homo sapien
tggcgtatgcctataatcccagctactcgggaggctgaggcaggagaattgtttgaacccaggaggcggagattgcggtgagccgagattgcaccattgcactccagcctgggcaacaagagtgaaactccatctcaaaaaaaaaaaaaaaaaaatacagaagttaccctggcatggtgacgagcacctgtaatcccagctacttgggaggctgaggcaggagaatcgcttgaacccaggaggcagaggttgcagtgagctgagatcaagccactgcactccagcctgggcaacagaacaagactctgtctcaaagaaaaaaaaaagagtaaaaggcaggcatgcgtcctggaaacaggtgcacacaggacaaatggcatggaagcagaaaggagataggtacacaggcccccagccctctcctgcaacaggaaaccagtatagacccagaggacacagtagagaggaacccacggacatatacacatagagaggttcaggtgcacacaccgagaaagtgcaggcaggtagacagcaagaagataactgcccacagagaggacgggcactgtcgcaaaagggacaggtgaacacgcacagagggatctggcttggttacccccaggggctcaggtgggcagggtgggtcaggaaggcttacctctctgttattcctctccaaaaatgctacggctgttgggctgaccatatggtccttcatttcctggaggtaaggacagcattagggaggaaagacactcaggctgggcgcggtggctcacgcctgtaatcctagcactttgagagaccaagccgggtggatcacctgaggtcaggagttcgagaccagcctgatcaacatggtgaaaccccgtctctactaaaaacacaaaacttagccgggtatcgtggcaggcacctgtagtcccagctactcaggagactgagacacaagaatcgcttgagcctgggaggcggaggttgcagtgagccgagattgcaacactgtactccagcctgggcgacagagcgaggctctgtctcaaaaaaaaaaaaaaaaaagaaagaaagaaagaaaaaaaaacacactcaaaccttcccccactccccgcctgcaggacctttcctgacctggactgcctctcgcatccgctccacgaacacctttctctcctgcaggtccccggctgggagcttgaacttgcctgggttggcttccactatacgtgggctgagagtcaagggtcaaggccggagccagatatcatccccgtccctaggggtccagccctacccgaaggtgggctgccaccgcaatgggctctcccatgccaccctctgccacaaagccccaggatatcgatggtctcttccaggtcctcgaggtcccactcgatgctgcgcaggccattccgcagctcattggtcgtccagtccagctcctcgcgtccgaccgccgcgctttcctgcaggagctcgcaccagcgctggtacagcccgcgggccgtgttcaccgccttctgcacctcgctgcgggcaggggcacggcgggcgcggctgggggcaggcggtcctcccgcctgcctctgcccccgactgcaaacccaaacgcatgggggactccggagacccctatatacccctgcgtgcgcctcccactctgcaccccgacggccttgcccagcccgccgggcacgctggggccggcacccgggcactggctggcttgggtacagagcaccctccgccctcccccgtcgttgtcactcaccctcggactacaaaaaaggggtcttcgagagacatgtcagtcccttcccccccaggccgaacccccctcccggcctgggttcgcgggctggttccctcccaaccgaggagaacgcgccgccacccccgcccccgtcacgccaccatcgagagccggaccgccaggggagaaagagaagcctcggaggcccgacgtgcggacacttccgccctctcctcagccatcttggttgtgggcagaggcagcttccggtgcacatgcccccgccccttagccctctcgtgccgcaccgtagggggcggtgtcggagttctgtctgggcctattcgggtccgagttcggaatttcggttcaaggcccagttcctcggattgttcctgcgcaacttcagtttcccttccaggcacgggcaatgtaaataatgatagcctccctcatctctggcggctgggtattatggctggggaaggggctcattcgattcgttgaagcttttcatggactccctgagctggcacctgggagatcg

SEQ ID NO: 20872 - DNA, 2300 bp, Homo sapien
atttgctactgctgtgaaagggggccactggggcctccagctcttcggtctctagcgtacgccagcccttgcttgtaggcggtgacccgccccgggctacgggttcccgtgattcgtaccaagccattcccccgcagtttcccgcgacaggagctccacgggtgggttcagagctcgcacggctgcgaacccggcgcgcacgacagtccccgtgaacacgtggctgccgccccccaaacaagggggccgagttccgtctccgcgttcggggaggcggggttaggttgggagctggaaacccagcaatgcagagacagagcagatagaaaatctccgccctaccctccgctacgcgccgtctctccaagaaatactaattccacttcctccaaaaataggatgcagaattgttcgaatggctccattcattcctggtgcgggccctttaaggggtggtgcgccccccgccccctttccgcccgcactggctcgcggcgccttcccgccaccagcgcccgctgacttccacaactaaatttggacggagtgacgtagggcagtcgcgcgggccgcttccggttgcccatattaggacagggcccgtgatcgccttagcggccggcggcggggcttccggggggggggcgcggaggggcggggctttgcgctccggccacgcccctccccatccccgacccgggcagccggagcaggctggagccccaggcttcctgactcgcattccagccgggtgggggaagaggagagtttcacttccttccctccaggggccaggaaggcgtgacgccaggaaagcaccccgcagcgggtaggggcgacctgagggctcccagggacgccatctcccagagacgctgcagaacgaccctgcatacacaggagacgacccgctgaggcccccttcatcccatctctcctcttcccaattatttcccccatacaaggccccctcccaggttattcctgacccctgccccacactgatcttctcaggccttgggacaccctcccgtcccgcccttcccccgcacgctgggaactcaaaagttattcccccctaaaatacccttcccaaactcgtccccattcaacgatggtgccagactgcgacgacctgccgaagacgcaggccgtccccaccccgctaaccttaccacggagaccccacaatgatttccccagcccaggcgctatctctgagaccccacgcagcaactctgacgcgcaagggggcgaccctccgaggactccctcagataacccgcccaccctccaggggagaccaggccccctatcactcaaaaaaagtgctttcccgaagctccccaacacacagcgccactgtcacacatagggacgaccctgagtccctccgctgatattcctggcccctacccagacggagaccccacacacagagggcccccctggagaccatcctcaaagccaccacccgctacccccaggctcgcacccagaaagactccgcgcttctgaagaaacccacctccacgcactttctcaaaggtgacctccccccgctgctggcatatctgggaccccctcacgaccacctcgccccaaggcgacctcgaagtgcccccaactccgccacttctcaggaaagagattgggagaatgcggcagaactccccggaggagcaggcccgctcctcaccgcgcccccgcagggagaagggaggaccacctctcccccagaccctagccaaacctgacactcgggaccctgggatgggacgatctcccaggtgccagctcagggagtccatgaaaagcttcaacgaatcgaatgagccccttccccagccataatacccagccgccagagatgagggaggctatcattatttacattgcccgtgcctggaagggaaactgaagttgcgcaggaacaatccgaggaactgggccttgaaccgaaattccgaactcggacccgaataggcccagacagaactccgacaccgccccctacggtgcggcacgagagggctaaggggcgggggcatgtgcaccggaagctgcctctgcccacaaccaagatggctgaggagagggcggaagtgtccgcacgtcgggcctccgaggcttctctttctcccctggcggtccggctctcgatggtggcgtgacgggggcgggggtggcggcgcgttctcctcggttgggagggaaccagcccgcgaacccaggccgggaggggggttcggcctgggggggaagggactgacatgtctctcgaagaccccttttttgta

SEQ ID NO: 20873 - DNA, 2300 bp, Homo sapien
actaggttcacatcaccatgcctggttaatttttattttaaaaaaggtttttggagagacagggtcttgctatattgcccaggcttgtctcaaacccctggcctcaagcaatcctcatgctctgcctcccaaagtgctgggattacaggcgcagacaccgtgccctgccagatgaatcttaaagacataatgttgaaccgaagaaacaagaaactgtagaatatatactatatgattattccatttatataaaagcccaaaagaagcaaagtaaaattgtattggttaggaacgcataataaggtagtcaaactttttttaaaaaagcaagatatgaataccataaagtcaggtagcgattattgctggaataaggggctgtgtaagcgtgttggcaaagggggttctgcagaggtggtgatgttccatttctagccctagacttgatttcatgagtgttcatttcagaccaatttcttaactccgtacctttatgttttatgcatttttctttgtgcttattgaatttcaccacacaaaaagcagaatgggaagtaatcaaagtggttctggagagacgtgagtatcaagcaaactataccacccagaacccctatccagccaactaggacctggttaattatttcctcctgggagttcagacttgtcacctctggggtctccaaggtagaataaacctttaattccaacttgcaggagtccttgtgatttgaaacgttcacagaagtaaccccaaaccactctctccactttcaaaaatggtcttttgctaaacagagcaaatttgtttagagactgacgaatcgcacctctagacacaaatccccttctcttttctgtcttttaagtttttttcctgcctccatcctgccttctccttgcaagatgctggggagcgtccggctgtctgcaaccgaaatggaacggggtggaaaacaggctttcctcccaggggaggaggaagcaccccaattcccccctccctgcctcccaaccatgcgacgctcccctctctcccccacaaactccgctgagcccggtacccccgcgcctccacgagcctccacgattggtcgcgggccctcatgtgtcgacactctgggtgggtccttctactgttaaactcatcaattgctccccttttccgtttgctggccagtggttcagacctttgcgcccatttttttttcctctttaccttcttctacccgcaaccctccacaccagtcttattttagcaaaacctagagaaggaggaggtggagggatttggagggtggagaggcattgccgcatccaggggcagctattgagtggctaagcggagggcgcatacctctctctctctctcttttccccctgttgggaattttcaggatttcactgctgcaatttaaccccaagatgaggcaccattgagcgaaacgctgtgcgcacatacacactcacacttcctccgggagcagaagaggcagccgttggtgattcaggaagaaaaaaaatttttttttttttttttaaacctggaccctgcggtgtgaagactccttaggaaccctctggagcgtcttactccccttccctcctctttcccttccctttcatcttctttgtttttattttattttatttttggagctacagatctttcagcatttttaaggtctaggaactccagcaaaacagaagggcacttaattttttttttttttttttttgccctccccacccagacctgggtttcgtctttctttatttttaaatatatatatatttttttattttttattttttatttttttttaatgggccgagcgcactccttttgcaagatgccagcctgacccggacctcggaggaatttgaagcttccactgcgtcccggggggggcgtcctttgcaaaccgttcgcgtcttaaagggggtgtgcgttgggtggattttttttttttaactgtctctttttttttttttccggagtgggtggactggggattgcctggattccttcctcggttattttttgcctcgcttctctctcccctcccccctcctccccgggcccccgcgccccgcccccgcaccctcctcccgcccctccttctccggggtcagccaggaagatgtcccgagctgctatccccggctcggcccgggcagccgccttctgagcccccgacccgaggcgccgagccgccgccgcccgatgggctgggccgtggagcgtctccgcagtcgtagctccagccgccgcgctcccagccccggcagcctcagca

SEQ ID NO: 20874 - DNA, 2300 bp, Homo sapien
catatgaaggaatattattcagccttaaaaaaggaatgaaattatgacacatgctacgacatgaatgaaccttgaggacataatgctaagtgaaatcagccagtcacaggaagacaaatactgtatgattctgtttatatggggtccctagagtggttaaattcatagggacagaaagtagaagagtggttgccaggggctgggggagagggaatgggaagttagtgtttaatggggacagagtttcagtttgggaagatgaaaaaattctggacacgaatcatggtgacggttacacatctatgtgaatgtacttaatgccactgaaacgtacaccttaaaaatggttaaaatgatcaagtttttattatgcatatatattttttgagacagagtttcgctttgattgcccaggctggagtgcaatggagcaacctcggctcactgcaacctccacctccctggttcaagtgattcttctgcctcagcctccccagtagctgggcttacaggtgcccgccaccactcccagctaagtttttgtatttttagtagaaacgggatttcaccatgttggccaggctggtctcgaactcctgatttcaggtgatctacccaccttggcctcccaaagtcctgggattacaggcatgagccactgtacccggctatgatgcatatttttccacaataaaagaaaaagctaaagagtcacttatgttgcatgttgtcctcactctggagctagtcttaaggagcgtttgccacctggagctttgccagttcctatgcagaagaaaaaagtggtgtagagcactgccgtggaccactttcaaaagttcaatagaactttccaaaaatgttccctatctccaatgtttaataaagtagctactagatacatgtagcttttgaggactagaaatatggcttgtaccactgaacaacaggattttaaatgttgtttaattttgatagccacatgtggctactgccttggacactgcaacattagagagatttgtattggttattaaatgcttcaacctgggagtgacatgtttcatttccactgagaactcattggtcagaattagtcacatgaccccagcagaccacaagggggccaggaaatgccagcttacatcttacacatgcctgtatatggagaactggaaatatttggtgaacagctctaatgcctgtctcagagaataaatctttttgagatccagaaaggagaaaaattggctattttatttcaggaagagaagataagaaatatggagacttaatgtattatctattgctgtgtaacaatttaccaaagccttggcagctttaagcaacatttatttcacagtttatgtgagtcaggaaccagggtgcagcagtttcagggtctctcttgaggctgcaatcaaggtatcaactggggcttcgttctcatcttaaggcttgactgggggaagatgtgatttcaagcttaaacttgtggctgttggcagaatactatggaaaaggaacactcagagaacaattatagcaataccaaaagcctcttgaaattaaaaaatataaaagcataaataaaaaactgaacaaaaggtggaaagataaaattagagaaatctctcaaaaagaagattaagacacaatggaaatacaaaatagaaggaaaggaacagataagagaatcagtccagaaagtccaacatctaaataataagtttaaaagagaatcatgaaaaaagggtgagaatcttagctgggtgtggtggcacactcctatagtcctcaggagcctgcggtaggaggactgttttgagcccaagagttcgaggctgtaataagctatgatcacaccactgcactccagcctatgtgacaaagtaagaccttgtctctaaaaaaagggggtaacaatcatcatactaagtgcccagtacaatgactgaaaatagacctaaactaacttacatcataataaaattttagaacacaatggaaaaagattctaaaagctactagagaaaaaaaatgaggtcatatacaagaaatcaggagtaagaatgcttcaaacttcccaacagcaatactggaattgagaatacgttggagcaatacttcacatttttgaagtaaaatgatctccaaaccagaattctatacccagccaaactaccaatgaggtataaagctaaaacaatagcatttcatacatagaagtctccaatatttacttcctgagacagattagactgttcaaaaatggctgcacaatggctcccattttacac

SEQ ID NO: 20875 - DNA, 2300 bp, Homo sapien
attgtgggccaggcttagtggcgcacgcctgtaatcccagctactcgggaggctgaggtacaagaatcacttgaacctgggaagaggaggttgcagcgagccgagatcacaccactgcactccacagcctgggagacaaagtgagatcagtctcaaaacaaacaaacaaacaaacaaacaaacaaacaaaaaaacgttaaaatgaaggctatagtttagattcatcccccccacccaaggccaaccacccataaccacacaaagtttgtcatcttgattcccctgaaatgctagctctaatcataaatgaaacatgaaaatgtaagttttacatccttgtcagcatgattcagtgaaattaaaccaatcggctgtagacaaatgagcttaaacgggtctatttgccttaaaaagaagttaatgtaaaacagccaatcacaaaaaagctcaaaatacttcctcctttatgccttataaacttgccctaactgctgtaagagaacttcttaccacttgatttgacatctcctgaatcaagacttgctgtatgacaaagaacttttaatttttttctaactgtatctgattttatatatgtatgtatgtatgtgtgtgtgtgtgtgtgtgtgtgtgtgtgtgtatatatttgttttgttttgttttgttttagacagtcttggcctatcattgagctggagtgcagtggcatgatctcggctcactgcaacctctgcctcctgggttcaagtgattctcaagcctcagcctcccgagtatctgggattacaggtgcccactaccatgctgggctaatttttgtatttttggtagagatgggcgttcactatgtttgccaggctggtctcaaactcctgacctcaggtgatccacccgcctcggcctcccagagagctgggattacaggcgtgagccaccgcgccaggcctgattatatttttgacactaaaagtatcgtatgcaggaagacagctggcacacacggaaacttcatgcaaatagaatgaagtatgctctctaaaagacaaattagaagaaggtgccctatcctccaacttggagaacacagcctaggccggacttcagccccattctcatgccctcggccaggcacacttgttcagggcacaacctgcacaatcgtacacagtggccctgactatgtctgtatgcaactacaaaaacaataggccggacgcggtggttcacgcctgtaatcccagcactttgggaagccgaggtgggcagatcacaagatcaggagtcccagaacagcctggccaatatggtgaaaccccgtctctactaaaagtacaaaaattagccgggcatggtggcgggcccttgaagtcccagctactcgggaggctgaagcaggagaattgcttgaacccgggaggcagaggttgcagtgagccgagatcgcaccactgcactccagcctaggcgacagagcaagattcagtctcaaaaaaaaaagtgaagagaaaagaggatccggtatccaaatgtgttttatataaaatgaatcgttttcagtgcactgaggaagttttctatttaaagaaatcctgctgtgaactcttttgtgaagaatgctttcctaatggaattagtcaccactgagtcatttctgcaaacttcaggtttgcggttttgcctaagcaagatctggccggagaagtgagataaattatagatgtcgctaataaattacagattactcaaaggcaaaagaggaaagaaaaaaaaaaattgactcgtgtatatgaaccgaattgagtcaggggtctccaccggcgcttaatcatggccgagatcctcctgcttctgcctgtcctttggtagacacacgctacaagtcagcttctgtccatcgaggaagggaacgaactaacaacaaagaacaattaagagaaggttggccccgtgaaaacaagggaccattgaagagcgagtaaaggcttggccacgttctggccccgccccaccccggtcgccctgacaacagcgccggcgtctgggctgagcttcggactcgcagccagcctcccacaggccaccgcgcgcgctcacttgcgcatgcgcctcggagctggcttcaaccagcgaaggctgaacccgcttccagggtcctcgccgagctgggagttaggatccgagggggctaagagggataagaaaacttctctgggtgcccacgtggtactgagcgcccttgggagggctctggagaagaccatcgccttccagggtagctccctccctcaaaggtttgagat

SEQ ID NO: 20876 - DNA, 2300 bp, Homo sapien
ggaatagtagtaatattgtcatcacttctcaccctgtctttgataaattgccagttgaagtgtctgcttcatcactgagaaaagagtgtgttctttcctctctgaatccccaggaccagacatatagcaggtgtccaatgaacagctcagctgttgaatgaacaaatagattctgttaggccctacaaggcataaaagtaaattcagtctgggcacagtggctcatgcctgtaatcccagcactttgggaggccaaggcgggcagatcatctgaggtcaggagtttgagaccagcctggccaacatggtgaaaccccatctctactaaaaatacaaatattagccaggcatggtggcgggcacctgtagtcccagctacctgggaggctgaagcaggagactcacttgaacctgggaggcagagggtgtagtgagctgagaccacaccactgcactccagcctgagtgacagtgagactccgactcaaaaaaaaaaaagtaaattcaaaagccattcacctgtgcagaaggcagggccaggctaatctgaaggctctaagagaagtatccacccacttcttctgtaaaaggccagatggtaaatattttagattctttgggctctctcttcctctgtggcaaccactgaattcaaccctgttgcagacatagacaatagataaatgaatgggcccggctgtttgtaggtaggtgaaaaatggcttcccttcacctttataggttctttggctgggctacgaattaaattgacatgtaaacagacagggcaaaagccatatttaattatgtacctatgcaggggagtcccacaaaatacaagactccaaaaaggatcagagaggctgggcccagtggctcatgcctgtaatccaggcactttggaaggccaaggcaggcagatcacctgaggttgggacttccagaccagtctggccaacatggtgaaaccccatctctactaaaaatacaaaaaatagccgggcgtggtggaaggtgcctgtaatcccagctactcgggaggctgaggcaagagaatcacttgaacctgggaggtggagagcgcagtgagctgagatcacgccattgaactccagcctggaccacagagcaagactccctctcaaaaaaaaaaaagtatcaaagaaaagaataggggtttggggcttctgggaggatggtggtaacacaagttatgggagggtaaggggagaaattgtatgatggagaaagtctgtcttgttaagcaaataaaaaagtcttgcaggtaataaaagttgtctcagagcagccctcagaaggatacatgattgggaatggtttcactcttccctagttaataagatcgtaggaaagcattcctctttctgtctttaggcagataagagaaattcagagaaaacctctccttccctgcatttgctgttcccccaagtgcccttattttgaagcaatcagcagacaaaagcgcatatccctgtgttccaatgaaattttatttacgtacgctgaaatttgaatgttttattttcataagtcgtaaaatagtttttcccccacctaactatttaaaaatgcaaaaacagagcagtggttcacgcctgtaatcccagcactttgggaggcaggaggattgcttgggccctggagttcgagactagccggggcaacatagtaagaccttgcctgtgcaaataatttttcttgagacggagtcttgctgttgttgcccaggctggagtgcagtggcgcgatctcggctctttgcaacctctgcctcccgggttcaagcaattcttttgcctcagcctcccaagtagctgggactacaggggcccgccaccacaccctcgctgaccggctgcagcgcgcaggacagcacgcctgggagggcggtgccaggaggcgggcctcggattgggcctcacgtagtgggctggacagaggatggagcctcttggcgtaagcgcggttgggcggggcattcctggattggcccactccggcgtcgcagaacgcttggcgtatcgtccttcagccaatcagcgtggagctgctgcctcgccccgcctcacgccggcgtcctgggggcgcggagagggcgcccaggttcaccgcgctctcagcgcgcacttccgggcacggtcagggcgtgacgtcgggaggagggcaggtaagtgccggcgggcggaggagcggggagggccgggggtccggcagccgcctcaccctggcctcggagctgcccggcgcgcccttccgcgtcgggggacgcggagctg

SEQ ID NO: 20877 - DNA, 2300 bp, Homo sapien
tggactgtgcgtaggaggccagggggaaaaggggacagggaggctcagagttgcctggagatggggggtcctcagccatgagtggactctggtctaccagagggcagttctggaccccctcccctgccgcccctgaaatgtcctctcctctcctctagcctacgaggacaagcagaaactcaagcggaccgagatcatcagccgctcctggttcccctctgcccccggatccgcctccagcagcaaggtcagcggcgtcctgaagaagctggcacagagccgcagaaccgcgcttgccacctcccccatcaccgtcggggacctgggcatcgtgcggcggaggtctcgggacgtcccggagagcccccagcatgcggccgacacccccaagtctggggaaccgcgggtaccagaggaggctgcccaggaccggcccatgtcccccggagactgtcctccggaaacaactgagacccccaagtgcagcagcccgagggggcaggaagggagccgtcaggacaagcccctgtcgccagcaggctcctcccaggaggcagctgacacccccgacacgcggcacccctgcagtctcggctcctccctcgtggcggactactccgactcggagagtgagtgagcgatccccatcctggagactggacccgctctagaggcccggacacacccaggaggcccctcacagactgcagacccccggctcgcccaccagccctgggagagctcagatgccgcatcctccccagaccgcgccttcctgcaaccgtggagttatttatttggtcctggtgagggtgtttgtgccttgtgagactccgtacattaaagacctgtctcttcttccctgtcttgggttgttagatggaccctggggctgcccccccacccccccaccttgaccaagcttggtaggcctctcatcagcaaatgctggtatagggtcatagctgtgaccacagacatggtccccttccagagtaacaagagtctcaaggtggtggtcccggttggccaggaatcaggacagacttcctggaggaggaggcatgggccaagtgtgaagggtgaaaagggggccaggaaccacacacacaaggccagggacaaggcacacggggtacccaggatgtgtgccagatgcagcaggggctggagcacacaggtgtgagctttttattatacccagcccaggggtggcccatggaaaagccccccgtgcatgttacttttggggtttttttgttttgtttttgagaccgagtcttgctctgtcacccaggctggagtgcagtggcgcgatctcggctcactgcaacctctgcctcctgggttcaagtgattcttctgcctcagcctcccgagcagctgggactacgggtgtgcgccaccacgcccagctaattttttgtatttttagtagagactgggtttcaccatgttggccaggctggtctcgaactcctgacctcaagtgatctgcccgactcggcctcccaaaatgctgggattccaggcgtgagccacagcgcctgtcctgcatgttacttttgaatgaaaccgagcagaaaatggcccagaaacagccttgcatccatcaaggggcacacgaccccccactacctccccctcaaccttggaagatcatttaacaaattctttggtttgaacacttgatgttaccttgccactggggatacatccctaactctagacagcaggttgttaaacacggggcctggtatccactaggcgtcccataaatgctgccacttttgtggttccgaggaggcggctcactccgttcgggcttggcaggagtcgtggagtgggttcggccacgtggaatccgcgtcctgggaacccgtggaatccgcgtcctgggaacccgtggaatccgcctcctgggaacccgtggaatccgcctcctgggaacccgtggaatccgcctcctgggaacccgtggaatccgcctcctgggaacccgtggaatccgcctcctgggaacccgtggaatcgggttggatgcgcatgtgcgtgtctctttttccgggggaggctccgcccacggccccgccccgctcccaagtgcgcgcggacccctagctccctctgagttgcgctgggcttggctgctgcaccatgaccctggaggcgatccgctactcgcggggctccctgcagatcctagaccagctgctgctgcccaagcagagccgctacgaggcggtgggctcggtgcaccaggcctgggaggccatccgcgccatgaaggtgcagcgggg

SEQ ID NO: 20878 - DNA, 2300 bp, Homo sapien
accacacttgttcctagtgcagggagctcagacagggccttccatctagagcccagcacctagagccaggctgcccagattcaaatcctgactccgccacttttcccactgtatgatcttgggcaagtcacttcacctctctgtgccttggtttcctcatttataaaatgtggataacaggccgggcgcagtggctcacacctgtaatcccagcactttgggaggccgaggcaggtggatcacaagatcaggagattgagaccatcctggctaacatggtgaaaccccatctctactaaaaatacaaaaaattagccgggtgtggtggtgggcacctgcagtcccagctacttgggaggctgaggcaggagaatggcgtgaaactgggaggcagagcttgcagtgagccgagatagcgccactgcactccagcctgggcaacagagcgagactccgtctcaaaaataaatataattaattaattatttaattaaaaaaataaaaaataaatgtggataatactagtacctccctcttaaggtcagggctggagctagggtgacatctccagggcagaattttaagaggacaccaaaaaagctcagcaaccaagataaaaaatattttaaagcaatattttgttttgggttttttttttttgagatcaagtatcactcgttacccaggctggaatgtagaggcgagatctcagctcactgaaacctgtgcctccccggttcaagcgattctcctgccacagcctcctgagtagctgggattacaggcatgcgccaccatgcccagctaatttttctatttttagtagagacatgatttcaccatgttggccaggctggtctcgaactcctgactcaaatgatccccctgcctcagcctcccaaagtgctgggactacaggcatgagccactgtgcctgaccttacagcagtattttttaaaaatcaaaattaatgcaaaaatccatgatgaggccaggcttggtggctcatgcctgtaattccagcactttgggaggatcccttgagcccaggtgtttgagaccagtttgggtaacataggaagagcttgtctctacaaacaaaaatttaaaaacaatgagctgggcatggaactcacacctctagccccagctactcaggctgaagtgggaggatggcttgagcccaggagttcaaggatgcagtgtgctttgattgcactactgcacttcaccctaagcaacagagtgagaccccatctctttaaaaaaaaaaaaaaatccatgatgaacaaaacaagtatttgtttgagacggggtctcgctctgtcgcccaggctggagtacagtggtgccatctcagctcactgcaacctccgccttctgggttcaagcgactctcctgcctcagcctcccgagtagctgggattacaggagcctggcactatgcctggctaatttttgtatttttattggagacaccatgttagtcgtggctggtctccaactcctgacctcgggtgatccgcgccccgcggcctccgaaagtgctgggattacaagcgtgagccaccgtgcccggcctaaataaaattttgaagaggctagaaccccgcacttgtgccttgagcttactgacctcaacaccctggttccactaaaactttatttacaaaattatgctgccggtctgcaggatgtagtttaacaatttgattattttggatattaaaatattttttaagtcttgaaaatattgtttactattaccaaagtttttgaaccttcttaaattctgtaccagaggtgagtgccacaccctaacctagtctgagtttttatgtgtaaagatcataaaacgttgtaagttttctaaaacacataagctctcaataaacgttagcttatcattgtcaccgttttgttcgtaatgtttgaaaactccaactgtgatccactacactacccttgtgggatgctgtctctttaactctgtgccacgttgtatcccgtgagttcttgcgtttttccgccccgctgtatcccatggttccctgtgccttccggctacgactgctcacagtcccgcctcttccgctgcgtgccggaccatggcgcaggggcagcgcaagtttcaggcgcacaaacccgcaaagagtaagacggcagcggcagcctctgaaaagaatcggggcccaagaaaaggcggtaaggagcggcccggggacttgggggcgaggtggacccccggcttcccggcctcacgtgagcacatctttccccaggtcgtgttatcgctcc

SEQ ID NO: 20879 - DNA, 2300 bp, Homo sapien
tagtagctgggactataggcgcctgccaccatgcccggctaattttttgtatttttagtagagaaggggtttcactgtgttagccaggatggaaaacattcttaatgaaatattttaggccgggcgtggtggctcacgcctggaatcccagcactttgggaggccaaggcaggcagatcataaggtcaggagtttgagaccagcctgccaatatggtgaaaccccgtctctactaaaaatgcaaaagttagtcaggcgtggcggtgggtgcctgtagccccagctacttgggaggctgaggcagaataatcacgtgaacctgggaggcagaggttgcagtgagctgagatcactccatctcaaaaaaaaaaaaagaaatatttttccttgttcccttcctgctatgtctccaaaatccactctgtattttacctttccagcacaacctaatttcagccagtcccatttcaagggctcagagaccacttgtggccattggtgaccatactggacagtgcaggtctgcaggggagtttaactaattgagggggtggcagggagagtgggtgaagactggccagagggtgcagctgtgagactcgaagtttctccaagaaaaagctagggcttccatatggatgagtggataatcactgttttttttttttttctgctgtgcctatcatttaactgaatggaggcaaagcatgtgttggttggtacattcaacaagttctaggttaagcgcctaccttccaggtgctgccggtacagtaaagcacagatgggacaaactcctgcctcctgaggctcacagtggagagggagagattgaaattaagcaactaccaaaggtggatcacttgaggtcaggagttcaagaccagcctggccaacatggcaaaactccgtctctaccaaaaatacaaaaattagccgggcgtggtggtgggcgcctataatttcagctattcgggaggctgaggcaggagaatcacttgaccccgggaggcgcaggttgcagtgagccgagatcgcaccactgcaccccagcctggacgacaagagtgaaactccgtaaaaaaaaaaaaaaaaaaaaaaaaaaaaaccgccgaaacagataaataaatggtaatggtgagaagtatgaggaaggaaaaatgcagggtcctctgaggacattggcaaggagccgggacgggaacgggtgatggaagccatggccagcttccaggccagagacggtggcctacacaagctgagtcagaaaaaatgctcagaggtgctggggtttgattaagtgttagggtgaacctcatggaattgccattttaacaggccaaaaatggtaaaaaaaaattagcaatttcatatgacccaagatagtatctagggcatggaaaggaggggcggggtactatactagttttgaggctcaagggatgacctatgaaccccctaaccgagctttgtttctggagagggggtccgcggcccgcatgagctccctcagtgagcctgcgacccctccgcccccacaagaaccaaaacttgacccggtgcccagagaggttgagtgagtttctcgggtcgcacagctgggagggacgaggggctgagccactgccaagggatcccgctgctctgtctcgctcaccggccgggctatgttgattgtcccctcgcggcgcccggaagcgaccctcagtaaacaaagccgtgtgtgggcgcagccccagaagcctggggcgcgcagtccagcccaagagaggcgggggaggaatgttgtgaatgaaccccgggcccgccccgaaactccgcataaggcctgggccgcgggggtcctcccactctgattggcctctggcgccccgtgattgacagcgcccctcgctgtgcgctctggttgggtaaacaagaaaagactggcatcgcagtcatcgagtgagcagcgaggcttggacacgggtctggcggcgcagccaatggcgggggagggccgaggaggccgagggggggccaatagggacaggcggtgggggcgggacgacggcggagctaaagcggcggctgaagcagcttcattgttgtgaagagtcttaaaggggccgcatcaccctgccggcccggcgcgggtcgggggtgggtgcggtaggggtcccggggcggccgagcgcagaggacggacgggaaggagggcagggggcgcgggagccggcgaagcggagcgggcatcggaccgagccccccaaagaggccccgccccggccctggccccggccgggccggatggaaccccc

SEQ ID NO: 20880 - DNA, 2300 bp, Homo sapien
tcacgaggccaggagttcgagaccagcctggccaacatgatgaaactccgtctctactaaaaatacaaaaattagccaagcgtggtggcacgcgcctgtaatcccagctactcgggaggttgaggcaagagaatcgcttgaacccaggagggagaggttgcagtgagccgaaatcacaccactgcattccagcctgaaggacggagcaagactccgtcttggggaagaaaaaaaaaagtcctgtatgcagggcctgcaactgagtgtctgggtcatccccaggggctgaacaaagggtggtcctgcaaggccaaatcttgggtgcagcttgctggaaaggtgtcattggtagggtgtgagtgccatgggacctggaggagggtggggtctgcaggatagacaggtaaggggcggggcctcaaagggtggcagaagttcactaagaagataaggaatagggccgggcacagtgcctcacacctgtaattccagcattttgggaggccaaggtgggaggattgcttggggccaggagtttgagattggcctggacaacatagtgagacccccatctctacaaaaaactttaaaaattagccaggtgtgatggtgcacccctgtagtcccagctcctcaggaggctgaggcgagaggatcgcttgaggccaggagtttgaggctgcagcagtgagctatgatcgcgccactgtactccaggtaacagagcaagaagaccccaactctaaaagaaaaaaatagaaaagaaaaaagaagttggggccaggccctgtggttcacacctgtaatcccagcactttgggaggccgatgcggatcgcttgaggccaggagttcaagaccagcctggccaacacagcaaaaacccgtctctcccaaaaatcagccatgcatggtggtggacgcgtgtagtcccagctgctcgggaggctgaggcaggagaatcacatgaacccaggaggtgtaggttacagtgagccaagagaccacaactgcacttcagccccggcgacagagtgagaccctcaaaaaaaaaaaaaaaaaaagaaaagaaaaaaaaagaaactggggaccttcccagctagaacaaacaagggccagcagggtgcagaatcagccctggacagcctcctgattggagccgttgtagtgtggggagcaagacaaggagctttcagaggctactcaagaggtaggagcttacagaaggcagggtctgcaggacaggacctgtggatggggcctcaggggagaggcaaacacgtgagctgctgattggtggtgggacctagtgaaggtggggcttatacagcaggtacttagaggcaagagagaggagccaacaggaagcatggaggtttcaggagcgaagggacaggttggtttgttccggcataggatctatgaggtgggatctggggtaggatctgtgaggactcacttcagaagaacagcaacaacagcagtgatattaagagctgacattacctgagagcattttcaagcaataagcaccttgcagaaagcttcacctacgcaattttgtttacttctcacaacaatcaggctgggtgcagtggctcacgcctataatcccagcactttgagaggctgaggcgggcggatcacttgaggtcaggagttcgagaccagcctggccaacatagtgaaaccccatctctactaaaaatacaaaaattagctgagcatggtggcgggcacctgtaatcccagctacttgggagcctgaggcaggagaatgcttgaactcgggaggcggaggttgtagtgagccaagatcgcaccactgcatgccattctgggtgacagagcaagattccatctcaaaaaaaaacaaaacaaaacaacaacaaaaaagaaaaaacaacaatcctatgagacagatactattttatctccattttctaggtaattgaggcccagaaagttgagatcacttacccgggttcattggatcagctttaacctccaagtgtttctggggtcctccatctcccaacgcccctccataggccagcccaagactcaggctaacccccttctccccacccctaccttgcaggtgatgcggatgactctgaacgtaatgacctggcggcggagggagatggtgcgctggctggtcagctgtgccacagagattggtgagagcccctaaggggacctgccacccacttcgctgttctggttctgcagagcgcactgagagaaccaggcagacaagaaagagagaagtggcggggtgcggtggctcacacctgt

SEQ ID NO: 20881 - DNA, 2300 bp, Homo sapien
tttagagatagggtcttgctctgtcacttaggctggagttcagtggcatggtcatagatcacggcagcctcaaactcctgggctcaagcagtcctcccacctcagccgcctgagtagctggggctacagatgtgtaccaccactcctggctgattttttagtgaattttttgtgggccagacactgtggctcaggcctgtaagcccagcactttgggaggctgaggcaggcggattgcttgagcccaggagttggagaccagtctgggcaacatggcaaaaccccatctctacaaaaattagggccaggtgtggtggctcacgcctgtaatcccagcactttggaaagccgaggtgggcggatcacctgaggtcaggaggtcgagaccagcctggccaacatggtgaaaccccgtctctactaaaaatacaaaacttaactgggcgtggtggcgggcacctgtaatcccagctactcgggaggctgaagcaggagaattgcttgaactctggaggtggaggttgcagtgaaccgagatcacgccattgcactccagcctgggcgacagggcgagactctgtctcaaaaaaaaaaaaaaagaaaagaaaaagaaaaaattagccgggcatggtggtgcatagctgtagtcccagctaccccggaggctaaggtgggaggatcacttgaacctgggaggctgaggctgcagtgagctgtgattgcacccctgcactctagccgtggcgacagagtgagaccctgtctcaaaaaagaaaaaatattttttttttttgtagagatggggtattgtcgtattgcgcaggctggtcttgaactcctggcctcaggtgactctcctgcctcggcctcccaaagtgctgggattacaggcgtgagccgccatgcttggcctgaaattcttagttttcgaactagaggaccacgtgttcattttgcaccgggtcctgaaaatcctgtatcttgccctggtgctgggcacttactgagtgacatacatactcggtgacatctcactgggctatgcaaaagaggctcttggctccattttacagatggggaaactgaagctttggagagtctttgggaaactgtggagcaaggatttgaaccttgggctgtttgggtggagaggcctgtatcttggagcttggatcctgtgctctggggggcggggggtgcgtgtctagaaagagaggggggtgccttgctgccggcatccgccctggtgggtgtgggctaagccctggccactgaggagaccgggccacggggggggaggccctggtggtttcctcctgccctccaggcttctaggaagtggcgccagctggggtgagatcacttcctcacccgcctgcctggccccccttggcttcctctccccatggccccatttggcctgcccagggctcaatgaggggggagcttggccatgcaagttgctgtagcctccttgtcccgcatgggccctctaggtatctctgcctctccagtcctggggctggaacggagggcacagctaggctccagctccccgtgtggtggctcctgcatatgagaaaagagcttccctgtgatcaaaggaagcatctggggacctggaggggaggtgtccccaaatctcattacctcctttgctctctctctctttctcccctccaggtgccagcctctggccccgcccggtgcccccctcacccctgtgccacggccggctggggttcctggggatgggatttgcttcctgtcacaaatcacattgccagggatttccaaccgaccctgagctctgccaccgaggatgctgcccggggacggggtggcagagaggccccgaagcctgtgcctggcctgaggagcagggcttagctgcttgtgagcagggtccacaccaagtcgtgttcacagtggctaagttccgccccccaggccctcacctcctctggccttgccgcctgtcccctgctgccgcctgtctgcctgccatcctgctgcctggcctccctgggctctgcctcccgtgcctactgagctgaaacacagttggtttgtgtacactggctcagttcagcaggaacaggggtcaagcccccttggagcctgcagcccctgccttccctgggtgggctgatgcttggagcagagatgaggactcagaatcagacctgtgtctggaggagggatgtggtgggtggggttggctgggcccaaatgtgtgctgcaggccctgatccccaactctgcaactggggacccctgcatggccacagctcaggctg

SEQ ID NO: 20882 - DNA, 2300 bp, Homo sapien
gagacttcccttgaccagcctgggcaacatggcaagactctgtctctacaataatttttttttttttttgagatggagtcttgcttatcgcccaggttggagtgcagtggtgtgatctcggctcactgcagcctccacctcctgggttcaagtgattttcctgcctcagcctccccagtagctgggactacaggtgcacaccaccacacctggcttatttttgtatttttattagaataggggtttcaccctgttggccaggctggtctcgaactcccaacttcaaatgatccgcctgcctcggcctctcaaagtgctgggattacaggcatgagccactgcgtccaggctacaataattgttttaaaacttggccaggtgcagtggctcccacctgtaatcccagcactttgggaggccgaggcaggaggatcacttgagcccaggcattcaagaccagcctgggcaacatggcacaacgccatctctaccaaaaaaaccacaaaatttagccagttgtggtgtgtacctgtagtcccagctacttaggaggctgaggtgggagggtcgtctgaatctaggaaggtcaaaactacagtgagccgtgatcacaccactgcactccagcctggacgaaagagtgagaccctgtctcaaaattatgaaaaataaataataaaaataataatagccgctgggcgcagtggctcatgcctttaatcccagcactttgggaggccgagatgggcagatcacctgaggtctgtagtttgagaccagcctggtcaacatggagaaactctgtctctactaagtatacaaaattagccgggcatggtggcgcgagcctgtaatcccagctactcgggaggctgaggcaggagaattgcgtgaacccgggaggtgggggttgcagtgagccaagatcgcaccattgcactccagcctgggcaacaagagtgaaactctgtctaataataataataataataataataataataaacaggaaattgacattggtgtggtctgaatgccaccttgattttcatatccctgatctgattgagtacctggtgctggtggagagaagagcttggtggaaggagaggtttctgtgcttccagatccccctccagtcgccggccctggtactgatgcctatttccatgcatgatggccggtgccaatatctgagtctttgaacagggtggtgacaactattagattggtgcaaaagtaagtgcagtttttgccactaatttttttgtgtgtatgagacagagtcttactctgtcgtccaggctggagtgcagtcctatctcggctcactgcaacctccgcctcccgggttcaaacaattctcctgcctcagcctcctgagtagttgggactacagtcaactgccaccatgcctggctaatttttgtatttgttgagtagagatggggtttcaccattttggccaggctgatcttgaactcctgacctcaagtgatccgcccacctcggcctcccaaagtgctgggattacaggcatgagccatcacgcctggccaatttttgccattaaaagtaatgacaaaacccgcaattacttttacaccaacctaatagaaaactcttcggagaacttggttatcaaaggccccggggctgagtctttttctgtccacaggaaacaatcgcagagtccagcgcccagagtccaggatgccagctgctagtggagaccctgggggtccccctccaggaggccacggagctgggggacccaacgcaggcagacagtgcccgccctgagcagagcagccagagccctgtgcaggcggtgcccggcagtggggattctcagcctgatgaccctccagacagggggacggggttgtccgcctcacagagggccagccaagaccacctgtcagaacaaggggccgatgacagcaagcctgagacagacagggttccaggtgacggtggccaaaaggaacacctaccaagcattgattctgaaggggagaagccagacagaggagccccccaggagggaggggcccaaaggacagcaggggctggcctgcctggagggccccaggaggagggagacggtgtcccctgtaccccagcatcagctcctacctcaggccctgctccaggactgggccctgcctcttggtgcctggaacccgggtctgtggcccagggctcccctgacccccagcagacccccagcaggatgggtagggaaggggaagggactcatagcagcctgggatgctcctccctcgggatggttgtca

SEQ ID NO: 20883 - DNA, 2300 bp, Homo sapien
atcagggatatgaaaatcaaggtggcattcagaccacaccaatgtcaatttcctgtttattattattattattattattattattattagacagagtttcactcttgttgcccaggctggagtgcaatggtgcgatcttggctcactgcaacccccacctcccgggttcacgcaattctcctgcctcagcctcccgagtagctgggattacaggctcgcgccaccatgcccggctaattttgtatacttagtagagacagagtttctccatgttgaccaggctggtctcaaactacagacctcaggtgatctgcccatctcggcctcccaaagtgctgggattaaaggcatgagccactgcgcccagcggctattattatttttattatttatttttcataattttgagacagggtctcactctttcgtccaggctggagtgcagtggtgtgatcacggctcactgtagttttgaccttcctagattcagacgaccctcccacctcagcctcctaagtagctgggactacaggtacacaccacaactggctaaattttgtggtttttttggtagagatggcgttgtgccatgttgcccaggctggtcttgaatgcctgggctcaagtgatcctcctgcctcggcctcccaaagtgctgggattacaggtgggagccactgcacctggccaagttttaaaacaattattgtagcctggacgcagtggctcatgcctgtaatcccagcactttgagaggccgaggcaggcggatcatttgaagttgggagttcgagaccagcctggccaacagggtgaaacccctattctaataaaaatacaaaaataagccaggtgtggtggtgtgcacctgtagtcccagctactggggaggctgaggcaggaaaatcacttgaacccaggaggtggaggctgcagtgagccgagatcacaccactgcactccaacctgggcgataagcaagactccatctcaaaaaaaaaaaaaaattattgtagagacagagtcttgccatgttgcccaggctggtcaagggaagtctcccaaagtgttgggatcataggcatgagccactgcacctggccaattgcctagttttggtgatggactatagttatgcatggtgttaccactcggtgaagctaaaacagagaacaccggaaattcactctgtaccattttgtgtttttttaaaaattgtgctaaggccgtgcgcagtggctcatgcctgtaatcccagcactttgggtggctgaggcgggcagatcacctgaggtcaggagttcaagaccaggctggccaacatggtaaaaccccgtctctactaaaaatacaaaaattagctgggcgcggtgggcaggcgtctgttatcccagctacttgggaggctgaggcgggagaattgcttgaacccagtggggcagaggttgcagtgtgccaagatggcaccatcgcactccagcctgggtgacaagagtgaaactctgtctcaaaaaaaagaaaaaaaataaaataaagaattgttgcatagtcaacacacatccatagcgcaatgtactgaaaacggtgggtggagaggtgcaggcctcaccattgccaaagaactccagggttaaatggggctgccgaggctgggccaggaggctgcacctgcgctgggctcagcctggctgattttagagccttaccaggctaaaggccccactcccacggtcctcatccttcatctcttcttttcttgtcactgtcttcctggattttgcaaactggggaacaaacctcccgaatgagttctgtaaaccggatacaagaacaaagcagcaataaagataagagaggaatgaggtcttaggaaaaaagcaaccccaaacctgctcctttcttgtagccttgagagaactccacccttgccctctgggcacattccctccagcccctgtagaccatgagtgagcaattggtgacaaagaagggagacacagagccggaactttaagggaggcagtggtgcttctatatccacgaggccacaggacgagctcacctgggaaggaggaaggggagctggctccttttctggttgacggaggagccggcagggagatcctgtttcctcatcaggggagctatgtaggaaaagataaaactgaaggagatctgcccgggtgcggtggctcacacctgtaattgcagcactttgggcggctgaggcgggcagatcaccgaggccaggagttcgagaccaacctggggaacatggtgaaaccgtatctctactaaaa

SEQ ID NO: 20884 - DNA, 2300 bp, Homo sapien
gagactccatctaaaaaaagaaaaaaaagttttaactgtgggcaaagataacattgcatttttcagggttacagaactcatattctgtctgctggtcaaacccatccttcttccacattcctcctcttccttaatcaagaagggaacaaaggaattgttgttatgtgagctaacgaccaataaaaaaagaaaagcaatcagggctgagtgcagtggctcatgcctataatcccagcacactgggaggctgaggcaagaggatcgcttgagcccaggagttcaagaggagcctgtgtaacataacaaggatgaccccatatctacaagaaataaaataattagccaaaacaaaacgatatacatatccttatttatttatttatttatttgagacagggtctttctctgtcacccaggctggagtgcagtggcacaatctcggctcactgcaacctccacctcccgggttcaagcgattctcctgcctcagcctcctgagtagctgggatgaaaggcgcccgccaccacacccaactaatttttgtatttttagtagagacggggtttcaccatgttggccaggctggtctcgaactcctgacttaaggtgatccgcccgcctcggcctcccaaagtgctgggattacaggcgtgagccaccacgcctggcccttatttatttaaatataaccctaagtttcactagtttttaaagacactatgtttcttgcatccacaatttcctttccctagaatgtgccgtgtcagggctggagtgtccgtccaaatgagaatatccctattcccagttcagaaggcaattcctgggattataaatgtaacaaagtcacctgttaaggcagtgtattctccaggtgggactctgcaccctccttgacagttaaatgttctcaggtcactgcttctccatccccatcccactctttcaaagcaggttttccagggccttccatctagcagacatttttttttttttgagatagggtcttgctctgtcacccaggctggagtgcagtggcgtgatcatagctcattgcagcctgaactcccctggctcagatgatcgtgacatttcagcctctcaagtagctggggccacaggcacacatcaccacgtccagctaatttttaaattttttgtagaaaaggggtctcactatgttgctcaggctggtctcaaactcctgggcatccacccacctcagcttcccacagtgctgggattaaagggatgagccaccacgcccagcctaggagactcttagcactggtttcctgttggattttgttttgcgtttgtctcgataggtgagtgacaacctaggaggatttcagatccccctcgtttgtttgtttttgacacagaaccttgttctctcacctaggctggaatgcagtagcacaatcttggctcactgcaaacaccatctcctgagttcaagccattctgcctcagcctcccaagtagctgggattacaggcgtgcgccaccacatccagctaatttttgtatttttagtagagatacggtttcaccatgttccccaggttggtctcgaactcctggcctcggtgatctgcccgcctcagccgcccaaagtgctgcaattacaggtgtgagccaccgcacccgggcagatctccttcagttttatcttttcctacatagctcccctgatgaggaaacaggatctccctgccggctcctccgtcaaccagaaaaggagccagctccccttcctccttcccaggtgagctcgtcctgtggcctcgtggatatagaagcaccactgcctcccttaaagttccggctctgtgtctcccttctttgtcaccaattgctcactcatggtctacaggggctggagggaatgtgcccagagggcaagggtggagttctctcaaggctacaagaaaggagcaggtttggggttgcttttttcctaagacctcattcctctcttatctttattgctgctttgttcttgtatccggtttacagaactcattcgggaggtttgttccccagtttgcaaaatccaggaagacagtgacaagaaaagaagagatgaaggatgaggaccgtgggagtggggcctttagcctggtaaggctctaaaatcagccaggctgagcccagcgcaggtgcagcctcctggcccagcctcggcagccccatttaaccctggagttctttggcaatggtgaggcctgcacctctccacccaccgttttcagtacattgcgctatggatgtgtgttgactatgcaacaattct

SEQ ID NO: 20885 - DNA, 2300 bp, Homo sapien
ctttctttctttttttttttgagacagggcctcaatctatcagtcaggatggagtgcagtggtacgatctggattcactgcaacctccacctcccagttcaagcaatcttcctgcctcaacctcctgagtagctgggactacaggtgcctgccaccacgcccagctaatttccttactttacattgtagagacaggatctcgctatgttgcccaggctggtcttgaactcctggactcaagcgatccgcccacctcggcctcccaaagtgctaggattacaggcgtgagccaccacaccggccttctatttttcttaccagcatgaattaaatcctttttgtctttttcttttttttgagacagagtcttgctctgttgcccaggctagagtgcagtggcaccatcttggctcactgcaacatcggactcccaggttcaaacgattctcctgcctcagtctcccgagtaggtgggactacaggcatgtgccacaacacctggctaatttttgtatttttagtagagacggggtttcaccatgttggtcaggctggtcttgaactcctgaccttgtgatctgcccgcctcggcctcccaaagtgctgagattacaggtgtgagccaccgcacccggccaatccttgcttccttttaaggaggttaaggcagtcgtgttagccagatctgcaataaacaagcccacattcttcccacaagcagaagcagaaatcaacaagtgtccatttgaatgaacgtacctgaggtccgcagcttcttcctcttagtcattttatcttccccttgagaaatctgaaaacaagcaaaatctctcatcattataagcagtctctgtctctgtttatatccagtggctttggctgagagcagaggttacccctacctccacctcagcccatttggctgccccaggggtcagatggctcccactgggacacaggatgggacacagagtcacagccactttgggccatggccaggtaggaattcaaacctcctccaaactgaagatcttatgcccaggacctgaaagacaaatgggccctggggggtccttatagatagccccggggacccagactctggtccctaggatgaaacagcctgtgtgaagcccctccctccagactggggtatctgggggcccttccaaggacacttgaggactctccaggggcctctggagaccagcctggccaatatggtgaaaccccctctctattaaaaacacaaaaattagcctgggcatcgtgacgcacacctgtaatcccagctacttgggaggctgagacagtagaattccttgaacccatgaggcagaggttgcagtgagccgagatcgctctactgcactccagcctgggcgacagagcgagactccgtctcaaaaaaaaaaaaaaaaattagtcaggtgcggtggcacacacccgtaatcccagctactcaggaggctgtggtacaaggccaggaggcagaggttgcaatgagccaagatcgtgccactttaaaggggacagctgggtccttggaggggaaagagctgccataggccggtttctcccagccttgggggcgaggcaaaccagaacggacctgggccacagaagtcgttgaggaccctctgtccttatcagaaacgagctctgcctggatcagttgggaataagtcgcttgaattatccgcgttactctttttggaaaaaataaatggccaaattggccctcacagaacgctggaggcctcgagtccggaggtgaaagatggaaaggcctgagggtgggcgctgtagaccccgctcccggtgacaagccccacactgacactacgccgaccaccgagaagtgaggactccacaggccgagagcccacgtgaagccggagcccgtcggtgactgacagacgctctgaaccccacagatgtcgccgcccctcacacctgcgcgcgctctgcctctttcccgcgccccgcgaggtcccgccccgcgcatgagcgacgcaaacaccgccctcgcagcccgcgacagtcagcaccgccccagccaggcgcctgcgcgcccacgcactacctgccgggagttgtagtttcggctcggcagacccggcgagcccagtggccgcgctccggtgcggcggcgcccgaggcccgaggcggaagtgggacggccaagcagggaagcgagggctcgggatcgacggccgcggggcgccgacgaggagtgcaggactcaggaagggcgagtgcgcggcgacagagcccggggaaggaggcagggcaaggcc

SEQ ID NO: 20886 - DNA, 2300 bp, Homo sapien
agggagaaaccccgtctctactaaaaaatacaaaattaaccaggcatggtggcgcatgcctgtaatcccagctactcgggaggctgaggcaggagaatcgcttgaacccgggaagcggaggttgcagtgggccgagattgcgccactgcactccagcctggggcgagagagcaagactctgtctcaaaaacaaacaaacaaaaaaagaacccctaaccacaatgcaggtttgccatgcagacccgtcttcctatcttggctaatgaccaatcatgatgtgataacatcgtgtttaaccatatgaaattgcctttcctgtaggtaaaaaatggccaaatattggcaattatgtatggttccaccaactagtaataatgataatagtaacatttattgagtgctatgttctagcactttccataaactatctcaatgactctctacaactgtcctgtaatgtagggtctcttggaggtctccatttttaattttttatttatttatttattttcagaaggaatttatttatttattttgagaaggagccttgctctgtcacccagtctggaatgcagtggcgcgatctcagctcactgcaacctccgcctctcggttcaagcgattctcccacctcagcctcccgagtagctgggattacaggtgcccgccaccatgcccagctaatttttgtatttttagtagagatggggtttcgccatggcctcccaaagtgctgggattacaggtgtgagacaccaccccggacttccatttttaattttttatctttattttagagaaagagtcttgttctgtcacccaggctggagcagaagtagcgcaatcatagctcactgcggtcttgaactcctgggctcaagcaatcctcccttcttagcctcccaagtagtagtactacaggcacatgccaccatgcccagttagtctttttttgtcgagacgggggtcttgcttttgcccaggctggtctcaaactctggcctcaaatgactctcccacctctgcctccgcctccatctcctgaagtgctgggattatagagatctccattttacagatgagaaagctgaggctcagagctgtaaagtcaagtgtccgatgtacagaggccaggagggaacttcaggtcagccagactctaatatctgaacaccaagctatgtcctgggctccttccatcaaaactgagaaaaatcaaactatctggtgcctggggcaaagaagtcgggagagtgagaaggggtccagccacagtgccataagcttatggctgcagccctggatttgtgcttagccctggccaagctgttaatccctatgaccttgggcagatgtcttcacgtctctgagtctcaaagtcctcatctgtacaatggaataaaaagagtctgacatggcccgactgatgcaagggtttgatgtgtcaagtccgaggactgcccctcctcgactggagcagctgtggcaacaggtggccccgaacccggggcagggccccaggagctggggagccaaggccagtaggccacacttgggtggtgttggagcctcacctggggggaggcggggaccggggcttacctgtggggcggagatcgggcttccctggggggtggggcccttccctgagcgagtgacgggggtggggagggatccccaggtcgggccgtggggcgcaaactcacctggcgggcggccgcggcgcctctgcccgggggtcccgggggtcctttcctcttgtgcatcttcaaggctggatgcccggaccacctgcccccaagcccggccttgccctgcctccttccccgggctctgtcgccgcgcactcgcccttcctgagtcctgcactcctcgtcggcgccccgcggccgtcgatcccgagccctcgcttccctgcttggccgtcccacttccgcctcgggcctcgggcgccgccgcaccggagcgcggccactgggctcgccgggtctgccgagccgaaactacaactcccggcaggtagtgcgtgggcgcgcaggcgcctggctggggcggtgctgactgtcgcgggctgcgagggcggtgtttgcgtcgctcatgcgcggggcgggacctcgcggggcgcgggaaagaggcagagcgcgcgcaggtgtgaggggcggcgacatctgtggggttcagagcgtctgtcagtcaccgacgggctccggcttcacgtgggctctcggcctgtggagtcctcacttctcggtggtcggcgtagtgtcagtgtggggcttgtcaccgggagcggggtctac

SEQ ID NO: 20887 - DNA, 2300 bp, Homo sapien
tggtggaaccatacataattgccaatatttggccattttttacctacaggaaaggcaatttcatatggttaaacacgatgttatcacatcatgattggtcattagccaagataggaagacgggtctgcatggcaaacctgcattgtggttaggggttctttttttgtttgtttgtttttgagacagagtcttgctctctcgccccaggctggagtgcagtggcgcaatctcggcccactgcaacctccgcttcccgggttcaagcgattctcctgcctcagcctcccgagtagctgggattacaggcatgcgccaccatgcctggttaattttgtattttttagtagagacggggtttctccctgttggtcaggctggtctgtctcgaactccccatctcaggtgacccgcctgcctcggcctcccaaagtgctggggttacaggcgtgagccaccgtgcccggcctaatttttgtatttttagtagtgatgggatttcaccatgttggccaggctagtctcgaactgctgacctcaggtgatccccccaccttggtctcccaaagtgctgggattacaagcgtgagccactgcacctggccctgtcgtcagggcttctaattgctcttcttttttttttggagacagagtcttgctctgttgcccaggctggagtttggtggcgcaatctcagctcactgcaacctccacctcccaggttcaagcaattctcctgcctcagcctcccgagtagctgggattgcagacaccgccagcactcccagctaatttttgtatttttagtagagacggggtttcaccatgttggctaggctggtctcgaactcctggattacaggcgtgagccaccgcatgcagccatcatgctcttgaagcccaaccttcccacacagcccctctgctgaggatgctggaaagaaaagcccaagtgtacagagtagctttgctttgggcaaagtgtggagcctgcttccttccctccttccctccctccctcgcttccttctttttttccttccttccctccttcctccctccctctctccctccccggctccatctctctttctttctttcctttcaacagggctttactctgttgcccaggcggagtgccgtagcacagtcatggctcactgcagccttgatctccccaggctcaagtgatcctcctgcctcagcctcccgagtagctgggaccacaggcacacagcacaactcccagctaattttaaaaagttttttttcctgtaatcccagcactttgggaggccgaggcgggcagatcatgaggtcaggagatcgagaccatcctggctaacaaggtgaaaccccgtctctgctaaaaatacaaaaaaaaaattagccgggcgtggtggcgggcgcctgtagtcccagctactcgggatgttgaggcaggagaatggcatgaaccccggaggcggaggttgcagtgagctgagactgcaccactgcactccagcctgggtgacagagcgagactctgtgtcaaaaaaaaacaaaaaacaaaaaactttttttttttttgtagagttgggggtctcactgtattgcccaggctggtctggaactcccagacacaagccatcctcttgccttggcctcccaaagtgctgggatgacaggcgtgagccactgcgcccagccaggggcctgcttttcccactgaacttggcccagcagcacatcataagtgtggattcagatcagagagctgggtctcttgccctttgccccaggttgaactgtgccagagggcctggcctatcttggaacacctgttctgggcttgttccagcctcctggcactccccagggaaatggctttccctgggagaccttgtttccttcctcccaaggggactctctggccatcatggctgcctctagccatgtggtgaaccaaaggtctgactgaacccttgctgttcccctagctgggcctgctggttgacctctccccagatggcctgatgatccctgaggacggggctaacgatgaagaactggaggctgagttcttggctttggtcgggggccagcccccagccctggagaagctcaaaggcaaaggtgagatggttaacacaccctcagaacattttctgatctcctgcaagtggttcgggcgcagaactgggggcactgggtaggtaggggaaagaagacagagaagacccctgttctcctggagccaatgatctgggtaagagagtcaagatcgactctgaggccgggcacggtggctcacgcctgta

SEQ ID NO: 20888 - DNA, 2300 bp, Homo sapien
gagtttgaggctgcagtgagctctgattgggccactgcactccagcctgggtgacagagcaagatcctgtctccaaaaaaggttatgactggagattcacaggaacctaagcttaaatttcccctaggagcaacagtcttatagtcattaatttagtcttcaaagcagctttatagaatgtaacataactaataacaagatattggcaatatgctattctaagagcttcattgaccttctctgctccaacctacctatgaaggaggaactgttgtcatccccgtgtcacagagggagaaactgaggctcagagaggtgacatcacttgccgaagttctcacagagagaaagttgcagagctggggttttttttgttgttgttgtgtgtgtgtgtttttttttttttttttggagacaaacccttgctctgttgcccaggctgcagtgcagtggcgcaatctcagctcactgcgacctctgcctcctgggcttaagtgattctcctgcctcagcctctttagcagcggggattacacgccaccatgcccagctaatttttttttttttttttttttttttttgagacggagtctcgctctgtcgcccaggctggagtacagtggcgcgatcttggctcaccgcaagctccgcctcctaggttcacgccattcccctgcctcaggctcccgagtagctgggaccacaggcgcccgccagcatgcctggctaattttttgtatttgtagtagagacggggtttcaccgtgttagccaggatggtctcgatctcctgaccttgtgatccacccgcctcggcctcccaaagtgctggggttacaggcgtgagccactgcgcccagcctaatttttgtatttttagtagagacagggtttcaccatgttggccaggctggtcttgaacgcctgacttcaagtgatccttctgcctcggcctcccaaagtgctgggattataggcgtgagtcactgtgcccggtctgcagagctgggttttgaattcaggtagccaggccccagacctgaggctgaataaggaagagatgaaatggggaagtcagcgagaagtgggatcacctagcgtgtccaggatgggaaatgggggctcttggtgtacgaccctggtccacctggggcatccccctaccgccaggtcccttgccgatggaggccattgagaagatggccagcctgtgcatgagagacccggatgaggatgaggaggaggggacggatgaggacgacttggaggctgatgatgacctgctggtgagcactgagggcggggtgggggctctgatccggttgcccccatccagcaggcccttatatcctgccctggctgtgtgtccctgcaggcggagctaaatgaggtccttggagaggagcagaaggcttcagagaccccacctcctgtggcccaggtacagtttggatgactccactcccttgaaccacaacccaacggacagcccggggttcaagacctagccttttttatgagatggagtcttgctgtgtcacccaggctggagtgcagtggtgccatctcagctcactacaacctctgcctcccaggttcaagggatcctcccacctcagcctccccagtagctgggattacaggtgtgtgccaccacgcctggctaatttttgtattttttggtagagatggtgtttctctgtgttggccaggctggtcctgacctcaagtgatccacctgccttggcctcccaaagtgttgggattacaggcgtgagccaccgcgcctggcccacccttatccttcacagccatgtgacccatatcaggtgggtgacatgatgcttctgaaaccccattccctccactgggaaatggggaccatgatttctgcctcactggggcaggggaggctggtccagggatgacatggggccgactgttactgcagaaggggctaacaggggcatcccaagtggggtcaccacccacactgtgcccctgccctcccacagccgaagcctgaggcccctcatccggggctggagaccaccttgcaggagaggctggcgctctatcagacagcaattgaaagcgccagacaagctggagacagcgccaagatgcggcgctacgatcgggggcttaaagtaagtgggcagagggcagggtacagggaccccccgccaaccccgatgccctgcaccaagctcttggcttctcccaaaccaatactcacgccttatcttagacactggaaaacctgctcgcctccatccgtaagggcaatgccattgacg

SEQ ID NO: 20889 - DNA, 2300 bp, Homo sapien
attaaaaattagccagccatggtggtgcatgcctgtagtcccagctacttgggaggctgaggtgggagaatcacttgagcctggaaggttgaggctgaagtgagctgtgattgcaccactgcactccagcctgggtgacagaatgagaccctgtctccaaaaaaataaaataaaataagcttgatgtatttacgttttgctcaattacatgctagtaataattataacaataattcaacccggaaaaacattgtttttaacaatgaaagatttataatcacaggaaataaaaccaatacaatgtcaaaggtgtgtcacttctacctccaaacatattttcagggaagtaagcctaagtttaaagcaatgggtccagttgttagtctgaaaaaaagatactgcgtgccattttctgggtgtttccagattttgcagacactgggtggtgtctttattgtactgtgttattttatactaagaattgcacttatagctttaaacattgaggtacttccccagaaaacatactgagcatattatttgaaactgtaactaacacactgtttaaaaagcactgaatactgggtttcctaactttgcaaacacactgcataaatatattttggttgtataaatatacaatagggtaggcaaaaaaggctttcaaacacacagctatatcatgttagcataaatttctgtgggggacgtggatggaaataagagaagactcaaaattcccaactgcttaaagtgagtcccaggatatatttaaaaagtgagttgggcatggtggcacatgcctgtaatctctgcactttgggaagctgaggtgggaggatcacttgagcccaggagtttgagactagcctggacaacatagtaagaccccatctctacaaaaaaaaataaaaaaccagccgggcatgcaggtgcatgctctgtagccccagctactcaggaagctgagatgggaggatcgcctaagcccggtgtctgaggctatagtgagcagcagagcaagactctatctctttaaaaaaaaatacattaaatatggccaggcacggtaactcacacctgtaatcctactttgggaggccaaggtgagcagatcacttgaggtcaggagtttgagaccagcctggccaacatggtgaaaccccgtctctactaagaatacaaaaattagccagaaattgggaggcggaggttgcagtgagccaagattgtgccactgcactccagtctgggcaacagagcaagacccagtctcaaaaaatacattaaagccaggcgcggtggttcacacctataatcccagcactttgggagtccaaggtgggcggatcacctgaggtcaggactttgagaccagcctggccaacacggcgaaaccctgtctctactaaaaacataaaaattagccgggcatgtgcctgtaatcccagctactcaggaggctgaggcaggagaatcacttgaacccaggaggcggaagttgcagtgagctgagattgcgccactgtaccccagcatgggcaacagagtgaggctctgtctgaaaaagaaaaaaaaaattaaataaataaataacaaatggtttacacggtgaacttggcccaggccctggaggcttcctgtatgttgttctcccttccaggtccctgcagccctggccctctggcccagttgcagagccgccagcgcgactacaagctggctgccctccacgccaagcagcagggagataccactgctgccgctagacacttccgcgtggctaaggtgcgtccagcctgacggacaggactggagggatggggcaggatgcttcccacgtggcctggtggcaaagcacccaaatttgcatcctagcttggtcactccctagcaatagtttgctgtaagtcttggagcctcagtttaccccctctgtgaaatgggcacgtgtgttggaagaggattaagcaagatggcacaaatggaagggagggagctagaagtcctcggtggcatggaagggcccggaggctccccacagggtccaagcccccaactgcacctcttcttctaatctcctcttccttctcccagagctttgatgctgtcttggaggccctgagccggggtgagcccgtggacctctcctgcctgccccctccacccggtgagaaccctgccatgcccactctctgggatggtttcaggcatacactaagttctccttgatgctgccacccctgttggtcaggcccagagaccaccctcaggccagaccagcttgtcgggggtgcagc

SEQ ID NO: 20890 - DNA, 2300 bp, Homo sapien
cttgtctcccattggccagaactaagtaacatggccacatttagccacagaggaggctgggacatgtagtctcttgttggtgcactgtgtgaccagcctgagctccattactagggaaggggaggggatcagatctggggagacacttagattctgccacttaggacaggaccattcctttttctctgagcatcatttttctcagagaagtggggatggccacccctgcctcaaagaaagacagccaggattcctcatgtgatagaatagtactcataataggaaacatttgaggagcttgaactgggcgcccagcaaaggccacccagtttaaggaagtgacatcacttttgcttgcctcccattggcccaaacagtcacatggctacatttagcctcagaggagcctgggacatgtagtctttgctggacactggagacatggccttgagcaaaaaaggcaaaaatccacactctctctggacatggtgggtcacacctgtaattccagctacttgggaggctgaggtgggaggattccttgaggccaggagctcgaaactagcctgggaaacacagtgagactcactgtcatggagtggatgttctaattgagagaccacaagaaacacacaaataaatacagcaccttatcacggcccatgaagactgcaccatctgccccatcagctcccttgcctggtctctttcttgtttttgttttgttttgttttgttttgagacggagtctcgccctgtcatccaggctggaatgcagtggcacgacctcagctcactgcaacctctacctcccaggctcaagcgattctcctgccttagcctcccgagtagctggaactacaggcacacgccaccatgcccggctaatttttatatttttagtagagatggggtttcactatgttggccaggctgggcttgaactcctgacctcaggcaatccacctgcctcgacctcccaaagtgctgggattacaggcatgagccactgtgcccggcctgccccttctctttcacccaccccctcgctcactcttccccttgctgtctggtagcctcaaacaccaggcactctgcaacctcagggcctttgcacatgcagttcccactgcctgaatgcttttcccacagacacctgtgtggttcactttctcccatcattaggtctctgctcagacatcacatctccaggaggcctaccctgagctgtctaaaatccctccctgtcacccagatccctctgctcctcctcccagctctgcctctccctgtggcatgtatcaccttctactctctcatatgatttacttatttcttctgattattgcccatctcccccaagagaatgtcagccccacgagggcagggattttgttctctcttcttcatccttgtgtccccagccccaaagcagagcctagcgcacagtaggggctccatacatgatttctcaaactcttgagctcaagcaatccacccgccttagcctcccaaagttctgggattatagacatgagccactgcacccggcaccatacatgatttctggggtgactgaaggatgcccttgttaaatgggacaatggaaggatcaagaagaaagaacagaggccgggcatggtctttcatgcctgtaatcctagcaattaaggaggccaaggccagcggatcacttgaggtcaggagttcgagaccagtctggccaacatggtgaaaccctgtctctactaaaaatacaaaaattagccaggtgtggtggcaggcgcctgtaattccagctactcaggaggctgaggcaggagaatcacttgaacccgggaggtggaagttgcagtgagctgagatcccgccattgcactccagcctgggcaacagagcgagactccatctcaaaaaaaaaaaaagaccagagaagggtgacagagccgtggtcagggaatgcccctcgtcaaggaagaatgacatttctgcagagccctaggtgggcctgcttgtcctccttacccccgccaccagcctcgtcctccccaggtgccgcctgcccctgtcaacaaggacgactttgccctggtccagcggcctggcccgggtctgtctcaggaggccgcccggcgctatggtgaactcaccaagctcatacggcagcagcacgaggtgagggggaggcccccagcccatcccccaggagcgtgaccctccttcccctctcttcccttccctcgactcactgccttctgtttccccagatgtgcctgaaccactcaaaccaattcacccag

SEQ ID NO: 20891 - DNA, 2300 bp, Homo sapien
ttttttgagacggagtcttgctctgtcacccaggctggagtacagtggcgtgatctcggctcactgcaacctccgcctccctggttctagtgattctcctgcctcaggctcctgagtagctgggactacaggcgcgcaccaccacacccagctaattttttgtatttttagtagagatggggtttcacagtgttagccaggatggtctcgatctcttgaccttgtgatccacctgcctcggcctcccaaagtgctgggattacaggtgtgagccaccgcgcctggccccccacaaagtttttaaaaaatttttttagagacgggggtctcaccattattgaccaggctggtctcaaactcctgggcttagagccatcctcctgcctcagcctccaaaagtgttgggattacaggcatgagccaccacacccagccaccattcttaaaatgttctacccactgcctcgttctgcttcaagacagctctttgagggggggggtttgtcatccccccactttttttttctttatttaataacagggttttattctgttgcccagagtggcgtgcagtggcacatagctcattgtaacctcaaacttgagcccagaggctcaagtgttcctcctgccttggcctcctgagtacctgggactgtgggtgtgcaccaccataccaggttagttattattattattattattattgaaacagagttttgctctgttgcccaggctggagtgcagtgatgtgatctccacttcccaggttcaagcgattctcgtgcctcagcctctggagtagctgggattacaggcacgtgccatcatgcccagctaatttttgtatttttagtagacaggatttcaccatgttgggctcgatgctctggaactcctgacctcaggtgatccgcctgcctaagcctcccaaagtgctgggattacaggtgtgagccatggagcccagcccaggctaatttttttttaaatttatttttagagacagggtctcactatattgcccagtctggtctcaaattcctggcctcaagagatccttctagccagatgtggtggctcatgcctgtaatccgagcactttgggaggccaaggtgggcaaatcacctgaggtcaggagttcgagaccagcctggccaacttggcgaaaccctgtctgtactaaaaatacaaaaattagctgggcatggtgggaggcgcctgtaatcccagctacttgggaggctgaggcgggagaatcacttgaaccccggaggtggaggttgcagtgagccgagatcacgccactgccctccagcctaggcgacagagtgacagagtgagactctgtctcaaaaaacaaaagagagatcctcctgtctcagcttcccaaagcactgggattacaggtataaaccccagcacccagcctgtcaatcccattttatgtgtgggaaagctgaggtctgggcaggagaaggacctgtctgaagccgccctgttggtaagttgtgggtctgggagaattgacctcatgtggagaccagcttgtcacccccatccacgggtgccaaagccctgggatatgccaggcactgttctgaatgcacacttcgtataatccttacaacactgtgggggagtgtggggtggtgagccaaccattaccccagaaagggaaaccaaggccctgagaggtggcacagcccaggttcaaacccaggcaggctggcaccaagctcacactcttaaccaccaggctgatgcctggatatatgtaatttccttccaggcggctgtggccatttgcggggggaggagggggcgggtgtctggagcaagaccagccagcagaggggaggtgggtgccgggcagcagacctggtcaggagctcccaggctggcatctgggctgccaggctaagctcaggcctccctaatccctcgctgctgcccgcccctgcttctcggaactctcctgtgccccgaagctccccccatccctccatccccacccctactcctgcggtcgtcccaaataccagacaggacgaatctcagcttttccccaaacattccttgttcttgtggcccggcccaggctggctgaggttacgaaagcagagatggggtggttgttgggggggaccaaggggacgggctggcctgtcctcaccaccccatccggccgcctgcccgtcctccccagggcggggaagggggtgggccagctcccccaaagccccgggagaacaggctgttgtggggggtggcatgggtctggagatggggggcggtg

SEQ ID NO: 20892 - DNA, 2300 bp, Homo sapien
tctcgtgggttcaagtgatcctccctcctctgcttcccaaagtgctgggcttacaggcatgagccaccgcacctggcctggtcatgtattttgagaaccttcttcaatctgggataaatgtctgatgttgtctaatggttagattgaggttctaggtttggggataatatcagacagttacaaatgtcctccctatcacatagctggggtccgtgatgtcagtatgacttatcactggtgatgttgattttgatcacttggttaaggcagtagctgccaggtgtccccactgtcttggagacagctttgctctccatggacgtagggtatgcaagaagcaggggaacctttggctaaagatacattgtgatggccgggcgcagtggctcacgcctgtaatctcagcactttgggagggtgaggtgggtggatcacttgaggtcaggagtttgagaccagcctagccaacatagtgaaaccctgtctctactaaaaatacaaagattagccgggcatggtggcacatgcctgtaatcccagctacttgggaggctgaggcaggagaatcgtttgcttgaacccgggaggtgaagggtgcagtgagttgagattgtgccattgcactccagcctgggcaacaagagcaaaactccatctcaaaaaaaaaaaaaaaaaaaaagatatgttgtgatattgtgttgtgatatatttttaaaaaaccatattttggtcttaggttttctagtacataactcctaaaacccttgaaatcagctgggcacagtggtttatgcctgtaatcccagcactttgggaggccaagacgggatgatcccttgaggtcaggagttttcgagcagcctgggcaacatagtgagaccccatctctacaaaaaaaatttttttaatgaagacaataaaaaaaaactatcttctagattgttcagaggattaaatgggctggccaggggtgggggctcacacctgtcctcccaacactttgggaagcagaggtgggaggatcacttgagcccaggtgttggagaccagcctggacaacttggtgaaactccgtccctacaaaaaatacaaaaaattaggccgggcgcggtggcttatgcccgtaattccagcactttgggaggcctaggcgggcggatcacctgaggtcaggagttcgcaaccagcctggccaacatagtgaaacctcgtctctactaaaaatacaaaaaattaggcaggcgtggtggcgcacgcctgtagtcctagctacatgagaggctgaggtgagaggatcatctgagcccggggtcgaggctgcagtgaaccgtgatcacgccactgcactccagcctgggtgacaaagtgagactctgtctaaaaaaataaaataaatgaggtaatgtatacgaatatgatgcacggagcggaccttcaacaattatttttattgctatgatctgcataattggcacaacagggccctgccacatcgaactgtttaagctcagaaccgtgtctgtcacatgtggagcgatccatgattgatgctatcattatcaccaccatcatcccaccaacccgcccatcggaaacaagctttcatcgaatcccatcgttttttccttttttgtaaatctctttcctcggcctggctctgccgcccaagtatgctcgtcaggcctttgcccacctggaccgggcgcgggcagcccggggctgaggattctcgagccttggtggaccacaggctcccgtcgccccgcccaagggcctggaccgcctgtggtctccatggaaacccgccagccacagggggcgtgacgccgttgagacagacagagatattcacctatcagatcaaagttatctgggcagggcgaacaaacgggacctccgagtggtacgtccttaaggcggggcgggaatacggcaacgggccgcgggggctgttactgtcgctaccaatcaagagtcgagatggctttgatggacaggcatagcgcgagtgcgggctttcgcccaaccggcgggccgctgtcccgaaaaaggaccaatgaggaggcggcaggggtggggcgaaggggccggttgctccggaagtggagggagggggtgaaaatggcgcccagctcgaaatcggagcggaacagcggggctgggagcggcggcggcggccccgggggagccggagggaagcgggcagcagggcggcggcgggagcacgtcctcaagcagctggagcgggtcaaggtgaggcctggagccggagtggggagcgcgccggagggtggggagta

SEQ ID NO: 20893 - DNA, 2300 bp, Homo sapien
gtcccgaaaaaggaccaatgaggaggcggcaggggtggggcgaaggggccggttgctccggaagtggagggagggggtgaaaatggcgcccagctcgaaatcggagcggaacagcggggctgggagcggcggcggcggccccgggggagccggagggaagcgggcagcagggcggcggcgggagcacgtcctcaagcagctggagcgggtcaaggtgaggcctggagccggagtggggagcgcgccggagggtggggagtagggacgagggaggcggagggaggagggcgttcgcggggtgaggggttgggggcggggccccaggggagggggctcggatgcagggcctgggcggggcccgggggagatggcttggatggagggggctcagttgggggcctggatgcaggtggttgtgtcgggtgaccggcaaaggggctgggatggagggggttgggggcggggccccagggagggggctcggagggaggcgaccccagaggccgcagggagaatcaggaggaagggggcgatccaggcttttcaaagctctgctcccatggttgctccataatggaaccttcccgccccctttgcagagcccctgccgctggctttgggcttcctccgcctgatgttcctctccctgcccaagccccgaccacacatgagctgggagttccagtacctgggtgggcctccccattgaaagtgtgggagctccctggatagggctgagtcttcccccgcagagtgagagttaccgaagcaggctctgtctcctccatcagactggaaactcccagagctgggggatgatgtctctctcccccatcagtttgggagctctggagggcagaaatgtggatctcttgcaggtgggcagtaactggggcaaggctgtgtctctgtggacagggactgcgccttctccgtgaggctggtagctttgtaagggcagtgctgtgtctcccccttttgactgggagctccctgggctgggacagtctccgcccttagcctgggagctccctgggcttggctgtggttccgcccttagcttggaagctccttgggcagggactgtgtctcccctgtcggcctgggcctggctggccaggctgtttcctccgtcagactgagacctccatgtggacagggctgtctcccatcagacagggagcttcccagacaggactcttcccatcagattggaatgtcttgaaggcagagttgggtagcaagactgaggctgttcggatatccctgtgcctggcttctgcctgtcagtccccgcagatccttccgcggtgaagttttggggatgagggattcccttggattccgttggaaggcggtagttaattgggaagggggcgttgggtcattggttaggctcacccttctatctgcctcgactggcccccagcagaggccagagctgccccggggaggaggagcccccttgtttgaaggctggtgggttgggaacagatgggtgcaggtcaggactctgtcccagcctccttagtaggataaatacccacagcttagggacagccttcagggagggaagcaggtggcccagcgtgggacagggtgattggggaactttcttgggggcggtgacgctgggctcagtcaagagggacctgaggctgaagaggtatggaactgggaaggtggcctgggtccctggtggagatgaaggctcaagcgcggtccatctggctttactgtccccatctgcctcagttgttcccaccttccagagcttggccttcttttgaccattatggtgggctgggccggtctggacccggtgagagccgctctgcctctctgccgtgggtgagggggctgggggctgcagatggtgcctgaagtgccctggccaccccttccccagatcagcggacagctctcccctcgcctcttccggaagctgcctccccgggtgtgcgtgtccctcaagaacattgtggatgaggacttcctctatgcagggtgaggctgggcccaggcaaagggggcaggtgggcgggagtggtgggctcgccctgacctggccgctgtgccccctccacccccacagacatatcttcctgggcttttccaaatgcggccgctacgtcctctcctacaccagcagcagtggggatgacgacttctccttctacatctaccatctgtactggtgggagttcaacgttcacagcaagctcaagctggtagggaggcttcaacaccaggctggcccttcagatggtgtggttcagcaggtcacagcaacctctgag

SEQ ID NO: 20894 - DNA, 2300 bp, Homo sapien
accaaatggaattgctgctatttacccattttgaaccataaaaatggtaatttctttttcttttttgagacagagtcttgctctgtagactggagtgcagtggttcgatctcggctcactgcaacctccacctcgcaggttctaagcgattctcctgcctcagcctccggaatagctgggattacagacatgtgccaccatgcccggctaattttgtatttttagtagagatggggtttcaccatgttggccaggctggtcttgaactcctgacctcaggtgatccacccacctcgggctcccaaagtgctgggattacaggcgtgagccactgtggccagccttcatttgttttgttttgttttgttttgttttagagacagggtctcactctgttgcccaggctggagtgcaatggtgtgatcatggctcactgcagcctcaaactcttgggctcaggtgatcctcctgcctcagcctccagaggagctgactacaggcacacgccaatatgcccagctaatttttttttatttttagtagagacagggttttgccatgttgcccagcctggtcttgaactactcggaccaagtgatcctcccgccttggcctcccaaagtgctgggattacaggtgtgagctaccatgccaggccctggtaatttcatatggttggatctaacacatggaatcttgatgatgaccccaggagtacatgatgatcattttacacccaaggaacctgaggctcagaggttgctgtgacctgctgaaccacaccatctgaagggccagcctggtgttgaagcctccctaccagcttgagcttgctgtgaacgttgaactcccaccagtacagatggtagatgtagaaggagaagtcgtcatccccactgctgctggtgtaggagaggacgtagcggccgcatttggaaaagcccaggaagatatgtctgtgggggtggagggggcacagcggccaggtcagggcgagcccaccactcccgcccacctgccccctttgcctgggcccagcctcaccctgcatagaggaagtcctcatccacaatgttcttgagggacacgcacacccggggaggcagcttccggaagaggcgaggggagagctgtccgctgatctggggaaggggtggccagggcacttcaggcaccatctgcagcccccagccccctcacccacggcagagaggcagagcggctctcaccgggtccagaccggcccagcccaccataatggtcaaaagaaggccaagctctggaaggtgggaacaactgaggcagatggggacagtaaagccagatggaccgcgcttgagccttcatctccaccagggacccaggccaccttcccagttccatacctcttcagcctcaggtccctcttgactgagcccagcgtcaccgcccccaagaaagttccccaatcaccctgtcccacgctgggccacctgcttccctccctgaaggctgtccctaagctgtgggtatttatcctactaaggaggctgggacagagtcctgacctgcacccatctgttcccaacccaccagccttcaaacaagggggctcctcctccccggggcagctctggcctctgctgggggccagtcgaggcagatagaagggtgagcctaaccaatgacccaacgcccccttcccaattaactaccgccttccaacggaatccaagggaatccctcatccccaaaacttcaccgcggaaggatctgcggggactgacaggcagaagccaggcacagggatatccgaacagcctcagtcttgctacccaactctgccttcaagacattccaatctgatgggaagagtcctgtctgggaagctccctgtctgatgggagacagccctgtccacatggaggtctcagtctgacggaggaaacagcctggccagccaggcccaggccgacaggggagacacagtccctgcccaaggagcttccaagctaagggcggaaccacagccaagcccagggagctcccaggctaagggcggagactgtcccagcccagggagctcccagtcaaaagggggagacacagcactgcccttacaaagctaccagcctcacggagaaggcgcagtccctgtccacagagacacagccttgccccagttactgcccacctgcaagagatccacatttctgccctccagagctcccaaactgatgggggagagagacatcatcccccagctctgggagtttccagtctgatggaggagacagagcctgcttcggtaactctcactc

SEQ ID NO: 20895 - DNA, 2300 bp, Homo sapien
gcagtggcagaatcttggttcactgcaacctccccctcccgggttcaagcaatcctcctacctcagcctccggagtagctgggattacaggcatacactaccatgcccagctaatttttgtagagacgggtgtcttgctttgttgccaaggctggtcttgaactccttggctcaagcaatcttccttgcttggcctcccaaagtgctgggattacaggtgtgagccaccataaatgaagtcacctttcttcacttgtatagcccagggccttgcaccgaggaaatataatgttggttgaattaggaaacaaacttaggtggagtcactttctgaatgccacacagcagggctggcattagacttcagggctgtctgagcctgttttcttttccccttgctgttctagggcctacctgggatgagaatgcaaaatttaagagaaggccaaagagctcagtcataagataattgacatttaaaacataaaaagtaggccgggcgtggtggctcacgcctgtaaccccagcactttgggaggccgaggcgggcggatcacgaggtcaggagatcgagaccatcctggctaacacggtgaaaccccgtctctactaaatatacaaaaaattagccgggcgtggtggcgagcacctgtagtcccagctactcgggaggctgaggcaggagaatggcgtgaacctgggaggcggagcttgcagtgagccgagattgcgccactgcactccagcctcagcgacagagtgagactccgtctcaaaaaataataataataaatttattttaaacacaagatctgaccctgagcttgcataacgcatctcaccttaatccctgtgttggcggatcctgtctttatttaaaattgtgatgttttgttcatcatagatttattttttcccattaatttggatatttaacaaatattgaattagaagattatttatcttgatgactgagtttttgctcccaagatgttcaccctagtccgggccctgtttctgtctcttctcgtcctgcagcacccagacagtcccttgaggaaactgaggcacagaggagcgtatgtgtgggaggtgtgtgtgtgtggcgggggttgtggtgagctctcctgggcggaccaagctccctgggctgggtcggggctgacctttgcttatctaccgcggttgaagccgcgaatgaagtcccccgccttgcagagacctttcccaaggcggccgcaccgcctgcggggcagagatagccgcggtcaccccggcagcggtgaccttttccggctggaggggaccgggaggcgggagaaggcgcggcggccgcgctgtctggccggcttgggcggaggaggatgtcaccccagcgggtgggagctgggatcgaaccccgccgcggcctcccgcttccacccaaccccgacggggccatgggcagtggggaagggggacgcgcgcccagtgacgtcatcgaatcccgagtccggccttcgccgctgtcgtcacagaggggctgcgctgcgtcactgcattcctcccctgacgtcagcgcaagaagccagaaactggcccaccgagcgagagagaagtctggagcggagtcttcctttctcgcctttttaatttggtaagacatgtaaagtgtacgcaagagcggactacaactcccaatcggccttgcgtgccgagcatgcgcacggcctccagccagagagcgcggcaaacctttggtagattgacgtccctttagtcgaaccaggaggccggttttacatcggcaaaccaatcccgtcctcacgagtcctacccctttattcttaaccagctgcttccctgccggagtgacgggcccggctgcctttgagggttcagtttcttttgatggacattcatactgataaatcagatcgccgggaagtccagagggtgttgaaaagcgtgcatcggaactaatagtttagctgcaaggcctggcgccgtccaatcacttctccggccgccgccaatcaccccgggccccgcccccgcgcgtgacgtaactagggtgggtagcaacagttgccccggtgagggaaacggaggcgccatagccacggtagtcgtggcgaccaagcaacccggcaacgcgagtcaacaacaacaaccgcccggccgacccccacccccaccccccaggcccggcccggggaccccagcacgtcccgtccccttcccaacatcgactccgagacctccgaaaagcgtttccgcagacagaagtggggagaagcggaggtaaccagggcggcccc
